(19) United States
(12) Patent Application Publication
(10) Pub. No.: US 2008/0171318 A1
(43) Pub. Date: Jul. 17, 2008

(54) Epigenetic Methods and Nucleic Acids for the Detection of Lung Cell Proliferative Disorders

(75) Inventors: Achim Plum, Berlin (DE); Tamas Rujan, Berlin (DE); Sabine Maier, Berlin (DE); Ralf Lesche, Berlin (DE); Alexander Graham, Cheshire (GB); Marie South, Cheshire (GB); Iacona Bailey, Wilmington, DE (US)

Correspondence Address: DAVIS WRIGHT TREMAINE, LLP/Seattle, 1201 Third Avenue, Suite 2200, SEATTLE, WA, 98101-3045, US

(73) Assignee: EPIGENOMICS AG, Berlin (DE)

(21) Appl. No.: 11/664,374

(22) PCT Filed: Sep. 30, 2005
(86) PCT No.: PCT/EP05/10611

§ 371 Date: Oct. 16, 2007

(30) Foreign Application Priority Data
Sep. 30, 2004 (EP) 04023300.9

(51) Int. Cl. C12Q 1/68; C07H 21/04

(52) U.S. Cl. 435/6; 536/22.1

(57) ABSTRACT

The invention provides methods, nucleic acids and kits for detecting, classifying and/or distinguishing between or among lung cell proliferative disorders. The invention discloses genomic sequences the methylation patterns of which have utility for the improved detection of and differentiation between said class of disorders, thereby enabling the improved diagnosis and treatment of patients.

### FIELD OF THE INVENTION

[0001] The present invention relates to genomic DNA sequences that exhibit altered CpG methylation patterns in lung cell proliferative disease states relative to normal. Particular embodiments provide methods, nucleic acids, nucleic acid arrays and kits useful for detecting, or for detecting and differentiating between or among lung cell proliferative disorders.

### BACKGROUND

[0002] DNA methylation. The aetiology of pathogenic states is known to involve modified methylation patterns of individual genes or of the genome. 5-methylcytosine, in the context of CpG dinucleotide sequences, is the most frequent covalently modified base in the DNA of eukaryotic cells, and plays a role in the regulation of transcription, genetic imprinting, and tumourigenesis. The identification and quantification of 5-methylcytosine sites in a specific specimen, or between or among a plurality of specimens, is thus of considerable interest, not only in research, but particularly for the molecular diagnoses of various diseases.

[0003] Correlation of aberrant DNA methylation with cancer. Aberrant DNA methylation within CpG ‘islands’ is characterised by hyper- or hypomethylation of CpG dinucleotide sequences leading to abrogation or overexpression of a broad spectrum of genes, and is among the earliest and most common alterations found in, and correlated with human malignancies. Additionally, abnormal methylation has been shown to occur in CpG-rich regulatory elements in intronic and coding parts of genes for certain tumours. In colon cancer, for example, aberrant DNA methylation constitutes one of the most prominent alterations and inactivates many tumour suppresser genes such as p14ARF, p16INK4a, THBS1, MINT2, and MINT31 and DNA mismatch repair genes such as hMLH1.

[0004] In contrast to the specific hypermethylation of tumour suppresser genes, an overall hypomethylation of DNA can be observed in tumour cells. This decrease in global methylation can be detected early, far before the development of frank tumour formation. A correlation between hypomethylation and increased gene expression has been determined for many oncogenes.

[0005] Lung Cancer incidence and treatment. Lung cancer is the leading cancer-related cause of death with 170,000 people in the USA and one million people worldwide dying every year. About 180,000 new cases are diagnosed every year with 85% of the patients presenting with advanced disease resulting in an overall 5-year survival of only 5% to 15%. In contrast, patients with Stage I disease have a 5-year-survival of about 60%-70%. Cigarette smoking is the major risk factor contributing 80% to the overall attributable risk. Other risks are exposure to asbestos and radon and, to some extend, genetic predisposition.

[0006] Lung cancer can be subdivided into four major histological types: adenocarcinoma, squamous cell carcinoma and large cell carcinoma, subsumed under the term non-small cell lung carcinoma (NSCLC), and small cell lung carcinoma (SCLC).

[0007] SCLC, which accounts for 20% of the lung cancers, originates from epithelial cells with neuro-endocrine features. It progresses rapidly and usually is detected only in far advanced stages. Chemo- and radiotherapy are the treatments of choice.

[0008] NSCLC accounts for the other 80% of lung cancers. While adenocarcinoma arise from alveolar or bronchiolar epithelial or mucin-producing cells, squamous cell carcinoma is derived from bronchial epithelium. Large cell carcinoma is a less differentiated form of adenocarcinoma or squamous cell carcinoma without an apparent glandular of squamous cell phenotype.

[0009] Genetic mutations associated with lung cancer. A number of mutations and gene expression changes affecting proto-oncogenes and tumour suppresser genes have been described for lung cancer and some of them could be linked to the early or late stages of tumourigenesis and prognosis for the patient.

[0010] Among the most common and earliest genetic alterations detectable in lung cancer is a loss of heterozygosity (LOH) on short arm of chromosome 3 which occurs in 90% of the SCLC tumours and more than 80% of NSCLC lesions. Although several tumour suppresser genes have been mapped to affected regions on 3p such as RARB, FHIT, RASSF1, SEMA3B, and CACNA2D2 it is presently unclear which of these the key players are and in how far they contribute to tumourigenesis.

[0011] Activating point mutations in the KRAS2 oncogene are also considered to occur early in NSCLC tumourigenesis and are associated with poor prognosis. Mutations in KRAS2 are found in 15-20% of all NSCLC tumours but practically never occur in SCLC. The mutations mostly occur in codon 12 and strongly correlate with a history of smoking.

[0012] Typically, alterations in the signalling pathway regulating the G1/S transition of the cell cycle are altered early in lung cancer development: In 90% of SCLC tumours deletions, nonsense mutations, and splice site mutations are found in RB while expression of CDKN2A coding for p16 is diminished in 70% of NSCLC tumours but rarely in SCLC.

[0013] Alterations in the tumour suppresser gene TP53 coding for p53 are the most frequent alterations found in lung cancer but are assumed to occur later in tumour development than 3p alterations, KRAS2 mutations and deregulation of the G1/S transition. Mutations in TP53 are found in about 90% of SCLC and about 50% of NSCLC tumours and certain mutational hotspots correlate with exposure to tobacco smoke.

[0014] Overexpression of MYC, either due to gene amplification or transcriptional deregulation, is considered a rather late event in lung tumourigenesis seen in 15-30% of SCLC and 5-10% of NSCLC tumours. It is associated with a poor prognosis for the affected patients.

[0015] The anti-apoptotic BCL2 protein is overexpressed in the fast majority of SCLC tumours (75%-95%) but not so common in adenocarcinomas (10%) and squamous cell carcinoma (25%-30%).

[0016] The epidermal growth factor receptor gene (EGFR) is commonly overexpressed in NSCLC but not in SCLC and associated with a poor prognosis.

[0017] In lung cancer a number of proven or putative tumour suppresser genes were found to be methylated in their promoter region.

[0018] Three of the putative tumour suppressor genes that map to chromosome 3p—RARB, RASSF1, FHIT, and SEMA3B were shown to be frequently hypermethylated in lung cancer.

[0019] Retinoic acid receptor β (RARB) expression is frequently downregulated in lung cancer and bronchial epithelium of heavy smokers. This downregulation is often mediated by methylation of RARB gene regulatory sequences. In one study, 43% of NSCLC tumours and 62% of SCLC tumours showed hypermethylation at the RARB locus which closely correlated with downregulation of RARB expression.

[0020] RASSF1 encodes several transcripts originating from alternative promoters. The expression of one of these transcripts, RASSF1A is frequently lost in lung cancer due to hypermethylation of the respective promoter. RASSF1A methylation is observed in 30-40% of NSCLC tumours and 79-85% in SCLC tumours compared to normal lung tissue.

[0021] Aberrant FHIT mRNA and protein expression is also a common phenomenon in lung cancer. In NSCLC these findings correlate well with the hypermethylation of the FHIT promoter (37%).

[0022] SemA3B was found to be hypermethylated in 41% of NSCLC tumours. Hypermethylation correlated significantly with LOH at 3p21.3 and most affected tumours lacked of SEMA3B expression.

[0023] Another LOH frequently observed in lung cancer is located on 9p21 were CDKN2A coding for p16ink4 maps. Methylation of the remaining allele was frequently observed in NSCLC but rarely in SCLC which is in line with mRNA and protein expression data.

[0024] Methylation and lung cancer. Adenomatous polyposis coli (APC) is a tumour suppresser genes well known for its role in familiar and sporadic colon cancer that was also shown to be downregulated by methylation in lung cancer. Depending on the study, 46% to 96% of NSCLC but only 15% of the SCLC tumours show hypermethylation of the APC promoter 1A. Other genes known to be aberrantly methylated in NSCLC include CDH13 (43%-45%), CDH1 (15%-33%), TIMP3 (19%-26%), MGMT (16%-27%), DAPK1 (16%-44%), GSTP1 (7%-12%), CDKN2B/p14 (6%-8%), RUNX3 (3%-24%), IGSF4 (44%), SOCS3 (78%), CHFR (10%), CCND2 (40%), PAX5, LAMB3 (22%-42%), TMS1 (40%), BLU (19%), MYO18B (55%), hMHL (56%), hMSH2, IGFBP3 (62%), SLIT2 (53%), PTEN, COX2/PTGS2 (55%), ESR1, EDNRB, REIC/DKK3, SRBC/CD2, BMP3B (45%), H19/CD59, and HRAS (37%).

[0025] Multifactorial approach. Cancer diagnostics has traditionally relied upon the detection of single molecular markers (e.g. gene mutations, elevated PSA levels). Unfortunately, cancer is a disease state in which single markers have typically failed to detect or differentiate many forms of the disease. Thus, assays that recognise only a single marker have been shown to be of limited predictive value, as well be discussed briefly herein. A successful approach currently being pursued in methylation based cancer diagnostics and the screening, diagnosis, and therapeutic monitoring of such diseases is the use of a selection of multiple markers. The multiplexed analytical approach is particularly well suited for cancer diagnostics since cancer is not a simple disease, this multi-factorial “panel” approach is consistent with the heterogeneous nature of cancer, both cytologically and clinically.

[0026] Several groups have investigated panels of aberrantly methylated genes in primary lung cancer samples. Zochbauer-Müller et al. (Cancer Res. 2001 Jan. 1; 61(1):249-55) looked at the methylation of 8 genes in 107 NSCLC tumours and matching normal tissue. They found that, at least one of RARB, TIMP3, CDKN2A, CDKN2B, MGMT, DAPK1, CDH1, GSTP1 was aberrantly methylated in 82% of the NSCLC tumours. Significant differences were found for CDKN2A in adenocarcinomas compared to squamous cell carcinoma and in TIMP3, CDKN2A, and DAPK1 in a female vs. male comparison. Harden et al. (Clin Cancer Res. 2003 April; 9(4):1370-5) showed methylation in at least one gene in a panel consisting of CDKN2A, MGMT, GSTP1, APC, and DAPK1 in 81% of Stage I lung cancers. Toyooka et al. (Mol Cancer Ther. 2001 November; 1(1):61-7) compared methylation of CDKN2A, APC, GSTP1, CDH13, MGMT, RARB, CDH1, and RASSF1A in NSCLC, SCLC, and carcinoids and found different patterns of methylation in SCLC and carcinoids compared to NSCLC and between adenocarcinomas and squamous cell carcinomas within the NSCLC group. Yanagawa et al. (Cancer Sci. 2003 July; 94(7):589-92) looked at methylation in a panel consisting of APC, DAPK, CDH1, GSTP1, hMLH1, CDKN2A, RASSF1A, and RUNX3. Of this panel CDKN2A, RASSF1A and RUNX3 were most frequently methylated in tumours but rarely in normal adjacent tissue.

[0027] The prognosis for lung cancer patients is strongly correlated with the stage of disease at the time of diagnosis. The five year survival rate for Stage I lung cancer is in the range of 60%-70% while in late stage lung cancer it is reduced to as little as 5%-15%. Thus, early diagnosis is of pivotal importance in the management of this disease. Currently there is no recommendation for screening in lung cancer. Screening trials on long term smokers using chest radiography and sputum cytology failed to reduce lung cancer mortality. Some success has been achieved with low-dose spiral CT scanning. However, this approach is hampered by the high rate of benign nodules detected. Although biomarkers for lung cancer have not yet been clinically validated they could offer interesting alternatives for screening of asymptomatic individuals. Such biomarkers should have a high sensitivity and specificity and appear early enough in the course of the disease to improve prognosis after medical intervention. Most importantly the makers must be detectable in bodily fluids that are easy to obtain to make biomarker analysis feasible in population wide screening programs. Methylation based biomarkers are promising candidates to fulfil these criteria in lung cancer. Methylation changes are early events in lung cancer development and most cancers were shown to have undergone methylation changes in one or several genes. Also, aberrant methylation in lung cancer related genes can be detected in DNA from plasma, serum, sputum, bronchoalveolar lavages, bronchial aspirates, and bronchial brush samples. In one study, Belinsky et al. were able to predict the occurrence of squamous cell carcinoma based on methylation status of CDKN2A/p16 in sputum up to 3 years in advance.

[0028] Background of genes associated with the invention. Amphiregulin (AREG) was isolated as a glycoprotein that inhibits growth of certain human tumour cells and stimulates proliferation of human fibroblasts and other normal and tumour cells. The C-terminal half of the protein exhibited striking homology to the epidermal growth factor (EGF) family of proteins. Amphiregulin binds to the EGF receptor with lower affinity than EGF. Overexpression of AREG in NSCLC was reported by several groups.

[0029] EGF and ADAM17/TACE are proteases the releases amphiregulin from the cell surface. Serum levels of patients with squamous cell carcinoma have significantly lower levels of IGF1 than patients with adenocarcinoma (Lee D Y, Kim S J, Lee Y C. Serum insulin-like growth factor (IGF)-I and IGF-binding proteins in lung cancer patients. J Korean Med Sci. 1999 August; 14(4):401-4). IGF1 has been reported as aberrantly methylated in cancers, but not in lung cancer Schneid H, Seurin D, Noguiez P, Le Bouc Y. Abnormalities of insulin-like growth factor (IGF-I and IGF-II) genes in human tumor tissue. Growth Regul. 1992 March; 2(1):45-54.

[0030] Neuregulin encoded by NRG is another growth factor of the EGF family. Neuregulin is highly expressed in many regions of the brain. Using a tagged version of the NRG3 EGF-like domain, Zhang et al. (1997) demonstrated that NRG3 can bind to the extracellular domain of the ERBB4 receptor tyrosine kinase. Later, Hijazi et al. reported that NRG3 is also able to activate other receptors of the erbb family including EGFR. They further found that recombinant NRG3 altered the growth of human breast cancer cells and concluded that NRG3 is potentially a regulator of normal and malignant breast epithelial cells.

[0031] RASGRP1 and RASGRP2 (RAS guanyl nucleotide-releasing protein 1/2) both belong to a family of genes characterised by the presence of a Ras superfamily guanine nucleotide exchange factor (GEF) domain. As indicated by their name, they are capable of activating Ras proteins by exchanging GDP with GTP.

[0032] Recently, Bivona et al. demonstrated that in response to Src-dependent activation of phospholipase C gamma1, RASGRP1 translocates to the Golgi where it activates RAS proteins. They concluded that activation of Ras on Golgi has important biological consequences and proceeds through a pathway distinct from the one that activates Ras on the plasma membrane. RASGRP1 can counteract signalling of activated KRAS or HRAS by specific activation of RAP1A. KRAS2 is frequently mutated in NSCLC. Hypermethylation of RASGRP1 or RASGRP2 was not reported to date.

[0033] RASGRF1 encodes the ras protein-specific guanine nucleotide releasing-factor 1, a 55 kDA protein that triggers the release of bound GDP specifically from RAS but not from RAP1A. Release of GDP is a prerequisite for RAS to return into its active state with GTP bound. In mice RASGRF1 was shown to be imprinted and expression was dependent on methylation of a differential methylation domain about 30 kb upstream of the gene.

[0034] FOXF1 encodes the transcription factor forkhead box f1 also known as forkhead-related activator 1. There are no previous reports on methylation of this gene in lung cancer. Mice with heterozygous deletion of the Foxf1 gene show severely impaired lung development (Mahlapuu M, Enerback S, Carlsson P. Haploinsufficiency of the forkhead gene Foxf1, a target for sonic hedgehog signalling, causes lung and foregut malformations. Development. 2001 June; 128(12):2397-406). FOXF1 activates the transcription of lung-specific genes such as SPB, the gene encoding surfactant protein b and CC10 encoding the 10 kDa clara cell protein.

[0035] MDR1/ABCB1. The ABCB1 gene is better known as MDR1 (multidrug resistance gene 1). It encodes a large transmembrane protein that is an integral part of the blood-brain barrier and functions as a pump transporting a variety of drugs from the brain back into the blood. Drug resistance in acute myeloid leukaemia is characterised by the expression of the MDR1 gene product. Kantharidis et al. (1997) found a tight correlation between the MDR phenotype and demethylation of the 5′ region of the MDR1 gene in a human T cell leukaemia cell line suggesting that the MDR phenotype may be acquired as a result of changes in methylation of the MDR1 promoter.

[0036] AKT2 is a putative cellular homologue of the v-akt oncogene encoding an isoform of the phosphoinositide-dependent serine-threonine protein kinase Akt. However, Cheng et al. showed that AKT2 was amplified and overexpressed in 2 of 8 ovarian carcinoma cell lines and 2 of 15 primary ovarian tumours. Later, the same group demonstrated that AKT2 is also amplified in approximately 10% of pancreatic carcinomas. Furthermore, tumourigenicity in nude mice was markedly reduced in the pancreatic cancer cells expressing antisense AKT2 RNA (Cheng, J. Q.; Ruggeri, B.; Klein, W. M.; Sonoda, G.; Altomare, D. A.; Watson, D. K.; Testa, J. R.: Amplification of AKT2 in human pancreatic cancer cells and inhibition of AKT2 expression and tumourigenicity by antisense RNA. Proc. Nat. Acad. Sci. 93: 3636-3641, 1996). These data suggested that overexpression of AKT2 contributes to the malignant phenotype of a subset of human ductal pancreatic cancers. DNA methylation in NSCLC or other cancers is not described for this gene so far.

[0037] PIK3CA encodes the catalytic subunit of phosphatidylinositol 3-kinase. The kinase is composed of two subunits with 85 kDa and 110 kDa. The 85 kD subunit lacks PI3-kinase activity and acts as an adapter, coupling the 110-kDa catalytic subunit (p110) to activated protein tyrosine kinases via IRS1/2. PI3-kinase can also be activated via RAS. P110 can activate AKT kinase via phosphorylation of phosphatidylinositol(4,5)phosphate in the cell membrane or other pathways by direct interaction with cytosolic proteins. Activation of PI3K in neoplastic cells was shown to inhibit apoptosis and enhance cell survival, cell cycle, and transformation. Gain-of-function mutations were found in some colon, brain and gastrointestinal tumours but rarely in lung and breast cancer. Amplification was reported as an other mechanism of oncogene activation in some cancers. The PIK3CA promoter is not associated with a CpG-island and there are no reports on differential methylation of PIK3CA in lung or other cancers. PAK7 belongs to the PAK B subfamily of p21-activated kinases and is expressed at high levels in brain and lower levels in other tissues.

[0038] The gene BCL2, is known to be over expressed in some NSCLCs, LOH and concomitant hypermethylation of the gene locus has also been reported (Cancer Res. 1996 Apr. 15; 56(8):1886-91). ESR1 encodes the estrogen receptor α, a nuclear hormone receptor that upon binding of estrogen translocates from the cytoplasm to the cell nucleus and can directly act as a transcription factor. Although epidemiology suggests a possible role for estrogens in lung cancer, there are conflicting results on the expression of the receptor protein in NSCLC. Nevertheless, cell line experiments suggest functionality of estrogen signalling in NSCLC cells. ESR1 promoter hypermethylation was previously found in a subset of lung tumours and was inversely correlated to the exposure to tobacco smoke. The hypermethylation of the ESR1 promoter in some NSCLC tumours could be confirmed in this study. In addition to the typical activating point mutations in the proto-oncogene HRAS in many cancers, methylation is also described for the HRAS gene. Vachtenheim et al. found hypomethylation of CCGG sites in the 3′ region of the gene and that was associated with the loss of the second HRAS allele in non-small cell lung cancer. GSTP1 encodes the glutathione s-transferase pi a detoxifying enzyme typically overexpressed in multidrug-resistant cells. Numerous authors report hypermethylation of the GSTP1 promoter in 1%-12% of the NSCLC tumours. IGF1 encoding the insulin-like growth factor was reported in to be aberrantly methylated in some primary tumours, but not in NSCLC. The same applies for FOS which was shown to be aberrantly methylated in gastrointestinal cancer, hepatocellular cancer, and gliomas but not analysed in lung cancer. For STAT1 there is indirect evidence for a regulation by methylation that is based on the finding that STAT1 expression can be induced by inhibition of DNA methylation in colon cancer cell lines but no previous reports on methylation of STAT1 in lung cancer were found. Similarly, SHC1 was reported to be regulated by two alternative promoters, one of which could be activated by DNA methylation inhibitors.

[0039] Development of medical tests. Key to the successful implementation of a panel approach to methylation based diagnostic tests is the design and development of optimised panels of markers that can characterise and distinguish disease states. This patent application describes an efficient and unique panel of genes the methylation analysis of one or a combination of the members of the panel enabling the detection of lung cell proliferative disorders with a particularly high sensitivity, specificity and/or predictive value.

[0040] Two key evaluative measures of any medical screening or diagnostic test are its sensitivity and specificity, which measure how well the test performs to accurately detect all affected individuals without exception, and without falsely including individuals who do not have the target disease (predictive value). Historically, many diagnostic tests have been criticised due to poor sensitivity and specificity.

[0041] A true positive (TP) result is where the test is positive and the condition is present. A false positive (FP) result is where the test is positive but the condition is not present. A true negative (TN) result is where the test is negative and the condition is not present. A false negative (FN) result is where the test is negative but the condition is not present.

Sensitivity=TP/(TP+FN)

Specificity=TN/(FP+TN)

Predictive value=TP/(TP+FP)

[0042] Sensitivity is a measure of a test's ability to correctly detect the target disease in an individual being tested. A test having poor sensitivity produces a high rate of false negatives, i.e., individuals who have the disease but are falsely identified as being free of that particular disease. The potential danger of a false negative is that the diseased individual will remain undiagnosed and untreated for some period of time, during which the disease may progress to a later stage wherein treatments, if any, may be less effective. An example of a test that has low sensitivity is a protein-based blood test for HIV. This type of test exhibits poor sensitivity because it fails to detect the presence of the virus until the disease is well established and the virus has invaded the bloodstream in substantial numbers. In contrast, an example of a test that has high sensitivity is viral-load detection using the polymerase chain reaction (PCR). High sensitivity is achieved because this type of test can detect very small quantities of the virus. High sensitivity is particularly important when the consequences of missing a diagnosis are high.

[0043] Specificity, on the other hand, is a measure of a test's ability to identify accurately patients who are free of the disease state. A test having poor specificity produces a high rate of false positives, i.e., individuals who are falsely identified as having the disease. A drawback of false positives is that they force patients to undergo unnecessary medical procedures treatments with their attendant risks, emotional and financial stresses, and which could have adverse effects on the patient's health. A feature of diseases which makes it difficult to develop diagnostic tests with high specificity is that disease mechanisms, particularly in cancer, often involve a plurality of genes and proteins. Additionally, certain proteins may be elevated for reasons unrelated to a disease state. An example of a test that has high specificity is a gene-based test that can detect a p53 mutation. Specificity is important when the cost or risk associated with further diagnostic procedures or further medical intervention are very high.

### SUMMARY OF THE INVENTION

[0044] The present invention provides novel methods for detecting and/or differentiating between lung cell proliferative disorders, in particular lung cancer.

[0045] The invention solves a longstanding need in the art for improved means of cancer diagnostics and classification by providing a panel of genes and genomic sequences thereof (according to the sequence listing), the methylation status of CpG positions of these genes and/or their promoter regions being indicative of lung cell proliferative disorders (in particular cancer) or features thereof. Preferred selections and combinations of genes are provided, the methylation analysis of which enable the differentiation and detection of various classes of lung cell proliferative disorders, namely:
[0046] Detection of lung cell proliferative disorders, preferably non small cell lung cancer (hereinafter also referred to as NSCLC).
[0047] Molecular classification (hereinafter also referred to as differentiation) of lung squamous cell carcinoma and lung adenocarcinoma.
[0048] Detection of lung squamous cell carcinoma.
[0049] Detection of lung adenocarcinoma.

[0050] In order to enable this analysis, the invention provides a method for the analysis of biological samples for genomic methylation associated with the development of lung cell proliferative disorders. Said method is characterised in that at least one nucleic acid, or a fragment thereof, from the group consisting of SEQ ID NO: 1 to SEQ ID NO: 56 is/are contacted with a reagent or series of reagents capable of distinguishing between methylated and non methylated CpG dinucleotides within the genomic sequence, or sequences of interest.

[0051] The present invention provides a method for ascertaining genetic and/or epigenetic parameters of genomic DNA. The method has utility for the improved diagnosis, differentiation and treatment of lung cell proliferative disorders, more specifically by enabling the improved identification of and differentiation between subclasses of said disorder. The invention presents several improvements over the state of the art. Although aberrant methylation as a hallmark of lung cancer is known there are currently no methylation markers that are suitably accurate and robust for use in a clinically approved (e.g. U.S. FDA) publicly available assay.

[0052] The test sample may be from any suitable source, such as cell lines, histological slides, biopsies, paraffin-embedded tissue, bodily fluids, sputum, blood plasma, blood serum, whole blood, isolated blood cells, cells isolated from the blood and all possible combinations thereof.

[0053] Specifically, the present invention provides a method for detecting lung cell proliferative disorders, comprising: obtaining a biological sample comprising genomic nucleic acid(s); contacting the nucleic acid(s), or a fragment thereof, with one reagent or a plurality of reagents sufficient for distinguishing between methylated and non methylated CpG dinucleotide sequences within a target sequence of the subject nucleic acid, wherein the target sequence comprises, or hybridises under stringent conditions to, a sequence comprising at least 16 contiguous nucleotides of SEQ ID NO: 1 to SEQ ID NO: 56, said contiguous nucleotides comprising at least one CpG dinucleotide sequence; and determining, based at least in part on said distinguishing, the methylation state of at least one target CpG dinucleotide sequence, or an average, or a value reflecting an average methylation state of a plurality of target CpG dinucleotide sequences. Preferably, distinguishing between methylated and non methylated CpG dinucleotide sequences within the target sequence comprises methylation state-dependent conversion or non-conversion of at least one such CpG dinucleotide sequence to the corresponding converted or non-converted dinucleotide sequence within a sequence selected from the group consisting of SEQ ID NO: 236 to SEQ ID NO: 347, and contiguous regions thereof corresponding to the target sequence.

[0054] Additional embodiments provide a method for the detection of lung cell proliferative disorders, comprising: obtaining a biological sample having subject genomic DNA; extracting the genomic DNA; treating the genomic DNA, or a fragment thereof, with one or more reagents to convert 5-position unmethylated cytosine bases to uracil or to another base that is detectably dissimilar to cytosine in terms of hybridisation properties; contacting the treated genomic DNA, or the treated fragment thereof, with an amplification enzyme and at least two primers comprising, in each case a contiguous sequence at least 9 nucleotides in length that is complementary to, or hybridises under moderately stringent or stringent conditions to a sequence selected from the group consisting SEQ ID NO: 236 to SEQ ID NO: 347, and complements thereof, wherein the treated DNA or the fragment thereof is either amplified to produce an amplificate, or is not amplified; and determining, based on a presence or absence of, or on a property of said amplificate, the methylation state of at least one CpG dinucleotide sequence selected from the group consisting of SEQ ID NO: 1 to SEQ ID NO: 56, or an average, or a value reflecting an average methylation state of a plurality of CpG dinucleotide sequences thereof. Preferably, at least one such hybridising nucleic acid molecule or peptide nucleic acid molecule is bound to a solid phase. Preferably, determining comprises use of at least one method selected from the group consisting of: hybridising at least one nucleic acid molecule comprising a contiguous sequence at least 9 nucleotides in length that is complementary to, or hybridises under moderately stringent or stringent conditions to a sequence selected from the group consisting of SEQ ID NO: 236 to SEQ ID NO: 347, and complements thereof; hybridising at least one nucleic acid molecule, bound to a solid phase, comprising a contiguous sequence at least 9 nucleotides in length that is complementary to, or hybridises under moderately stringent or stringent conditions to a sequence selected from the group consisting of SEQ ID NO: 236 to SEQ ID NO: 347, and complements thereof; hybridising at least one nucleic acid molecule comprising a contiguous sequence at least 9 nucleotides in length that is complementary to, or hybridises under moderately stringent or stringent conditions to a sequence selected from the group consisting of SEQ ID NO: 236 to SEQ ID NO: 347, and complements thereof, and extending at least one such hybridised nucleic acid molecule by at least one nucleotide base; and sequencing of the amplificate.

[0055] Further embodiments provide a method for the analysis of lung cell proliferative disorders, comprising: obtaining a biological sample having subject genomic DNA; extracting the genomic DNA; contacting the genomic DNA, or a fragment thereof, comprising one or more sequences selected from the group consisting of SEQ ID NO: 1 to SEQ ID NO: 56 or a sequence that hybridises under stringent conditions thereto, with one or more methylation-sensitive restriction enzymes, wherein the genomic DNA is either digested thereby to produce digestion fragments, or is not digested thereby; and determining, based on a presence or absence of, or on property of at least one such fragment, the methylation state of at least one CpG dinucleotide sequence of one or more sequences selected from the group consisting of SEQ ID NO: 1 to SEQ ID NO: 56, or an average, or a value reflecting an average methylation state of a plurality of CpG dinucleotide sequences thereof. Preferably, the digested or undigested genomic DNA is amplified prior to said determining.

[0056] Additional embodiments provide novel genomic and chemically modified nucleic acid sequences, as well as oligonucleotides and/or PNA-oligomers for analysis of cytosine methylation patterns within sequences from the group consisting of SEQ ID NO: 1 to SEQ ID NO: 56.

### BRIEF DESCRIPTION OF THE DRAWINGS

[0057] FIG. 1 shows a ranked matrix of data obtained according to the microarray analysis of Example 1 of CpG methylation differences between the two classes of tissues, (lung cancer and NAT) using univariate analysis. The most significant CpG positions are at the bottom of the matrix with significance decreasing towards the top. Red indicates total methylation at a given CpG position, green represents no methylation at the particular position. Each row represents one specific CpG position within a gene and each column represents the methylation profile for the different CpGs for one sample. The scale at the bottom of the figure enables the relative calibration of methylation levels at each position of the matrix from −2 (total non methylation) to 2 (complete methylation). SEQ ID NOs: of the relevant detection oligonucleotides are shown on the left hand side of the matrix.

[0058] FIG. 2 shows a ranked matrix of data obtained according to the microarray analysis of Example 1 of CpG methylation differences between the two classes of tissues, (lung cancer and NAT) using multivariate analysis. The most significant CpG positions are at the bottom of the matrix with significance decreasing towards the top. Red indicates total methylation at a given CpG position, green represents no methylation at the particular position. Each horizontal block represents one region of interest of a gene and each row thereof a specific CpG position within said region of interest. Each column represents the methylation profile for the different CpGs for one sample. The scale at the bottom of the figure enables the relative calibration of methylation levels at each position of the matrix from −2 (total non methylation) to 2 (complete methylation).

[0059] FIG. 3 shows a ranked matrix of data obtained according to the microarray analysis of Example 1 of CpG methylation differences between the two classes of tissues, (lung adenocarcinoma and lung squamous cell carcinoma) using univariate analysis. The most significant CpG positions are at the bottom of the matrix with significance decreasing towards the top. Red indicates total methylation at a given CpG position, green represents no methylation at the particular position. Each row represents one specific CpG position within a gene and each column represents the methylation profile for the different CpGs for one sample. The scale at the bottom of the figure enables the relative calibration of methylation levels at each position of the matrix from −2 (total non methylation) to 2 (complete methylation). SEQ ID NOs: of the relevant detection oligonucleotides are shown on the left hand side of the matrix.

[0060] FIG. 4 shows a ranked matrix of data obtained according to the microarray analysis of Example 1 of CpG methylation differences between the two classes of tissues, (lung adenocarcinoma and lung squamous cell carcinoma) using multivariate analysis. The most significant CpG positions are at the bottom of the matrix with significance decreasing towards the top. Red indicates total methylation at a given CpG position, green represents no methylation at the particular position. Each horizontal block represents one region of interest of a gene and each row thereof a specific CpG position within said region of interest. Each column represents the methylation profile for the different CpGs for one sample. The scale at the bottom of the figure enables the relative calibration of methylation levels at each position of the matrix from −2 (total non methylation) to 2 (complete methylation).

[0061] FIG. 5 shows a ranked matrix of data obtained according to the microarray analysis of Example 1 of CpG methylation differences between the two classes of tissues, (lung adenocarcinoma and NAT) using univariate analysis. The most significant CpG positions are at the bottom of the matrix with significance decreasing towards the top. Red indicates total methylation at a given CpG position, green represents no methylation at the particular position. Each row represents one specific CpG position within a gene and each column represents the methylation profile for the different CpGs for one sample. The scale at the bottom of the figure enables the relative calibration of methylation levels at each position of the matrix from −2 (total non methylation) to 2 (complete methylation). SEQ ID NOs: of the relevant detection oligonucleotides are shown on the left hand side of the matrix.

[0062] FIG. 6 shows a ranked matrix of data obtained according to the microarray analysis of Example 1 of CpG methylation differences between the two classes of tissues, (lung adenocarcinoma and NAT) using multivariate analysis. The most significant CpG positions are at the bottom of the matrix with significance decreasing towards the top. Red indicates total methylation at a given CpG position, green represents no methylation at the particular position. Each horizontal block represents one region of interest of a gene and each row thereof a specific CpG position within said region of interest. Each column represents the methylation profile for the different CpGs for one sample. The scale at the bottom of the figure enables the relative calibration of methylation levels at each position of the matrix from −2 (total non methylation) to 2 (complete methylation).

[0063] FIG. 7 shows a ranked matrix of data obtained according to the microarray analysis of Example 1 of CpG methylation differences between the two classes of tissues, (lung squamous cell carcinoma and NAT) using univariate analysis. The most significant CpG positions are at the bottom of the matrix with significance decreasing towards the top. Red indicates total methylation at a given CpG position, green represents no methylation at the particular position. Each row represents one specific CpG position within a gene and each column represents the methylation profile for the different CpGs for one sample. SEQ ID NOs: of the relevant detection oligonucleotides are shown on the left hand side of the matrix.

[0064] FIG. 8 shows a ranked matrix of data obtained according to the microarray analysis of Example 1 of CpG methylation differences between the two classes of tissues, (lung squamous cell carcinoma and NAT) using multivariate analysis. The most significant CpG positions are at the bottom of the matrix with significance decreasing towards the top. Red indicates total methylation at a given CpG position, green represents no methylation at the particular position. Each horizontal block represents one region of interest of a gene and each row thereof a specific CpG position within said region of interest. Each column represents the methylation profile for the different CpGs for one sample. The scale at the bottom of the figure enables the relative calibration of methylatin levels at each position of the matrix from −2 (total non methylation) to 2 (complete methylation).

[0065] FIGS. 9 to 16 provide greyscale versions of FIGS. 1 to 8 respectively.

### DETAILED DESCRIPTION OF THE INVENTION

### Definitions

[0066] The term “CpG island” refers to a contiguous region of genomic DNA that satisfies the criteria of (1) having a frequency of CpG dinucleotides corresponding to an “Observed/Expected Ratio”>0.6, and (2) having a “GC Content”>0.5.CpG islands are typically, but not always, between about 0.2 to about 1 kb, or to about 2 kb in length.

[0067] The term “methylation state” or “methylation status” refers to the presence or absence of 5-methylcytosine (“5-mCyt”) at one or a plurality of CpG dinucleotides within a DNA sequence. Methylation states at one or more particular CpG methylation sites (each having two CpG CpG dinucleotide sequences) within a DNA sequence include “unmethylated,” “fully-methylated” and “hemi-methylated.”

[0068] The term “hemi-methylation” or “hemimethylation” refers to the methylation state of a double stranded nucleic acid, where only one strand thereof is methylated.

[0069] The term ‘AUC’ as used herein is an abbreviation of “area under the curve”. In particular it refers to the area under a Receiver Operating Characteristic (ROC) curve. The ROC curve is a plot of the true positive rate against the false positive rate for the different possible cutpoints of a diagnostic test. It shows the trade-off between sensitivity and specificity depending on the selected cut-off point (any increase in sensitivity will be accompanied by a decrease in specificity). The area under an ROC curve (AUC) is a measure of the accuracy of a diagnostic test (the larger the area the better, optimum is 1, a random test would have a ROC curve lying on the diagonal with an area of 0.5; for reference: J. P. Egan. Signal Detection Theory and ROC Analysis, Academic Press, New York, 1975).

[0070] The term “hypermethylation” refers to the average methylation state corresponding to an increased presence of 5-mCyt at one or a plurality of CpG dinucleotides within a DNA sequence of a test DNA sample, relative to the amount of 5-mCyt found at corresponding CpG dinucleotides within a normal control DNA sample. Alternatively the term “hypermethylation” may be defined as relative to a cut-off point. It is particularly preferred that said cut-off point is between 3% and 5%.

[0071] The term “hypomethylation” refers to the average methylation state corresponding to a decreased presence of 5-mCyt at one or a plurality of CpG dinucleotides within a DNA sequence of a test DNA sample, relative to the amount of 5-mCyt found at corresponding CpG dinucleotides within a normal control DNA sample. Alternatively the term “hypomethylation” may be defined as relative to a cut-off point. It is particularly preferred that said cut-off point is between 3% and 5%.

[0072] The term “microarray” refers broadly to both “DNA microarrays,” and “DNA chip(s)”, as recognised in the art, encompasses all art-recognised solid supports, and encompasses all methods for affixing nucleic acid molecules thereto or synthesis of nucleic acids thereon.

[0073] “Genetic parameters” are mutations and polymorphisms of genes and sequences further required for their regulation. To be designated as mutations are, in particular, insertions, deletions, point mutations, inversions and polymorphisms and, particularly preferred, SNPs (single nucleotide polymorphisms).

[0074] “Epigenetic parameters” are, in particular, cytosine methylations. Further epigenetic parameters include, for example, the acetylation of histones which, however, cannot be directly analysed using the described method but which, in turn, correlate with the DNA methylation.

[0075] The term “bisulfite reagent” refers to a reagent comprising bisulfite, disulfite, hydrogen sulfite or combinations thereof, useful as disclosed herein to distinguish between methylated and unmethylated CpG dinucleotide sequences.

[0076] The term “Methylation assay” refers to any assay for determining the methylation state of one or more CpG dinucleotide sequences within a sequence of DNA.

[0077] The terms “MS.AP-PCR” or “AP-PCR” (Methylation-Sensitive Arbitrarily-Primed Polymerase Chain Reaction) refer to the art-recognised technology that allows for a global scan of the genome using CG-rich primers to focus on the regions most likely to contain CpG dinucleotides, and described by Gonzalgo et al., Cancer Research 57:594-599, 1997.

[0078] The term “MethyLight™” refers to the art-recognised fluorescence-based real-time PCR technique described by Eads et al., Cancer Res. 59:2302-2306, 1999.

[0079] The term “HeavyMethyl™” assay, in the embodiment thereof implemented herein, refers to an assay, wherein methylation specific blocking probes (also referred to herein as blockers) covering CpG positions between, or covered by the amplification primers enable methylation-specific selective amplification of a nucleic acid sample.

[0080] The term “HeavyMethyl™ MethyLight™” assay, in the embodiment thereof implemented herein, refers to a HeavyMethyl™ MethyLight™ assay, which is a variation of the MethyLight™ assay, wherein the MethyLight™ assay is combined with methylation specific blocking probes covering CpG positions between the amplification primers.

[0081] The term “Ms-SNuPE” (Methylation-sensitive Single Nucleotide Primer Extension) refers to the art-recognised assay described by Gonzalgo and Jones, Nucleic Acids Res. 25:2529-2531, 1997.

[0082] The term “MSP” (Methylation-specific PCR) refers to the art-recognised methylation assay described by Herman et al. Proc. Natl. Acad. Sci. USA 93:9821-9826, 1996, and by U.S. Pat. No. 5,786,146.

[0083] The term “COBRA” (Combined Bisulfite Restriction Analysis) refers to the art-recognised methylation assay described by Xiong and Laird, Nucleic Acids Res. 25:2532-2534, 1997.

[0084] The term “MCA” (Methylated CpG Island Amplification) refers to the methylation assay described by Toyota et al., Cancer Res. 59:2307-12, 1999, and in WO 00/26401A1.

[0085] The term “hybridisation” is to be understood as a bond of an oligonucleotide to a complementary sequence along the lines of the Watson-Crick base pairings in the sample DNA, forming a duplex structure.

[0086] “Stringent hybridisation conditions,” as defined herein, involve hybridising at 68° C. in 5×SSC/5×Denhardt's solution/1.0% SDS, and washing in 0.2×SSC/0.1% SDS at room temperature, or involve the art-recognised equivalent thereof (e.g., conditions in which a hybridisation is carried out at 60° C. in 2.5×SSC buffer, followed by several washing steps at 37° C. in a low buffer concentration, and remains stable). Moderately stringent conditions, as defined herein, involve including washing in 3×SSC at 42° C., or the art-recognised equivalent thereof. The parameters of salt concentration and temperature can be varied to achieve the optimal level of identity between the probe and the target nucleic acid. Guidance regarding such conditions is available in the art, for example, by Sambrook et al., 1989, Molecular Cloning, A Laboratory Manual, Cold Spring Harbor Press, N.Y.; and Ausubel et al. (eds.), 1995, Current Protocols in Molecular Biology, (John Wiley and Sons, N.Y.) at Unit 2.10.

[0087] The terms “array SEQ ID NO,” “composite array SEQ ID NO,” or “composite array sequence” refer to a sequence, hypothetical or otherwise, consisting of a head-to-tail (5′ to 3′) linear composite of all individual contiguous sequences of a subject array (e.g., a head-to-tail composite of SEQ ID NO:1-71, in that order).

[0088] The terms “array SEQ ID NO node,” “composite array SEQ ID NO node,” or “composite array sequence node” refer to a junction between any two individual contiguous sequences of the “array SEQ ID NO,” the “composite array SEQ ID NO,” or the “composite array sequence.”

[0089] In reference to composite array sequences, the phrase “contiguous nucleotides” refers to a contiguous sequence region of any individual contiguous sequence of the composite array, but does not include a region of the composite array sequence that includes a “node,” as defined herein above.

[0090] The present invention provides for molecular genetic markers that have novel utility for the analysis of methylation patterns associated with the development of lung cell proliferative disorders. Said markers may be used for detecting or distinguishing between lung cell proliferative disorders, thereby providing improved means for the detection, classification and therapy of said disorders.

[0091] Bisulfite modification of DNA is an art-recognised tool used to assess CpG methylation status. 5-methylcytosine is the most frequent covalent base modification in the DNA of eukaryotic cells. It plays a role, for example, in the regulation of the transcription, in genetic imprinting, and in tumourigenesis. Therefore, the identification of 5-methylcytosine as a component of genetic information is of considerable interest. However, 5-methylcytosine positions cannot be identified by sequencing, because 5-methylcytosine has the same base pairing behaviour as cytosine. Moreover, the epigenetic information carried by 5-methylcytosine is completely lost during, e.g., PCR amplification.

[0092] The most frequently used method for analysing DNA for the presence of 5-methylcytosine is based upon the specific reaction of bisulfite with cytosine whereby, upon subsequent alkaline hydrolysis, cytosine is converted to uracil which corresponds to thymine in its base pairing behaviour. Significantly, however, 5-methylcytosine remains unmodified under these conditions. Consequently, the original DNA is converted in such a manner that methylcytosine, which originally could not be distinguished from cytosine by its hybridisation behaviour, can now be detected as the only remaining cytosine using standard, art-recognised molecular biological techniques, for example, by amplification and hybridisation, or by sequencing. All of these techniques are based on differential base pairing properties, which can now be fully exploited.

[0093] The prior art, in terms of sensitivity, is defined by a method comprising enclosing the DNA to be analysed in an agarose matrix, thereby preventing the diffusion and renaturation of the DNA (bisulfite only reacts with single-stranded DNA), and replacing all precipitation and purification steps with fast dialysis (Olek A, et al., A modified and improved method for bisulfite based cytosine methylation analysis, Nucleic Acids Res. 24:5064-6, 1996). It is thus possible to analyse individual cells for methylation status, illustrating the utility and sensitivity of the method. An overview of art-recognised methods for detecting 5-methylcytosine is provided by Rein, T., et al., Nucleic Acids Res., 26:2255, 1998.

[0094] The bisulfite technique, barring few exceptions (e.g., Zeschnigk M, et al., Eur J Hum Genet. 5:94-98, 1997), is currently only used in research. In all instances, short, specific fragments of a known gene are amplified subsequent to a bisulfite treatment, and either completely sequenced (Olek and Walter, Nat. Genet. 1997 17:275-6, 1997), subjected to one or more primer extension reactions (Gonzalgo and Jones, Nucleic Acids Res., 25:2529-31, 1997; WO 95/00669; U.S. Pat. No. 6,251,594) to analyse individual cytosine positions, or treated by enzymatic digestion (Xiong and Laird, Nucleic Acids Res., 25:2532-4, 1997). Detection by hybridization has also been described in the art (Olek et al., WO 99/28498). Additionally, use of the bisulfite technique for methylation detection with respect to individual genes has been described (Grigg and Clark, Bioassays, 16:431-6, 1994; Zeschnigk M, et al., Hum Mol Genet., 6:387-95, 1997; Feil R, et al., Nucleic Acids Res., 22:695-, 1994; Martin V, et al., Gene, 157:261-4, 1995; WO 9746705 and WO 9515373).

[0095] The present invention provides for the use of the bisulfite technique, in combination with one or more methylation assays, for determination of the methylation status of CpG dinucleotide sequences within sequences from the group consisting of SEQ ID NO: 1 to SEQ ID NO: 56. According to the present invention, determination of the methylation status of CpG dinucleotide sequences within sequences from the group consisting of SEQ ID NO: 1 to SEQ ID NO: 56 has diagnostic and prognostic utility.

[0096] Methylation Assay Procedures. Various methylation assay procedures are known in the art, and can be used in conjunction with the present invention. These assays allow for determination of the methylation state of one or a plurality of CpG dinucleotides (e.g., CpG islands) within a DNA sequence. Such assays involve, among other techniques, DNA sequencing of bisulfite-treated DNA, PCR (for sequence-specific amplification), Southern blot analysis, and use of methylation-sensitive restriction enzymes.

[0097] For example, genomic sequencing has been simplified for analysis of DNA methylation patterns and 5-methylcytosine distribution by using bisulfite treatment (Frommer et al., Proc. Natl. Acad. Sci. USA 89:1827-1831, 1992). Additionally, restriction enzyme digestion of PCR products amplified from bisulfite-converted DNA is used, e.g., the method described by Sadri and Hornsby (Nucl. Acids Res. 24:5058-5059, 1996), or COBRA (Combined Bisulfite Restriction Analysis) (Xiong and Laird, Nucleic Acids Res. 25:2532-2534, 1997).

[0098] COBRA analysis is a quantitative methylation assay useful for determining DNA methylation levels at specific gene loci in small amounts of genomic DNA (Xiong and Laird, Nucleic Acids Res. 25:2532-2534, 1997). Briefly, restriction enzyme digestion is used to reveal methylation-dependent sequence differences in PCR products of sodium bisulfite-treated DNA. Methylation-dependent sequence differences are first introduced into the genomic DNA by standard bisulfite treatment according to the procedure described by Frommer et al. (Proc. Natl. Acad. Sci. USA 89:1827-1831, 1992). PCR amplification of the bisulfite converted DNA is then performed using primers specific for the CpG islands of interest, followed by restriction endonuclease digestion, gel electrophoresis, and detection using specific, labelled hybridisation probes. Methylation levels in the original DNA sample are represented by the relative amounts of digested and undigested PCR product in a linearly quantitative fashion across a wide spectrum of DNA methylation levels. In addition, this technique can be reliably applied to DNA obtained from microdissected paraffin-embedded tissue samples. Typical reagents (e.g., as might be found in a typical COBRA-based kit) for COBRA analysis may include, but are not limited to: PCR primers for specific gene (or bisulfite treated DNA sequence or CpG island); restriction enzyme and appropriate buffer; gene-hybridisation oligo; control hybridisation oligo; kinase labelling kit for oligo probe; and labelled nucleotides. Additionally, bisulfite conversion reagents may include: DNA denaturation buffer; sulfonation buffer; DNA recovery reagents or kits (e.g., precipitation, ultrafiltration, affinity column); desulfonation buffer; and DNA recovery components.

[0099] Preferably, assays such as “MethyLight™” (a fluorescence-based real-time PCR technique) (Eads et al., Cancer Res. 59:2302-2306, 1999), Ms-SNuPE (Methylation-sensitive Single Nucleotide Primer Extension) reactions (Gonzalgo and Jones, Nucleic Acids Res. 25:2529-2531, 1997), methylation-specific PCR (“MSP”; Herman et al., Proc. Natl. Acad. Sci. USA 93:9821-9826, 1996; U.S. Pat. No. 5,786,146), and methylated CpG island amplification (“MCA”; Toyota et al., Cancer Res. 59:2307-12, 1999) are used alone or in combination with other of these methods.

[0100] The MethyLight™ assay is a high-throughput quantitative methylation assay that utilises fluorescence-based real-time PCR (TaqMan™) technology that requires no further manipulations after the PCR step (Eads et al., Cancer Res. 59:2302-2306, 1999). Briefly, the MethyLight™ process begins with a mixed sample of genomic DNA that is converted, in a sodium bisulfite reaction, to a mixed pool of methylation-dependent sequence differences according to standard procedures (the bisulfite process converts unmethylated cytosine residues to uracil). Fluorescence-based PCR is then performed either in an “unbiased” (with primers that do not overlap known CpG methylation sites) PCR reaction, or in a “biased” (with PCR primers that overlap known CpG dinucleotides) reaction. Sequence discrimination can occur either at the level of the amplification process or at the level of the fluorescence detection process, or both.

[0101] The MethyLight™ assay may be used as a quantitative test for methylation patterns in the genomic DNA sample, wherein sequence discrimination occurs at the level of probe hybridisation. In this quantitative version, the PCR reaction provides for unbiased amplification in the presence of a fluorescent probe that overlaps a particular putative methylation site. An unbiased control for the amount of input DNA is provided by a reaction in which neither the primers, nor the probe overlie any CpG dinucleotides. Alternatively, a qualitative test for genomic methylation is achieved by probing of the biased PCR pool with either control oligonucleotides that do not “cover” known methylation sites (a fluorescence-based version of the “MSP” technique), or with oligonucleotides covering potential methylation sites.

[0102] The MethyLight™ process can by used with a “TaqMan®” probe in the amplification process. For example, double-stranded genomic DNA is treated with sodium bisulfite and subjected to one of two sets of PCR reactions using TaqMan® probes; e.g., with either biased primers and TaqMan® probe, or unbiased primers and TaqMan® probe. The TaqMan® probe is dual-labelled with fluorescent “reporter” and “quencher” molecules, and is designed to be specific for a relatively high GC content region so that it melts out at about 10° C. higher temperature in the PCR cycle than the forward or reverse primers. This allows the TaqMan® probe to remain fully hybridised during the PCR annealing/extension step. As the Taq polymerase enzymatically synthesises a new strand during PCR, it will eventually reach the annealed TaqMan® probe. The Taq polymerase 5′ to 3′ endonuclease activity will then displace the TaqMan® probe by digesting it to release the fluorescent reporter molecule for quantitative detection of its now unquenched signal using a real-time fluorescent detection system.

[0103] Typical reagents (e.g., as might be found in a typical MethyLight™-based kit) for MethyLight™ analysis may include, but are not limited to: PCR primers for specific gene (or bisulfite treated DNA sequence or CpG island); TaqMan® probes; optimised PCR buffers and deoxynucleotides; and Taq polymerase.

[0104] The Ms-SNuPE technique is a quantitative method for assessing methylation differences at specific CpG sites based on bisulfite treatment of DNA, followed by single-nucleotide primer extension (Gonzalgo and Jones, Nucleic Acids Res. 25:2529-2531, 1997). Briefly, genomic DNA is reacted with sodium bisulfite to convert umethylated cytosine to uracil while leaving 5-methylcytosine unchanged. Amplification of the desired target sequence is then performed using PCR primers specific for bisulfite-converted DNA, and the resulting product is isolated and used as a template for methylation analysis at the CpG site(s) of interest. Small amounts of DNA can be analysed (e.g., microdissected pathology sections), and it avoids utilisation of restriction enzymes for determining the methylation status at CpG sites.

[0105] Typical reagents (e.g., as might be found in a typical Ms-SNuPE-based kit) for Ms-SNuPE analysis may include, but are not limited to: PCR primers for specific gene (or bisulfite treated DNA sequence or CpG island); optimised PCR buffers and deoxynucleotides; gel extraction kit; positive control primers; Ms-SNuPE primers for specific gene; reaction buffer (for the Ms-SNuPE reaction); and labelled nucleotides. Additionally, bisulfite conversion reagents may include: DNA denaturation buffer; sulfonation buffer; DNA recovery regents or kit (e.g., precipitation, ultrafiltration, affinity column); desulfonation buffer; and DNA recovery components.

[0106] MSP (methylation-specific PCR) allows for assessing the methylation status of virtually any group of CpG sites within a CpG island, independent of the use of methylation-sensitive restriction enzymes (Herman et al. Proc. Natl. Acad. Sci. USA 93:9821-9826, 1996; U.S. Pat. No. 5,786,146). Briefly, DNA is modified by sodium bisulfite converting all unmethylated, but not methylated cytosines to uracil, and subsequently amplified with primers specific for methylated versus unmethylated DNA.MSP requires only small quantities of DNA, is sensitive to 0.1% methylated alleles of a given CpG island locus, and can be performed on DNA extracted from paraffin-embedded samples. Typical reagents (e.g., as might be found in a typical MSP-based kit) for MSP analysis may include, but are not limited to: methylated and unmethylated PCR primers for specific gene (or bisulfite treated DNA sequence or CpG island), optimised PCR buffers and deoxynucleotides, and specific probes.

[0107] The MCA technique is a method that can be used to screen for altered methylation patterns in genomic DNA, and to isolate specific sequences associated with these changes (Toyota et al., Cancer Res. 59:2307-12, 1999). Briefly, restriction enzymes with different sensitivities to cytosine methylation in their recognition sites are used to digest genomic DNAs from primary tumours, cell lines, and normal tissues prior to arbitrarily primed PCR amplification. Fragments that show differential methylation are cloned and sequenced after resolving the PCR products on high-resolution polyacrylamide gels. The cloned fragments are then used as probes for Southern analysis to confirm differential methylation of these regions. Typical reagents (e.g., as might be found in a typical MCA-based kit) for MCA analysis may include, but are not limited to: PCR primers for arbitrary priming genomic DNA; PCR buffers and nucleotides, restriction enzymes and appropriate buffers; gene-hybridisation oligos or probes; control hybridisation oligos or probes.

[0108] The genomic sequences according to SEQ ID NO: 1 to SEQ ID NO: 56, and non-naturally occurring (e.g. chemically) treated variants thereof according to SEQ ID NO: 236 to SEQ ID NO: 347, were determined to have utility for the detection and/or classification of lung cell proliferative disorders.

[0109] In one embodiment the invention provides a method for detecting and/or for detecting and distinguishing between or among lung cell proliferative disorders in a subject. Said method comprises the following steps

i) contacting genomic DNA isolated from bodily fluids obtained from the subject with at least one reagent, or series of reagents that distinguishes between methylated and non-methylated CpG dinucleotides within at least one target region of the genomic DNA, wherein said contiguous nucleotides comprise at least one CpG dinucleotide sequence, and
ii) detecting, or detecting and distinguishing between or among lung cell proliferative disorders based on the methylated and non-methylated CpG dinucleotides.

[0110] Genomic DNA may be isolated by any means standard in the art, including the use of commercially available kits. Briefly, wherein the DNA of interest is encapsulated in by a cellular membrane the biological sample must be disrupted and lysed by enzymatic, chemical or mechanical means. The DNA solution may then be cleared of proteins and other contaminants e.g. by digestion with proteinase K. The genomic DNA is then recovered from the solution. This may be carried out by means of a variety of methods including salting out, organic extraction or binding of the DNA to a solid phase support. The choice of method will be affected by several factors including time, expense and required quantity of DNA. Body fluids are the preferred source of the DNA; particularly preferred are sputum, blood plasma, blood serum, whole blood, isolated blood cells and cells isolated from the blood.

[0111] The genomic DNA sample is then treated in such a manner that cytosine bases which are unmethylated at the 5′-position are converted to uracil, thymine, or another base which is dissimilar to cytosine in terms of hybridisation behaviour. This will be understood as “treatment” or “chemical treatment” herein.

[0112] The above described treatment of genomic DNA is preferably carried out with bisulfite (hydrogen sulfite, disulfite) and subsequent alkaline hydrolysis which results in a conversion of non-methylated cytosine nucleobases to uracil or to another base which is dissimilar to cytosine in terms of base pairing behaviour.

[0113] The treated DNA is then analysed in order to determine the methylation state of one or more target gene sequences (prior to the treatment) associated with the development of NSCLC. It is particularly preferred that the target region comprises, or hybridises under stringent conditions to at least 16 contiguous nucleotides of at least one gene or genomic sequence selected from the group consisting the genes and genomic sequences AKT2, BCL2, CDKN2A, ERBB4, FOS, GSTP1, HRAS, MDR1(ABCB1), RARB, ESR1, BCL2L1, PIK3CA, MAPK1, EREG, RASSF1, IGF1R, EGF, IGF1, STAT1, AREG, GP1BB, PTPRCAP(RPS6KB2), STK15(STK6), BTC, FOXF1, SHC1, STK12(AURKB), RASGRP2, ABCC4, RASGRP1, RASGRF1, MVP, ADAM17(TACE), ABCC12, PAK7 and NRG3. It is further preferred that the sequences of said genes as described in the accompanying sequence listing (see Table 3) are analysed. The method of analysis may be selected from those known in the art, including those listed herein. Particularly preferred are MethyLight™, MSP and the use of blocking oligonucleotides as will be described herein. It is further preferred that any oligonucleotides used in such analysis (including primers, blocking oligonucleotides and detection probes) should be reverse complementary, identical, or hybridise under stringent or highly stringent conditions to an at least 16-base-pair long segment of the base sequences of one or more of SEQ ID NO: 236 to SEQ ID NO: 347 and sequences complementary thereto.

[0114] Aberrant methylation, more preferably hypermethylation of one or more genes taken from the group consisting AKT2, BCL2, CDKN2A, ERBB4, FOS, GSTP1, HRAS, MDR1(ABCB1), RARB, ESR1, BCL2L1, PIK3CA, MAPK1, EREG, RASSF1, IGF1R, EGF, IGF1, STAT1, AREG, GP1BB, PTPRCAP(RPS6 KB2), STK15(STK6), BTC, FOXF1, SHC1, STK12(AURKB), RASGRP2, ABCC4, RASGRP1, RASGRF1, MVP, ADAM17(TACE), ABCC12, PAK7 and NRG3 or genomic sequences thereof as listed in Table 3 are associated with the presence of lung carcinoma. Analysis of one or a plurality of the sequences enables detecting, or detecting and distinguishing between or among lung cell proliferative disorders.

[0115] In one embodiment the method discloses the use of one or more genes and their promoter or regulatory elements selected from the group consisting of AKT2, BCL2, CDKN2A, ERBB4, FOS, GSTP1, HRAS, MDR1(ABCB1), RARB, ESR1, BCL2L1, PIK3CA, MAPK1, EREG, RASSF1, IGF1R, EGF, IGF1, STAT1, AREG, GP1BB, PTPRCAP(RPS6 KB2), STK15(STK6), BTC, FOXF1, SHC1, STK12(AURKB), RASGRP2, ABCC4, RASGRP1, RASGRF1, MVP, ADAM17(TACE), ABCC12, PAK7 and NRG3 as markers for the detection of NSCLC.

[0116] Said use of the genes and/or sequences may be enabled by means of any analysis of the expression of the gene, by means of mRNA expression analysis or protein expression analysis. However, in the most preferred embodiment of the invention, the detection of lung cell proliferative disorders is enabled by means of analysis of the methylation status of said genes or genomic sequences and their promoter or regulatory elements. Methods for the methylation analysis of genes are described herein.

[0117] Aberrant expression, more preferably under-expression of one or more genes taken from the group consisting AKT2, BCL2, CDKN2A, ERBB4, FOS, GSTP1, HRAS, MDR1(ABCB1), RARB, ESR1, BCL2L1, PIK3CA, MAPK1, EREG, RASSF1, IGF1R, EGF, IGF1, STAT1, AREG, GP1BB, PTPRCAP(RPS6 KB2), STK15(STK6), BTC, FOXF1, SHC1, STK12(AURKB), RASGRP2, ABCC4, RASGRP1, RASGRF1, MVP, ADAM17(TACE), ABCC12, PAK7 and NRG3 or genomic sequences thereof as listed in Table 3 are associated with the presence of lung carcinoma.

[0118] In one embodiment the method discloses the use of the gene IGF1 and/or its promoter or regulatory elements as a marker for the differentiation of lung squamous cell carcinoma from lung adenocarcinoma. Said use of the gene and/or sequences thereof may be enabled by means of any analysis of the expression of the gene, by means of mRNA expression analysis or protein expression analysis. However, in the most preferred embodiment of the invention, the detection of lung cell proliferative disorders is enabled by means of analysis of the methylation status of said genes or genomic sequences and their promoter or regulatory elements. Methods for the methylation analysis of genes are described herein.

[0119] In one embodiment the method discloses the use of one or more genes and their promoter or regulatory elements selected from the group consisting of IGF1, AREG and RASGRP1 as markers for the detection of lung squamous cell carcinoma. Said use of the genes and/or sequences may be enabled by means of any analysis of the expression of the gene, by means of mRNA expression analysis or protein expression analysis. However, in the most preferred embodiment of the invention, the detection of lung cell proliferative disorders is enabled by means of analysis of the methylation status of said genes or genomic sequences and their promoter or regulatory elements. Methods for the methylation analysis of genes are described herein.

[0120] In one embodiment the method discloses the use of one or more genes and their promoter or regulatory elements selected from the group consisting of AREG, GP1BB, FOXF1, RASGRP2 and NRG3 as markers for the detection of lung adenocarcinoma. Said use of the genes and/or sequences may be enabled by means of any analysis of the expression of the gene, by means of mRNA expression analysis or protein expression analysis. However, in the most preferred embodiment of the invention, the detection of lung cell proliferative disorders is enabled by means of analysis of the methylation status of said genes or genomic sequences and their promoter or regulatory elements. Methods for the methylation analysis of genes are described herein.

[0121] Aberrant levels of mRNA expression of the genes AKT2, BCL2, CDKN2A, ERBB4, FOS, GSTP1, HRAS, MDR1(ABCB1), RARB, ESR1, BCL2L1, PIK3CA, MAPK1, EREG, RASSF1, IGF1R, EGF, IGF1, STAT1, AREG, GP1BB, PTPRCAP(RPS6 KB2), STK15(STK6), BTC, FOXF1, SHC1, STK12(AURKB), RASGRP2, ABCC4, RASGRP1, RASGRF1, MVP, ADAM17(TACE), ABCC12, PAK7 and NRG3 are associated with lung cell proliferative disorders. Accordingly, increased or decreased levels of expression of said genes or sequences are associable with the development of lung cancers and other lung cell proliferative disorders.

[0122] To detect the presence of mRNA encoding a gene or genomic sequence in a detection system for lung cancer, a sample is obtained from a patient. The sample can be a tissue biopsy sample or a sample of blood, plasma, serum or the like. The sample may be treated to extract the nucleic acids contained therein. The resulting nucleic acid from the sample is subjected to gel electrophoresis or other separation techniques. Detection involves contacting the nucleic acids and in particular the mRNA of the sample with a DNA sequence serving as a probe to form hybrid duplexes. The stringency of hybridisation is determined by a number of factors during hybridisation and during the washing procedure, including temperature, ionic strength, length of time and concentration of formamide. These factors are outlined in, for example, Sambrook et al. (Molecular Cloning: A Laboratory Manual, 2d ed., 1989). Detection of the resulting duplex is usually accomplished by the use of labelled probes. Alternatively, the probe may be unlabeled, but may be detectable by specific binding with a ligand which is labelled, either directly or indirectly. Suitable labels and methods for labelling probes and ligands are known in the art, and include, for example, radioactive labels which may be incorporated by known methods (e.g., nick translation or kinasing), biotin, fluorescent groups, chemiluminescent groups (e.g., dioxetanes, particularly triggered dioxetanes), enzymes, antibodies, and the like.

[0123] In order to increase the sensitivity of the detection in a sample of mRNA transcribed from the gene or genomic sequence, the technique of reverse transcription/polymerisation chain reaction can be used to amplify cDNA transcribed from the mRNA. The method of reverse transcription/PCR is well known in the art (for example, see Watson and Fleming, supra).

[0124] The reverse transcription/PCR method can be performed as follows. Total cellular RNA is isolated by, for example, the standard guanidium isothiocyanate method and the total RNA is reverse transcribed. The reverse transcription method involves synthesis of DNA on a template of RNA using a reverse transcriptase enzyme and a 3′ end primer. Typically, the primer contains an oligo(dT) sequence. The cDNA thus produced is then amplified using the PCR method and gene specific primers. (Belyavsky et al, Nucl Acid Res 17:2919-2932, 1989; Krug and Berger, Methods in Enzymology, Academic Press, N.Y., Vol. 152, pp. 316-325, 1987 which are incorporated by reference)

[0125] The present invention may also be described in certain embodiments as a kit for use in detecting a lung cell proliferative disorder state through testing of a biological sample. A representative kit may comprise one or more nucleic acid segments that selectively hybridise to them, RNA and a container for each of the one or more nucleic acid segments. In certain embodiments the nucleic acid segments may be combined in a single tube. In further embodiments, the nucleic acid segments may also include a pair of primers for amplifying the target mRNA. Such kits may also include any buffers, solutions, solvents, enzymes, nucleotides, or other components for hybridisation, amplification or detection reactions. Preferred kit components include reagents for reverse transcription-PCR, in situ hybridisation, Northern analysis and/or ribonuclease protection assay (RPA).

[0126] The present invention further provides for methods to detect the presence of the polypeptide encoded by said genes or gene sequences in a sample obtained from a patient.

[0127] Aberrant levels of polypeptide expression of the polypeptides encoded by the genes, genomic sequences or genes regulated by genomic sequences of the group consisting AKT2, BCL2, CDKN2A, ERBB4, FOS, GSTP1, HRAS, MDR1(ABCB1), RARB, ESR1, BCL2L1, PIK3CA, MAPK1, EREG, RASSF1, IGF1R, EGF, IGF1, STAT1, AREG, GP1BB, PTPRCAP(RPS6 KB2), STK15(STK6), BTC, FOXF1, SHC1, STK12(AURKB), RASGRP2, ABCC4, RASGRP1, RASGRF1, MVP, ADAM17(TACE), ABCC12, PAK7 and NRG3 are associated with lung carcinoma. Accordingly over or under expression of said polypeptides are associable with the development of lung carcinoma and other lung cell proliferative disorders.

[0128] Any method known in the art for detecting proteins can be used. Such methods include, but are not limited to immunodiffusion, immunoelectrophoresis, immunochemical methods, binder-ligand assays, immunohistochemical techniques, agglutination and complement assays. (for example see Basic and Clinical Immunology, Sites and Terr, eds., Appleton and Lange, Norwalk, Conn. pp 217-262, 1991 which is incorporated by reference). Preferred are binder-ligand immunoassay methods including reacting antibodies with an epitope or epitopes and competitively displacing a labelled protein or derivative thereof.

[0129] Certain embodiments of the present invention comprise the use of antibodies specific to the polypeptide encoded by the genes or genomic sequences of the group consisting of AKT2, BCL2, CDKN2A, ERBB4, FOS, GSTP1, HRAS, MDR1(ABCB1), RARB, ESR1, BCL2L1, PIK3CA, MAPK1, EREG, RASSF1, IGF1R, EGF, IGF1, STAT1, AREG, GP1BB, PTPRCAP(RPS6 KB2), STK15(STK6), BTC, FOXF1, SHC1, STK12(AURKB), RASGRP2, ABCC4, RASGRP1, RASGRF1, MVP, ADAM17(TACE), ABCC12, PAK7 and NRG3.

[0130] Such antibodies may be useful for diagnostic and prognostic applications in detecting the disease state, by comparing a patient's levels of lung disease marker expression to expression of the same markers in normal individuals. In certain embodiments production of monoclonal or polyclonal antibodies can be induced by the use of the coded polypeptide as antigene. Such antibodies may in turn be used to detect expressed proteins as markers for human disease states. The levels of such proteins present in the peripheral blood or tissue sample of a patient may be quantified by conventional methods. Antibody-protein binding may be detected and quantified by a variety of means known in the art, such as labelling with fluorescent or radioactive ligands. The invention further comprises kits for performing the above-mentioned procedures, wherein such kits contain antibodies specific for the investigated polypeptides.

[0131] Numerous competitive and non-competitive protein binding immunoassays are well known in the art. Antibodies employed in such assays may be unlabeled, for example as used in agglutination tests, or labelled for use a wide variety of assay methods. Labels that can be used include radionuclides, enzymes, fluorescers, chemiluminescers, enzyme substrates or co-factors, enzyme inhibitors, particles, dyes and the like for use in radioimmunoassay (RIA), enzyme immunoassays, e.g., enzyme-linked immunosorbent assay (ELISA), fluorescent immunoassays and the like. Polyclonal or monoclonal antibodies or epitopes thereof can be made for use in immunoassays by any of a number of methods known in the art. One approach for preparing antibodies to a protein is the selection and preparation of an amino acid sequence of all or part of the protein, chemically synthesising the sequence and injecting it into an appropriate animal, usually a rabbit or a mouse (Milstein and Kohler Nature 256:495-497, 1975; Gulfre and Milstein, Methods in Enzymology: Immunochemical Techniques 73:1-46, Langone and Banatis eds., Academic Press, 1981 which are incorporated by reference). Methods for preparation of the polypeptides or epitopes thereof include, but are not limited to chemical synthesis, recombinant DNA techniques or isolation from biological samples.

[0132] In a further embodiment the present invention is based upon the analysis of methylation levels within two or more genes or genomic sequences taken from the group consisting of AKT2, BCL2, CDKN2A, ERBB4, FOS, GSTP1, HRAS, MDR1(ABCB1), RARB, ESR1, BCL2L1, PIK3CA, MAPK1, EREG, RASSF1, IGF1R, EGF, IGF1, STAT1, AREG, GP1BB, PTPRCAP(RPS6 KB2), STK15(STK6), BTC, FOXF1, SHC1, STK12(AURKB), RASGRP2, ABCC4, RASGRP1, RASGRF1, MVP, ADAM17(TACE), ABCC12, PAK7 and NRG3 and/or their regulatory sequences. It is further preferred that the sequences of said genes or genomic sequences are as according to SEQ ID NO: 1 to SEQ ID NO: 56.

[0133] Particular embodiments of the present invention provide a novel application of the analysis of methylation levels and/or patterns within said sequences that enables a detection and/or differentiation of lung cell proliferative disorders. Early detection and classification of lung cell proliferative disorders is linked with disease prognosis, and the disclosed method thereby enables the physician and patient to make better and more informed therapeutic decisions.

### Further Improvements

[0134] The present invention provides novel uses for genomic sequences selected from the group consisting of SEQ ID NO: 1 to SEQ ID NO: 56. Additional embodiments provide modified variants of SEQ ID NO: 1 to SEQ ID NO: 56, as well as oligonucleotides and/or PNA-oligomers for analysis of cytosine methylation patterns within the group consisting SEQ ID NO: 1 to SEQ ID NO: 56.

[0135] An objective of the invention comprises analysis of the methylation state of one or more CpG dinucleotides within at least one of the genomic sequences selected from the group consisting of SEQ ID NO: 1 to SEQ ID NO: 56 and sequences complementary thereto.

[0136] The disclosed invention provides treated nucleic acids, derived from genomic SEQ ID NO: 1 to SEQ ID NO: 56, wherein the treatment is suitable to convert at least one unmethylated cytosine base of the genomic DNA sequence to uracil or another base that is detectably dissimilar to cytosine in terms of hybridisation. The genomic sequences in question may comprise one, or more, consecutive or random methylated CpG positions. Said treatment preferably comprises use of a reagent selected from the group consisting of bisulfite, hydrogen sulfite, disulfite, and combinations thereof. In a preferred embodiment of the invention, the objective comprises analysis of a non-naturally occurring modified nucleic acid comprising a sequence of at least 16 contiguous nucleotide bases in length of a sequence selected from the group consisting of SEQ ID NO: 236 to SEQ ID NO: 347, wherein said sequence comprises at least one CpG, TpA or CpA dinucleotide and sequences complementary thereto. The sequences of SEQ ID NO: 236 to SEQ ID NO: 347 provide non-naturally occurring modified versions of the nucleic acid according to SEQ ID NO: 1 to SEQ ID NO: 56, wherein the modification of each genomic sequence results in the synthesis of a nucleic acid having a sequence that is unique and distinct from said genomic sequence as follows. For each sense strand genomic DNA, e.g., SEQ ID NO: 1, four converted versions are disclosed. A first version wherein “C” to “T,” but “CpG” remains “CpG” (i.e., corresponds to case where, for the genomic sequence, all “C” residues of CpG dinucleotide sequences are methylated and are thus not converted); a second version discloses the complement of the disclosed genomic DNA sequence (i.e. antisense strand), wherein “C” to “T,” but “CpG” remains “CpG” (i.e., corresponds to case where, for all “C” residues of CpG dinucleotide sequences are methylated and are thus not converted). The ‘upmethylated’ converted sequences of SEQ ID NO: 1 to SEQ ID NO: 56 correspond to SEQ ID NO: 236 to SEQ ID NO: 347. A third chemically converted version of each genomic sequences is provided, wherein “C” to “T” for all “C” residues, including those of “CpG” dinucleotide sequences (i.e., corresponds to case where, for the genomic sequences, all “C” residues of CpG dinucleotide sequences are unmethylated); a final chemically converted version of each sequence, discloses the complement of the disclosed genomic DNA sequence (i.e. antisense strand), wherein “C” to “T” for all “C” residues, including those of “CpG” dinucleotide sequences (i.e., corresponds to case where, for the complement (antisense strand) of each genomic sequence, all “C” residues of CpG dinucleotide sequences are unmethylated). The ‘downmethylated’ converted sequences of SEQ ID NO: 1 to SEQ ID NO: 56 correspond to SEQ ID NO: 236 to SEQ ID NO: 347.

[0137] In an alternative preferred embodiment, such analysis comprises the use of an oligonucleotide or oligomer for detecting the cytosine methylation state within genomic or treated (chemically modified) DNA, according to SEQ ID NO: 236 to SEQ ID NO: 347. Said oligonucleotide or oligomer comprising a nucleic acid sequence having a length of at least nine (9) nucleotides which hybridizes, under moderately stringent or stringent conditions (as defined herein above), to a treated nucleic acid sequence according to SEQ ID NO: 236 to SEQ ID NO: 347 and/or sequences complementary thereto, or to a genomic sequence according to SEQ ID NO: 1 to SEQ ID NO: 56 and/or sequences complementary thereto. Particularly preferred is a nucleic acid molecule that hybridize under moderately stringent and/or stringent hybridization conditions to all or a portion of the sequences SEQ ID NO: 236 to SEQ ID NO: 347 but not SEQ ID NO: 1 to SEQ ID NO: 56 or other human genomic DNA.

[0138] Thus, the present invention includes nucleic acid molecules (e.g., oligonucleotides and peptide nucleic acid (PNA) molecules (PNA-oligomers)) that hybridise under moderately stringent and/or stringent hybridisation conditions to all or a portion of the sequences SEQ ID NO: 1 to SEQ ID NO: 347, or to the complements thereof. The hybridising portion of the hybridizing nucleic acids is typically at least 9, 15, 20, 25, 30 or 35 nucleotides in length. However, longer molecules have inventive utility, and are thus within the scope of the present invention. Particularly preferred is a nucleic acid molecule that hybridize under moderately stringent and/or stringent hybridization conditions to all or a portion of the sequences SEQ ID NO: 236 to SEQ ID NO: 347 but not SEQ ID NO: 1 to SEQ ID NO: 56 or other human genomic DNA.

[0139] Preferably, the hybridising portion of the inventive hybridising nucleic acids is at least 95%, or at least 98%, or 100% identical to the sequence, or to a portion thereof of SEQ ID NO: 1 to SEQ ID NO: 347, or to the complements thereof. Particularly preferred is a nucleic acid molecule that hybridize under moderately stringent and/or stringent hybridization conditions to all or a portion of the sequences SEQ ID NO: 236 to SEQ ID NO: 347 but not SEQ ID NO: 1 to SEQ ID NO: 56 or other human genomic DNA.

[0140] Hybridising nucleic acids of the type described herein can be used, for example, as a primer (e.g., a PCR primer), or a diagnostic and/or prognostic probe or primer. Preferably, hybridisation of the oligonucleotide probe to a nucleic acid sample is performed under stringent conditions and the probe is 100% identical to the target sequence. Nucleic acid duplex or hybrid stability is expressed as the melting temperature or Tm, which is the temperature at which a probe dissociates from a target DNA. This melting temperature is used to define the required stringency conditions.

[0141] For target sequences that are related and substantially identical to the corresponding sequence of SEQ ID NO: 1 to SEQ ID NO: 56 (such as allelic variants and SNPs), rather than identical, it is useful to first establish the lowest temperature at which only homologous hybridisation occurs with a particular concentration of salt (e.g., SSC or SSPE). Then, assuming that 1% mismatching results in a 1° C. decrease in the Tm, the temperature of the final wash in the hybridisation reaction is reduced accordingly (for example, if sequences having >95% identity with the probe are sought, the final wash temperature is decreased by 5° C.). In practice, the change in Tm can be between 0.5° C. and 1.5° C. per 1% mismatch.

[0142] Examples of inventive oligonucleotides of length X (in nucleotides), as indicated by polynucleotide positions with reference to, e.g., SEQ ID NO: 1, include those corresponding to sets (sense and antisense sets) of consecutively overlapping oligonucleotides of length X, where the oligonucleotides within each consecutively overlapping set (corresponding to a given X value) are defined as the finite set of Z oligonucleotides from nucleotide positions:

n to (n+(X−1));
where n=1, 2, 3, . . . (Y−(X−1));
where Y equals the length (nucleotides or base pairs) of SEQ ID NO: 236 (6197);
where X equals the common length (in nucleotides) of each oligonucleotide in the set (e.g., X=20 for a set of consecutively overlapping 20-mers); and
where the number (Z) of consecutively overlapping oligomers of length X for a given SEQ ID NO of length Y is equal to Y−(X−1). For example Z=6197−19=6178 for either sense or antisense sets of SEQ ID NO: 236, where X=20.

[0143] Preferably, the set is limited to those oligomers that comprise at least one CpG, TpG or CpA dinucleotide.

[0144] Examples of inventive 20-mer oligonucleotides include the following set of oligomers (and the antisense set complementary thereto), indicated by polynucleotide positions with reference to SEQ ID NO: 236: 1-20, 2-21, 3-22, 4-23, 5-24, . . . 6178-6197.

[0145] Preferably, the set is limited to those oligomers that comprise at least one CpG, TpG or CpA dinucleotide.

[0146] Likewise, examples of inventive 25-mer oligonucleotides include the following set of oligomers (and the antisense set complementary thereto), indicated by polynucleotide positions with reference to SEQ ID NO: 236: 1-25, 2-26, 3-27, 4-28, 5-29, . . . 6172-6197.

[0147] Preferably, the set is limited to those oligomers that comprise at least one CpG, TpG or CpA dinucleotide.

[0148] The present invention encompasses, for each of SEQ ID NO: 1 to SEQ ID NO: 347 (sense and antisense), multiple consecutively overlapping sets of oligonucleotides or modified oligonucleotides of length X, where, e.g., X=9, 10, 17, 20, 22, 23, 25, 27, 30 or 35 nucleotides.

[0149] The oligonucleotides or oligomers according to the present invention constitute effective tools useful to ascertain genetic and epigenetic parameters of the genomic sequence corresponding to SEQ ID NO: 1 to SEQ ID NO: 56. Preferred sets of such oligonucleotides or modified oligonucleotides of length X are those consecutively overlapping sets of oligomers corresponding to SEQ ID NO: 1 to SEQ ID NO: 347 (and to the complements thereof). Preferably, said oligomers comprise at least one CpG, TpG or CpA dinucleotide.

[0150] Particularly preferred oligonucleotides or oligomers according to the present invention are those in which the cytosine of the CpG dinucleotide (or of the corresponding converted TpG or CpA dinucleotide) sequences is within the middle third of the oligonucleotide; that is, where the oligonucleotide is, for example, 13 bases in length, the CpG, TpG or CpA dinucleotide is positioned within the fifth to ninth nucleotide from the 5′-end.

[0151] The oligonucleotides of the invention can also be modified by chemically linking the oligonucleotide to one or more moieties or conjugates to enhance the activity, stability or detection of the oligonucleotide. Such moieties or conjugates include chromophores, fluorophores, lipids such as cholesterol, cholic acid, thioether, aliphatic chains, phospholipids, polyamines, polyethylene glycol (PEG), palmityl moieties, and others as disclosed in, for example, U.S. Pat. Nos. 5,514,758, 5,565,552, 5,567,810, 5,574,142, 5,585,481, 5,587,371, 5,597,696 and 5,958,773. The probes may also exist in the form of a PNA (peptide nucleic acid) which has particularly preferred pairing properties. Thus, the oligonucleotide may include other appended groups such as peptides, and may include hybridisation-triggered cleavage agents (Krol et al., BioTechniques 6:958-976, 1988) or intercalating agents (Zon, Pharm. Res. 5:539-549, 1988). To this end, the oligonucleotide may be conjugated to another molecule, e.g., a chromophore, fluorophor, peptide, hybridisation-triggered cross-linking agent, transport agent, hybridisation-triggered cleavage agent, etc.

[0152] The oligonucleotide may also comprise at least one art-recognised modified sugar and/or base moiety, or may comprise a modified backbone or non-natural internucleoside linkage.

[0153] The oligonucleotides or oligomers according to particular embodiments of the present invention are typically used in ‘sets,’ which contain at least one oligomer for analysis of each of the CpG dinucleotides of genomic sequences SEQ ID NO: 1 to SEQ ID NO: 56 and sequences complementary thereto, or to the corresponding CpG, TpG or CpA dinucleotide within a sequence of the treated nucleic acids according to SEQ ID NO: 236 to SEQ ID NO: 347 and sequences complementary thereto. However, it is anticipated that for economic or other factors it may be preferable to analyse a limited selection of the CpG dinucleotides within said sequences, and the content of the set of oligonucleotides is altered accordingly.

[0154] Therefore, in particular embodiments, the present invention provides a set of at least two (2) (oligonucleotides and/or PNA-oligomers) useful for detecting the cytosine methylation state in treated genomic DNA (SEQ ID NO: 236 to SEQ ID NO: 347), or in genomic DNA (SEQ ID NO: 1 to SEQ ID NO: 56 and sequences complementary thereto). These probes enable diagnosis, and/or classification of genetic and epigenetic parameters of lung cell proliferative disorders. The set of oligomers may also be used for detecting single nucleotide polymorphisms (SNPs) in treated genomic DNA (SEQ ID NO: 236 to SEQ ID NO: 347), or in genomic DNA (SEQ ID NO: 1 to SEQ ID NO: 56 and sequences complementary thereto).

[0155] In preferred embodiments, at least one, and more preferably all members of a set of oligonucleotides is bound to a solid phase.

[0156] In further embodiments, the present invention provides a set of at least two (2) oligonucleotides that are used as ‘primer’ oligonucleotides for amplifying DNA sequences of one of SEQ ID NO: 1 to SEQ ID NO: 347 and sequences complementary thereto, or segments thereof.

[0157] It is anticipated that the oligonucleotides may constitute all or part of an “array” or “DNA chip” (i.e., an arrangement of different oligonucleotides and/or PNA-oligomers bound to a solid phase). Such an array of different oligonucleotide- and/or PNA-oligomer sequences can be characterised, for example, in that it is arranged on the solid phase in the form of a rectangular or hexagonal lattice. The solid-phase surface may be composed of silicon, glass, polystyrene, aluminium, steel, iron, copper, nickel, silver, or gold. Nitrocellulose as well as plastics such as nylon, which can exist in the form of pellets or also as resin matrices, may also be used. An overview of the Prior Art in oligomer array manufacturing can be gathered from a special edition of Nature Genetics (Nature Genetics Supplement, Volume 21, January 1999, and from the literature cited therein). Fluorescently labelled probes are often used for the scanning of immobilised DNA arrays. The simple attachment of Cy3 and Cy5 dyes to the 5′-OH of the specific probe are particularly suitable for fluorescence labels. The detection of the fluorescence of the hybridised probes may be carried out, for example, via a confocal microscope. Cy3 and Cy5 dyes, besides many others, are commercially available.

[0158] It is also anticipated that the oligonucleotides, or particular sequences thereof, may constitute all or part of an “virtual array” wherein the oligonucleotides, or particular sequences thereof, are used, for example, as ‘specifiers’ as part of, or in combination with a diverse population of unique labelled probes to analyse a complex mixture of analytes. Such a method, for example is described in US 2003/0013091 (U.S. Ser. No. 09/898,743, published 16 Jan. 2003). In such methods, enough labels are generated so that each nucleic acid in the complex mixture (i.e., each analyte) can be uniquely bound by a unique label and thus detected (each label is directly counted, resulting in a digital read-out of each molecular species in the mixture).

[0159] It is particularly preferred that the oligomers according to the invention are utilised for at least one of: detection of; detection and differentiation between or among subclasses of; diagnosis of; and monitoring of lung cell proliferative disorders. This is enabled by use of said sets for the differentiation and/or detection of the tissue types according to table 4-11. Particularly preferred are those sets of oligomer that comprise at least two oligonucleotides selected from one of the following sets of oligonucleotides.

[0160] In one embodiment of the method, lung cancer tissue is detected. This is achieved by analysis of the methylation status of at least one target sequence comprising, or hybridising under stringent conditions to at least 16 contiguous nucleotides of a gene (or sequence thereof according to Table 3) selected from the group consisting AKT2, BCL2, CDKN2A, ERBB4, FOS, GSTP1, HRAS, MDR1(ABCB1), RARB, ESR1, BCL2L1, PIK3CA, MAPK1, EREG, RASSF1, IGF1R, EGF, IGF1, STAT1, AREG, GP1BB, PTPRCAP(RPS6 KB2), STK15(STK6), BTC, FOXF1, SHC1, STK12(AURKB), RASGRP2, ABCC4, RASGRP1, RASGRF1, MVP, ADAM17(TACE), ABCC12, PAK7 and NRG3 and complements thereof. This is preferably achieved by use of a set consisting of at least one oligonucleotide, and more preferably at least two selected from one of the groups consisting of SEQ ID NOS: 1612-1755.

[0161] In one embodiment of the method, lung squamous cell carcinoma and lung adenocarcinoma are differentiated from one another. This is achieved by analysis of the methylation status of at least one target sequence comprising, or hybridising under stringent conditions to at least 16 contiguous nucleotides of the gene (or sequence thereof according to Table 3) IGF1 and complements thereof. This is preferably achieved by use of a set consisting of at least one oligonucleotide, and more preferably at least two selected from one of the groups consisting of SEQ ID NOS: 1703-1707.

[0162] In one embodiment of the method, lung squamous cell carcinoma is detected. This is achieved by analysis of the methylation status of at least one target sequence comprising, or hybridising under stringent conditions to at least 16 contiguous nucleotides of a gene (or sequence thereof according to Table 3) selected from the group consisting IGF1, AREG and RASGRP1 and complements thereof. This is preferably achieved by use of a set consisting of at least one oligonucleotide, and more preferably at least two selected from one of the groups consisting of SEQ ID NOS: 1703-1707, 1710-1713, 1753.

[0163] In one embodiment of the method, lung adenocarcinoma is detected. This is achieved by analysis of the methylation status of at least one target sequence comprising, or hybridising under stringent conditions to at least 16 contiguous nucleotides of a gene (or sequence thereof according to Table 3) selected from the group consisting AREG, GP1BB, FOXF1, RASGRP2 and NRG3 and complements thereof. This is preferably achieved by use of a set consisting of at least one oligonucleotide, and more preferably at least two selected from one of the groups consisting of SEQ ID NOS: 1661, 1663, 1710-1713, 1718, 1728-1732, 1745-1748.

[0164] The present invention further provides a method for ascertaining genetic and/or epigenetic parameters of the genomic sequences according to SEQ ID NO: 1 to SEQ ID NO: 56 within a subject by analysing cytosine methylation and single nucleotide polymorphisms. Said method comprising contacting a nucleic acid comprising one or more of SEQ ID NO: 1 to SEQ ID NO: 56 in a biological sample obtained from said subject with at least one reagent or a series of reagents, wherein said reagent or series of reagents, distinguishes between methylated and non-methylated CpG dinucleotides within the target nucleic acid.

[0165] Preferably, said method comprises the following steps: In the first step, a sample of the tissue to be analysed is obtained. The source may be any suitable source, such as sputum, cell lines, histological slides, biopsies, paraffin-embedded tissue, bodily fluids, blood plasma, blood serum, whole blood, isolated blood cells, cells isolated from the blood and all possible combinations thereof.

[0166] The genomic DNA is then isolated from the sample. Genomic DNA may be isolated by any means standard in the art, including the use of commercially available kits. Briefly, wherein the DNA of interest is encapsulated in by a cellular membrane the biological sample must be disrupted and lysed by enzymatic, chemical or mechanical means. The DNA solution may then be cleared of proteins and other contaminants e.g. by digestion with proteinase K. The genomic DNA is then recovered from the solution. This may be carried out by means of a variety of methods including salting out, organic extraction or binding of the DNA to a solid phase support. The choice of method will be affected by several factors including time, expense and required quantity of DNA.

[0167] Once the nucleic acids have been extracted, the genomic double stranded DNA is used in the analysis.

[0168] In the second step of the method, the genomic DNA sample is treated in such a manner that cytosine bases which are unmethylated at the 5′-position are converted to uracil, thymine, or another base which is dissimilar to cytosine in terms of hybridisation behaviour. This will be understood as ‘pretreatment’ or ‘treatment’ herein.

[0169] The above-described treatment of genomic DNA is preferably carried out with bisulfite (hydrogen sulfite, disulfite) and subsequent alkaline hydrolysis which results in a conversion of non-methylated cytosine nucleobases to uracil or to another base which is dissimilar to cytosine in terms of base pairing behaviour.

[0170] In the third step of the method, fragments of the treated DNA are amplified, using sets of primer oligonucleotides according to the present invention, and an amplification enzyme. The amplification of several DNA segments can be carried out simultaneously in one and the same reaction vessel. Typically, the amplification is carried out using a polymerase chain reaction (PCR). The set of primer oligonucleotides includes at least two oligonucleotides whose sequences are each reverse complementary, identical, or hybridise under stringent or highly stringent conditions to an at least 16-base-pair long segment of the base sequences of one of SEQ ID NO: 236 to SEQ ID NO: 347 and sequences complementary thereto.

[0171] In an alternate embodiment of the method, the methylation status of preselected CpG positions within the nucleic acid sequences comprising one or more of SEQ ID NO: 1 to SEQ ID NO: 56 may be detected by use of methylation-specific primer oligonucleotides. This technique (MSP) has been described in U.S. Pat. No. 6,265,171 to Herman. The use of methylation status specific primers for the amplification of bisulfite treated DNA allows the differentiation between methylated and unmethylated nucleic acids. MSP primers pairs contain at least one primer which hybridises to a bisulfite treated CpG dinucleotide. Therefore, the sequence of said primers comprises at least one CpG dinucleotide. MSP primers specific for non-methylated DNA contain a “T’ at the position of the C position in the CpG. Preferably, therefore, the base sequence of said primers is required to comprise a sequence having a length of at least 9 nucleotides which hybridises to a treated nucleic acid sequence according to one of SEQ ID NO: 236 to SEQ ID NO: 347 and sequences complementary thereto, wherein the base sequence of said oligomers comprises at least one CpG dinucleotide.

[0172] A further preferred embodiment of the method comprises the use of blocker oligonucleotides. The use of such blocker oligonucleotides has been described by Yu et al., BioTechniques 23:714-720, 1997. Blocking probe oligonucleotides are hybridised to the bisulfite treated nucleic acid concurrently with the PCR primers. PCR amplification of the nucleic acid is terminated at the 5′ position of the blocking probe, such that amplification of a nucleic acid is suppressed where the complementary sequence to the blocking probe is present. The probes may be designed to hybridise to the bisulfite treated nucleic acid in a methylation status specific manner. For example, for detection of methylated nucleic acids within a population of unmethylated nucleic acids, suppression of the amplification of nucleic acids which are unmethylated at the position in question would be carried out by the use of blocking probes comprising a ‘CpA’ or ‘TpA’ at the position in question, as opposed to a ‘CpG’ if the suppression of amplification of methylated nucleic acids is desired.

[0173] For PCR methods using blocker oligonucleotides, efficient disruption of polymerase-mediated amplification requires that blocker oligonucleotides not be elongated by the polymerase. Preferably, this is achieved through the use of blockers that are 3′-deoxyoligonucleotides, or oligonucleotides derivatized at the 3′ position with other than a “free” hydroxyl group. For example, 3′-O-acetyl oligonucleotides are representative of a preferred class of blocker molecule.

[0174] Additionally, polymerase-mediated decomposition of the blocker oligonucleotides should be precluded. Preferably, such preclusion comprises either use of a polymerase lacking 5′-3′ exonuclease activity, or use of modified blocker oligonucleotides having, for example, thioate bridges at the 5′-termini thereof that render the blocker molecule nuclease-resistant. Particular applications may not require such 5′ modifications of the blocker. For example, if the blocker- and primer-binding sites overlap, thereby precluding binding of the primer (e.g., with excess blocker), degradation of the blocker oligonucleotide will be substantially precluded. This is because the polymerase will not extend the primer toward, and through (in the 5′-3′ direction) the blocker—a process that normally results in degradation of the hybridised blocker oligonucleotide.

[0175] A particularly preferred blocker/PCR embodiment, for purposes of the present invention and as implemented herein, comprises the use of peptide nucleic acid (PNA) oligomers as blocking oligonucleotides. Such PNA blocker oligomers are ideally suited, because they are neither decomposed nor extended by the polymerase.

[0176] Preferably, therefore, the base sequence of said blocking oligonucleotides is required to comprise a sequence having a length of at least 9 nucleotides which hybridises to a treated nucleic acid sequence according to one of SEQ ID NO: 236 to SEQ ID NO: 347 and sequences complementary thereto, wherein the base sequence of said oligonucleotides comprises at least one CpG, TpG or CpA dinucleotide.

[0177] The fragments obtained by means of the amplification can carry a directly or indirectly detectable label. Preferred are labels in the form of fluorescence labels, radionuclides, or detachable molecule fragments having a typical mass which can be detected in a mass spectrometer. Where said labels are mass labels, it is preferred that the labelled amplificates have a single positive or negative net charge, allowing for better detectability in the mass spectrometer. The detection may be carried out and visualised by means of, e.g., matrix assisted laser desorption/ionisation mass spectrometry (MALDI) or using electron spray mass spectrometry (ESI).

[0178] Matrix Assisted Laser Desorption/Ionisation Mass Spectrometry (MALDI-TOF) is a very efficient development for the analysis of biomolecules (Karas and Hillenkamp, Anal Chem., 60:2299-301, 1988). An analyte is embedded in a light-absorbing matrix. The matrix is evaporated by a short laser pulse thus transporting the analyte molecule into the vapour phase in an unfragmented manner. The analyte is ionised by collisions with matrix molecules. An applied voltage accelerates the ions into a field-free flight tube. Due to their different masses, the ions are accelerated at different rates. Smaller ions reach the detector sooner than bigger ones. MALDI-TOF spectrometry is well suited to the analysis of peptides and proteins. The analysis of nucleic acids is somewhat more difficult (Gut and Beck, Current Innovations and Future Trends, 1:147-57, 1995). The sensitivity with respect to nucleic acid analysis is approximately 100-times less than for peptides, and decreases disproportionally with increasing fragment size. Moreover, for nucleic acids having a multiply negatively charged backbone, the ionisation process via the matrix is considerably less efficient. In MALDI-TOF spectrometry, the selection of the matrix plays an eminently important role. For desorption of peptides, several very efficient matrixes have been found which produce a very fine crystallisation. There are now several responsive matrixes for DNA, however, the difference in sensitivity between peptides and nucleic acids has not been reduced. This difference in sensitivity can be reduced, however, by chemically modifying the DNA in such a manner that it becomes more similar to a peptide. For example, phosphorothioate nucleic acids, in which the usual phosphates of the backbone are substituted with thiophosphates, can be converted into a charge-neutral DNA using simple alkylation chemistry (Gut and Beck, Nucleic Acids Res. 23: 1367-73, 1995). The coupling of a charge tag to this modified DNA results in an increase in MALDI-TOF sensitivity to the same level as that found for peptides. A further advantage of charge tagging is the increased stability of the analysis against impurities, which makes the detection of unmodified substrates considerably more difficult.

[0179] In the fourth step of the method, the amplificates obtained during the third step of the method are analysed in order to ascertain the methylation status of the CpG dinucleotides prior to the treatment.

[0180] In embodiments where the amplificates were obtained by means of MSP amplification, the presence or absence of an amplificate is in itself indicative of the methylation state of the CpG positions covered by the primer, according to the base sequences of said primer.

[0181] Amplificates obtained by means of both standard and methylation specific PCR may be further analysed by means of hybridisation-based methods such as, but not limited to, array technology and probe based technologies as well as by means of techniques such as sequencing and template directed extension.

[0182] In one embodiment of the method, the amplificates synthesised in step three are subsequently hybridised to an array or a set of oligonucleotides and/or PNA probes. In this context, the hybridisation takes place in the following manner: the set of probes used during the hybridisation is preferably composed of at least 2 oligonucleotides or PNA-oligomers; in the process, the amplificates serve as probes which hybridise to oligonucleotides previously bonded to a solid phase; the non-hybridised fragments are subsequently removed; said oligonucleotides contain at least one base sequence having a length of at least 9 nucleotides which is reverse complementary or identical to a segment of the base sequences specified in the present Sequence Listing; and the segment comprises at least one CpG, TpG or CpA dinucleotide.

[0183] In a preferred embodiment, said dinucleotide is present in the central third of the oligomer. For example, wherein the oligomer comprises one CpG dinucleotide, said dinucleotide is preferably the fifth to ninth nucleotide from the 5′-end of a 13-mer. One oligonucleotide exists for the analysis of each CpG dinucleotide within the sequence according to SEQ ID NO: 1 to SEQ ID NO: 56, and the equivalent positions within SEQ ID NO: 236 to SEQ ID NO: 347. Said oligonucleotides may also be present in the form of peptide nucleic acids. The non-hybridised amplificates are then removed. The hybridised amplificates are then detected. In this context, it is preferred that labels attached to the amplificates are identifiable at each position of the solid phase at which an oligonucleotide sequence is located.

[0184] In yet a further embodiment of the method, the genomic methylation status of the CpG positions may be ascertained by means of oligonucleotide probes that are hybridised to the bisulfite treated DNA concurrently with the PCR amplification primers (wherein said primers may either be methylation specific or standard).

[0185] A particularly preferred embodiment of this method is the use of fluorescence-based Real Time Quantitative PCR (Heid et al., Genome Res. 6:986-994, 1996; also see U.S. Pat. No. 6,331,393) employing a dual-labelled fluorescent oligonucleotide probe (TaqMan™ PCR, using an ABI Prism 7700 Sequence Detection System, Perkin Elmer Applied Biosystems, Foster City, Calif.). The TaqMan™ PCR reaction employs the use of a non-extendible interrogating oligonucleotide, called a TaqMan™ probe, which, in preferred embodiments, is designed to hybridise to a GpC-rich sequence located between the forward and reverse amplification primers. The TaqMan™ probe further comprises a fluorescent “reporter moiety” and a “quencher moiety” covalently bound to linker moieties (e.g., phosphoramidites) attached to the nucleotides of the TaqMan™ oligonucleotide. For analysis of methylation within nucleic acids subsequent to bisulfite treatment, it is required that the probe be methylation specific, as described in U.S. Pat. No. 6,331,393, (hereby incorporated by reference in its entirety) also known as the MethylLight™ assay. Variations on the TaqMan™ detection methodology that are also suitable for use with the described invention include the use of dual-probe technology (Lightcycler™) or fluorescent amplification primers (Sunrise™ technology). Both these techniques may be adapted in a manner suitable for use with bisulfite treated DNA, and moreover for methylation analysis within CpG dinucleotides.

[0186] A further suitable method for the use of probe oligonucleotides for the assessment of methylation by analysis of bisulfite treated nucleic acids In a further preferred embodiment of the method, the fifth step of the method comprises the use of template-directed oligonucleotide extension, such as MS-SNuPE as described by Gonzalgo and Jones, Nucleic Acids Res. 25:2529-2531, 1997.

[0187] In yet a further embodiment of the method, the fourth step of the method comprises sequencing and subsequent sequence analysis of the amplificate generated in the third step of the method (Sanger F., et al., Proc Natl Acad Sci USA 74:5463-5467, 1977).

[0188] In the most preferred embodiment of the method the genomic nucleic acids are isolated and treated according to the first three steps of the method outlined above, namely:

a) obtaining, from a subject, a biological sample having subject genomic DNA;
b) extracting or otherwise isolating the genomic DNA;
c) treating the genomic DNA of b), or a fragment thereof, with one or more reagents to convert cytosine bases that are unmethylated in the 5-position thereof to uracil or to another base that is detectably dissimilar to cytosine in terms of hybridisation properties; and wherein
d) amplifying subsequent to treatment in c) is carried out in a methylation specific manner, namely by use of methylation specific primers or blocking oligonucleotides, and further wherein
e) detecting of the amplificates is carried out by means of a real-time detection probe, as described above.

[0189] Preferably, where the subsequent amplification of d) is carried out by means of methylation specific primers, as described above, said methylation specific primers comprise a sequence having a length of at least 9 nucleotides which hybridises to a treated nucleic acid sequence according to one of SEQ ID NO: 236 to SEQ ID NO: 347 and sequences complementary thereto, wherein the base sequence of said oligomers comprises at least one CpG dinucleotide.

[0190] In an alternative most preferred embodiment of the method, the subsequent amplification of d) is carried out in the presence of blocking oligonucleotides, as described above. Said blocking oligonucleotides comprising a sequence having a length of at least 9 nucleotides which hybridises to a treated nucleic acid sequence according to one of SEQ ID NO: 236 to SEQ ID NO: 347 and sequences complementary thereto, wherein the base sequence of said oligomers comprises at least one CpG, TpG or CpA dinucleotide. Step e) of the method, namely the detection of the specific amplificates indicative of the methylation status of one or more CpG positions according to SEQ ID NO: Ito SEQ ID NO: 56 is carried out by means of real-time detection methods as described above.

[0191] In the final step of the method the presence, absence or molecular classification (differentiation between lung squamous cell carcinoma and lung adenocarcinoma) is determined. Preferably, the correlation of the methylation status of the marker CpG positions with the presence, absence or molecular classification of lung cell proliferative disorders is done substantially without human intervention. For the diagnosis of NSCLC hypermethylation of a gene or its promoter or regulatory regions is indicative of the presence of NSCLC, with the exception of the genes AREG, IGF1R, EGF, MAPK1, BCL2 and PTPRCAP/RPS6 KB2 in which cases hypomethylation is indicative of the presence of NSCLC. For the molecular classification (differentiation) of lung squamous cell carcinoma and lung adenocarcinoma the genes PIK3R1, BCL2L1 and IGF1 are hypermethylated in lung squamous cell carcinoma as relative to lung adenocarcinoma and the genes SRC and RASGRP2 are hypomethylated in lung squamous cell carcinoma as relative to lung adenocarcinoma.

[0192] It is particularly preferred that the classification of the sample is carried out by algorithmic means. The development of algorithmic methods for the classification of a sample based on the methylation status of the CpG positions within the panel are demonstrated in the examples.

[0193] In one embodiment machine learning predictors are trained on the methylation patterns at the investigated CpG sites of the samples with known status. A selection of the CpG positions which are discriminative for the machine learning predictor are used in the panel. In a particularly preferred embodiment of the method, both methods are combined; that is, the machine learning classifier is trained only on the selected CpG positions that are significantly differentially methylated between the classes according to the statistical analysis.

[0194] Additional embodiments of the invention provide a method for the analysis of the methylation status of genomic DNA according to the invention (SEQ ID NO: 1 to SEQ ID NO: 56, and complements thereof) without the need for pretreatment.

[0195] In the first step of such additional embodiments, the genomic DNA sample is isolated from tissue or cellular sources. Preferably, such sources include cell lines, histological slides, body fluids, or tissue embedded in paraffin. In the second step, the genomic DNA is extracted. Extraction may be by means that are standard to one skilled in the art, including but not limited to the use of detergent lysates, sonification and vortexing with glass beads. Once the nucleic acids have been extracted, the genomic double-stranded DNA is used in the analysis. In a preferred embodiment, the DNA may be cleaved prior to the treatment, and this may be by any means standard in the state of the art, in particular with methylation-sensitive restriction endonucleases.

[0196] In the third step, the DNA is then digested with one or more methylation sensitive restriction enzymes. The digestion is carried out such that hydrolysis of the DNA at the restriction site is informative of the methylation status of a specific CpG dinucleotide.

[0197] In the fourth step, which is optional but a preferred embodiment, the restriction fragments are amplified. This is preferably carried out using a polymerase chain reaction, and said amplificates may carry suitable detectable labels as discussed above, namely fluorophore labels, radionuclides and mass labels.

[0198] In the fifth step the amplificates are detected. The detection may be by any means standard in the art, for example, but not limited to, gel electrophoresis analysis, hybridisation analysis, incorporation of detectable tags within the PCR products, DNA array analysis, MALDI or ESI analysis.

[0199] Subsequent to the determination of the methylation state of the genomic nucleic acids the presence, absence or subclass of lung cell proliferative disorder is deduced based upon the methylation state of at least one CpG dinucleotide sequence of SEQ ID NO: 1 to SEQ ID NO: 56, or an average, or a value reflecting an average methylation state of a plurality of CpG dinucleotide sequences of SEQ ID NO: 1 to SEQ ID NO: 56.

[0200] Diagnostic Assays for lung cell proliferative disorders—The present invention enables diagnosis of events which are disadvantageous to patients or individuals in which important genetic and/or epigenetic parameters within one or more of SEQ ID NO: 1 to SEQ ID NO: 56 may be used as markers. More specifically, the present invention enables the screening of at-risk populations (e.g. smokers) for the early detection of lung cancers. Further embodiments of the method may also be used as alternatives to cytological screening for the classification of lung carcinomas.

[0201] Specifically, the present invention provides for diagnostic cancer assays based on measurement of differential methylation of one or more CpG dinucleotide sequences of SEQ ID NO: 1 to SEQ ID NO: 56, or of subregions thereof that comprise such a CpG dinucleotide sequence. Typically, such assays involve obtaining a tissue sample from a test tissue, performing an assay to measure the methylation status of at least one of one or more CpG dinucleotide sequences of SEQ ID NO: 1 to SEQ ID NO: 56 derived from the tissue sample, relative to a control sample, or a known standard and making a diagnosis or prognosis based thereon.

[0202] In particular preferred embodiments, inventive oligomers are used to assess the CpG dinucleotide methylation status, such as those based on SEQ ID NO: 1 to SEQ ID NO: 347, or arrays thereof, as well as in kits based thereon and useful for the diagnosis and/or classification of lung cell proliferative disorders.

[0203] Kits—Moreover, an additional aspect of the present invention is a kit comprising, for example: a bisulfite-containing reagent; a set of primer oligonucleotides containing at least two oligonucleotides whose sequences in each case correspond, are complementary, or hybridise under stringent or highly stringent conditions to a 16-base long segment of the sequences SEQ ID NO: 1 to SEQ ID NO: 347; oligonucleotides and/or PNA-oligomers; as well as instructions for carrying out and evaluating the described method. In a further preferred embodiment, said kit may further comprise standard reagents for performing a CpG position-specific methylation analysis, wherein said analysis comprises one or more of the following techniques: MS-SNuPE, MSP, MethyLight™, HeavyMethyl™, COBRA, and nucleic acid sequencing. However, a kit along the lines of the present invention can also contain only part of the aforementioned components. It is particularly preferred that the base sequence of said at least two oligonucleotides in each case correspond, are complementary, or hybridise under stringent or highly stringent conditions to a 16-base long segment of the sequences SEQ ID NO: 236 to SEQ ID NO: 347. It is further preferred that the base sequence of said oligomers comprises at least one CpG, CpA or TpG dinucleotide.

[0204] It is particularly preferred that the kit according to the present invention further comprises instructions for determining the absence or presence of a lung cell proliferative disorder or characteristics thereof.

[0205] While the present invention has been described with specificity in accordance with certain of its preferred embodiments, the following examples serve only to illustrate the invention and are not intended to limit the invention within the principles and scope of the broadest interpretations and equivalent configurations thereof.

### EXAMPLE 1

### Microarray Analysis

### Samples

[0206] To evaluate marker candidates a significant number of patient and control samples was analysed using the applicant's proprietary methylation sensitive Microarray technology. For the Microarray study two gene panels were analysed on a collection of 48 matched pairs of samples from a commercial supplier, each sample consisting of diseased tissue and normal adjacent tissue (hereinafter also referred to as NAT). An overview of patient samples collected for the microarray study is provided in Table 12.

### Gene Selection

[0207] An initial selection of 88 candidate marker genes were identified.

### DNA Extraction

[0208] Samples were received from a commercial supplier as 10 mm paraffin embedded tissue sections. DNA from tissue samples were isolated using the applicant's proprietary techniques. In brief, samples were de-paraffinated and lysed followed by bisulfite treatment and purification of the converted DNA.

### PCR Establishment and Multiplex PCR Optimisation

[0209] To amplify all gene fragments, PCR assays were designed to match bisulfite treated DNA and to allow amplification independent of the methylation status of the respective fragment. A standardised primer design workflow optimised by the applicant for bisulfite treated DNA was employed. Primers are listed in table 1.

[0210] To allow efficient amplification, individual PCR assays were combined into multiplex PCR (mPCR) assays usually combining up to 8 primer pairs into one mPCR assay. The performance of each mPCR was evaluated on
[0211] bisulfite converted DNA from pooled samples according to Table 12
[0212] bisulfite converted standard DNA from human blood (Promega G3041) as a positive control
[0213] a water control with no DNA template to show absence of contaminations and primer dimer formation.

[0214] Multiplex PCR products were analysed by agarose gel electrophoresis and fragment analysis on an ALF express II DNA Analysis System (Amersham Biosciences). The best performing combination of multiplex PCR sets were chosen.

### Oligonucleotide Probe Design and Selection.

[0215] Oligonucleotide probes were designed for accessible CpG positions within the amplificates that only matched the bisulfite converted DNA fragments. This enables the exclusion of signals arising from incomplete bisulfite conversion.

[0216] To estimate background hybridisation negative control oligonucleotides were designed, that matched none of the amplificates of a microarray amplificate set. Further positive control oligonucleotides and matching spiking oligonucleotides were designed. The labelled spiking oligonucleotides are added to the hybridisation solution and bind to the positive control oligonucleotides spotted at several positions on the microarray. This positive control system allows to estimate hybridisation signal distribution over one microarray (intrachip variability) and over the whole set of microarrays (interchip variability). Microarray oligonucleotides with 5′ C6 amino modifications were supplied by MWG (Ebersberg, Germany). Spiking oligonucleotides were supplied with a 5′-Cy5 fluorescent label. Oligonucleotide probes are listed in table 2.

### Bisulfite Treatment and Multiplex PCR

[0217] Total genomic DNA of all samples and controls was bisulfite treated converting unmethylated cytosines to uracil. By means of this treatment methylated cytosines are conserved. Bisulfite treatment was performed according to the applicant's optimised proprietary bisulfite treatment procedure. In order to avoid a potential process-bias, the samples were randomised into processing batches. In order to monitor the mPCR results ALF analysis was used.

### Hybridisation

[0218] All PCR products from each individual sample were then hybridised to glass slides carrying a pair of immobilised oligonucleotides for each CpG position under analysis. Each detection oligonucleotide was designed to hybridise to the bisulphite converted sequence around one CpG site which was either originally unmethylated (TG) or methylated (CG). See Table 2 for further details of all hybridisation oligonucleotides used (both informative and non-informative.) Hybridisation conditions were selected to allow the detection of the single nucleotide differences between the TG and CG variants.

[0219] Fluorescent signals from each hybridised oligonucleotide were detected using genepix scanner and software. Ratios for the two signals (from the CG oligonucleotide and the TG oligonucleotide used to analyse each CpG position) were calculated based on comparison of intensity of the fluorescent signals.

[0220] The samples were processed in batches of 80 samples randomised for sex, diagnosis, tissue, and bisulphite batch For each bisulfite treated DNA sample 2 hybridisation's were performed. This means that for each sample a total number of 4 chips were processed.

### Data Analysis

[0221] For the analysis of chip data, the applicant's proprietary software (‘Episcape’) was used. EpiScape contains a data warehouse that supports queries to sample, genome and laboratory management databases, respectively. It encompasses a variety of statistical tools for analysing and visualising methylation array data. In the following sections we summarise the most important data analysis techniques that were applied for analysing the data.

### From Raw Hybridisation Intensities to Methylation Ratios

[0222] The log methylation ratio (log(CG/TG)) at each CpG position is determined according to a standardised pre-processing pipeline that includes the following steps:
[0223] For each spot the median background pixel intensity is subtracted from the median foreground pixel intensity. This gives a good estimate of background corrected hybridisation intensities.
[0224] For both CG and TG detection oligonucleotides of each CpG position the background corrected median of the 4 redundant spot intensities is taken.
[0225] For each chip and each CG/TG oligo pair, the log(CG/TG) ratio is calculated.
[0226] For each sample the median of log(CG/TG) intensities over the redundant chip repetitions is taken.

[0227] This log ratio has the property that the hybridisation noise has approximately constant variance over the full range of possible methylation rates (see e.g. Huber W, Von Heydebreck A, Sultmann H, Poustka A, Vingron M. 2002. Variance stabilisation applied to Microarray data calibration and to the quantification of differential expression. Bioinformatics. 18 Suppl 1: S96-S104.)

### Comparison of Groups: Univariate Methods

[0228] Student paired sample t-test rank sum tests were used to compare groups (e.g. tumour vs. NAT) in terms of measurement values of single CpG sites. A significant test result (p<0.05) indicates a shift between the distributions of the respective methylation log ratios, i.e. log(CG/TG).

### Comparison of Groups: Multivariate Methods

[0229] As referred to herein a marker (sometimes also simply refereed to as gene or amplicon) is a genomic region of interest (also referred to herein using the abbreviation ROI). The ROI usually comprises several CpG positions. For testing the null hypothesis that a marker has no predictive power we use the likelihood ratio test for logistic regression models (see Venables, W. N. and Ripley, B. D. Modern Applied Statistics with S-PLUS, 3rd Ed. edition. New York: Springer, 2002). The logistic regression model for a single marker is a linear combination of methylation measurements from all CpG positions in the respective ROI. The fitted logistic regression model is compared to a constant probability model that is independent of methylation and represents the null hypothesis. The p-value of the marker is computed via the likelihood ratio test.

[0230] A significant p-value for a marker means that the methylation of this ROI has some systematic correlation to the question of interest as given by the sample classes. In general a significant p-value does not necessarily imply a good classification performance. However, because with logistic regression we use a linear predictor as the basis of our test statistic small p-values will be indicative of a good clinical performance.

### Multiple Test Corrections

[0231] Performing a large number of tests at the 5% level will lead to a large number of false positive test results. If there are no differences between groups, the probability of rejecting at least one hypothesis of equality is nearly 1, if about 200 tests are performed. Correction for multiplicity is therefore necessary to reliably conclude that a test result is really significant. A conservative, but simple method is the Bonferroni correction which multiplies all p-values by the number of tests performed, where corrected values >1 are censored to 1.0.

[0232] Bonferroni corrections are used for all analyses. The correction helps to avoid spurious findings, however, it is a very conservative method and false negative results (“missed markers”) are a frequent consequence. Therefore, results corrected by the less conservative False Discovery Rate (FDR) methods are also given.

### Class Prediction by Supervised Learning

[0233] In order to give a reliable estimate of how well the CpG ensemble of a selected marker can differentiate between different tissue classes it is possible to determine its prediction accuracy by classification. For that purpose it is necessary to calculate a methylation profile-based prediction function using a certain set of tissue samples with a specific class label. This step is called training and it exploits the prior knowledge represented by the data labels. The prediction accuracy of that function is then tested on a set of independent samples. A method of choice is the support vector machine (SVM) algorithm (see e.g. Cristiannini, N. and Shawe-Taylor, J. An introduction to support vector machines. Cambridge, UK: Cambridge University Press, 2000; Duda, R. O., Hart, P. E., and Stork, D. G. Pattern Classification. New York: John Wiley and Sons, 2001) to learn the prediction function.

### Results

[0234] For each of the analyses results are provided in tables 4-11. Mean methylation signal is provided along with the variance thereof. FIGS. 1-8 are matrices showing a calibrated representation of the level of methylation at each CpG position within each sample.

Lung Cancer vs. Normal Lung Adjacent Tissue

[0235] The lung cancer group consisted of both adenocarcinoma and squamous cell carcinoma. See table 4 for univariate results and table 5 for multivariate results. FIG. 1 shows the ranked matrices of the data obtained according to CpG methylation differences between the two classes of tissues using a univariate analysis. FIG. 2 shows a ranked matrices of the data obtained according to CpG methylation differences between the two classes of tissues using a multivariate analysis. The most significant CpG positions are at the bottom of the matrix with significance decreasing towards the top. Red indicates total methylation at a given CpG position, green represents no methylation at the particular position. Each row represents one specific CpG position of a gene and each column shows the methylation profile for the different CpGs for one sample.

[0236] Using FDR correction methylation differences that were considered significant were found either by univariate or multivariate analysis in a total of 36 genes. These were AKT2, BCL2, CDKN2A, ERBB4, FOS, GSTP1, HRAS, MDR1(ABCB1), RARB, ESR1, BCL2, PIK3CA, MAPK1, EREG, RASSF1, IGF1R, EGF, IGF1, STAT1, AREG, GP1BB, PTPRCAP(RPS6KB2), STK15(STK6), BTC, FOXF1, SHC1, STK12(AURKB), RASGRP2, ABCC4, RASGRP1, RASGRF1, MVP, ADAM17(TACE), ABCC12, PAK7 and NRG3.

[0237] Two genes identified in univariate analysis did not show significant differences in multivariate analysis while eight genes that were not identified as significantly different in univariate analysis showed up in the multivariate analysis.

Lung Adenocarcinoma vs. Lung Squamous Cell Carcinoma

[0238] See Table 6 for univariate results and Table 7 for multivariate results. FIG. 3 shows a ranked matrices of the data obtained according to CpG methylation differences between the two classes of tissues using a univariate analysis. FIG. 4 shows a ranked matrices of the data obtained according to CpG methylation differences between the two classes of tissues using a multivariate analysis. Results from each of the two microarrays is shown as a separate matrix of each figure. The most significant CpG positions are at the bottom of the matrix with significance decreasing towards the top. Red indicates total methylation at a given CpG position, green represents no methylation at the particular position. Each row represents one specific CpG position of a gene and each column shows the methylation profile for the different CpGs for one sample. Only the gene IGFR1 was found to be significant in either of univariate or multivariate Bonferroni corrected methods.

Lung Adenocarcinoma vs. Normal Adjacent Tissue

[0239] See Table 8 for univariate results and Table 9 for multivariate results. FIG. 5 shows a ranked matrices of the data obtained according to CpG methylation differences between the two classes of tissues using a univariate analysis. FIG. 6 shows a ranked matrices of the data obtained according to CpG methylation differences between the two classes of tissues using a multivariate analysis. Results from each of the two microarrays is shown as a separate matrix of each figure. The most significant CpG positions are at the bottom of the matrix with significance decreasing towards the top. Red indicates total methylation at a given CpG position, green represents no methylation at the particular position. Each row represents one specific CpG position of a gene and each column shows the methylation profile for the different CpGs for one sample. After Bonferroni correction the genes AREG, GP1BB, FOXF1, RASGRP2 and NRG3 were significant in differentiating between the two classes.

Lung Squamous Cell Carcinoma vs. Normal Lung Adjacent Tissue

[0240] See Table 10 for univariate results and Table 11 for multivariate results. FIG. 7 shows a ranked matrices of the data obtained according to CpG methylation differences between the two classes of tissues using a univariate analysis. FIG. 8 shows a ranked matrices of the data obtained according to CpG methylation differences between the two classes of tissues using a multivariate analysis. Results from each of the two microarrays is shown as a separate matrix of each figure. The most significant CpG positions are at the bottom of the matrix with significance decreasing towards the top. Red indicates total methylation at a given CpG position, green represents no methylation at the particular position. Each row represents one specific CpG position of a gene and each column shows the methylation profile for the different CpGs for one sample. After Bonferroni correction the genes IGF1, AREG and RASGRP1 were significant in differentiating between the two classes.

The application's sequence listing, which the Patent Office published only in electronic form, follows.

SEQUENCE LISTING (1755 sequences)

SEQ ID NO: 1 - DNA, 6197 bp, Homo Sapiens
ccgggagcttaaaggcaggaggcagggatgtgactctcacaggcccaagaggagccagatcatcccagtgcggctggaagctcccatgctataccccatctctcccgcaccccaacgcagcttacctggggaattggagcaggactcaggcccaaactcacacctctagtcaactcaaatcctgactctaccacttccaggctacacaggtcacttctctgaacctcagcttccgcatctgtaaaatggaatctttttttttttttttttttttttttttttttttttttttgagacagagtctcactctgtcgccaggctggagtgcagtagtgcgatcttggctcactgcaacctctgcttcccaggttcaagcaattctcctgtctcaacctcccgaatagctaggattataggcacccaccaccacacctggctaatttttgtatttttagtacagacagggtttcaccatcttggccaggctggtactgaactcctgacctcgtgatccaccctcctcggcctcccaaagtgctgggattacaggtgtgaaccaccgtgcccagcctgtagaatggaatcttaacaccaatctgcccaagcacatgtttatgttatctcaaaagataatttttgcaggccaggtgcagtgattcacgcctgtaatcccagcactttgggaggctgagggatgtggatcactggagcccaaaagttcaagatcagcctgagcaaaatagggagactcccatctctactgaaaattgttttaaaaaaattagccaggtatgatggtgcatgcctgtagtcccagctactcagaaggctgaggtgggaggaccacttgagccagtgaggtcaaggctgcaatcagccatgatggtgccactgcattccagcctgggtgacagagccagaccctgtctcaaaaaaataatgaaaaatttaaaaagatgatttttctgataaccatgggttgtcctggggacccaatgagatggcttcacacacagctggggacagggccagtgcttgaaaaataggtggcaattacataaaggactctgacatcaggggccgtcctgagcctgtcagagccatgcagtggcagctaatgttactgctgtcactacttggttctaaaggaatcatcccaataatttccaacatgcccctactaactttttgaaaatatcatctaaatgaaaacacacagctaaaaagagtcaatgccctgcagacacctcctcccacccgccaaggccttcggacaccagtttgagaagctgggctctagggcgccctgtctccaaagcagaatatggtctgctttctccatccctggctgccacctgaatccagccagctctctcccacacaggtccctccccacccacctgtgtcccttctctttggggataaagccctggatccccatcatagcccaggccctgagccctgccaccctgctctctccccctcacccactcccccggctccagctacatgggcctgctgttccaccagcacatccagatatcgccttccttgcggcctttacctggctgcaccccgtccagcccacttcctcgggctctcacatcacaggggctcctcagcagccttcccaagcccctctcccacccagtccagctagatctctgttccctccttcagccacaccaagcactcacaggccaatgcaacctctctgccacctccgatcgcatccagaactacacgtggcacatagaagtgattcaatcaatatttggagacagatggaacacacaaatgaccaagaacagccaaaggctggctcctgaggctgttcagcaatcaggcccctagggcagtggggagggggtgcctcccatcctcatctcttccccctgggccccccttgggaggggccaaggtcatggtattgggggtggagagaagcagccacaccccacatcccaagcaggcatggaatggagtcatttctggattactgaggcctactttgtgccagctctgtctaggagaagagaaagcagaaaagaaatcatgatgacaacagtgacaactccagtcatagcaggcagggcaagaagatgaggctgtcttcaaaaggcagcttcgccgacagagcagggttcaaccatcatgcctattactgacttccagcaaatccaataacctctctatgcccgtttcctcccctgtacaacggggacgatcgggacagcgagctgccaggctgtggtgaggatgagtgagagcagacaccttaagctctgcagcagtgcccagcactgagaggcgaactactcacgagaatgaccccaatattctatgtggcttcctgggcctcagtttcctatctacgagatgggagtgctaacactgcccacctcccaggctgctgtgcaggtttgtagagctaatatgcagcgtctggttgggcaggagtacagtggtgggagtgattcacattcctgtctggagccctcccatcagctaacaggccctaccactctctcccaaggaccaacaacgagcctgtgcccactgccctgcagagccccttctgtgctctcaggtgccctcagtcctgtctggcaatcaccaggagtagcatcagcccaaattcatcccgccgcctcctcaggaggcctgtgctttccaacgcagcagctccgtgcatcctccccaccgccccactcagcaggaaggttcccgtttacagctgagcaaaatgcaccttagggagaagaaataaggccccagagctccacagccaccgagaggggtgccaagagcagggttctcacccacgtcagctacccccgggaccaggtcactcagcagccccagctgggtaagtgtacaccaaaaacccaccagaccatgaagaacttgaagccaggctggagaagagaaccggggagcggcaactgccccagcccattcggaaagggcccacaaagtggcaaaccgaggaagacttgggtttctggcctcacccttagaaacaacatctgcgaacgagcttctccagcaggacggctgggctgaagaaactcctgctgggacctctgacatgcagtctcctcttggccgacccggcttgctgtccctcgctcggcacagtcagagcacctgggccctgctgtgggtgccgagttggcagtgggtcctgccccaagggggccaggctgagctcccacccagcgcccctcccacactcactccctccctcctggtcctgctcccaggctgtctcccccagctgggcctctcgctgcttggctggctgtccagaagagcctgccatggaaccaccccaccgtgcggcccggaggcctgtggttgagggccttccgctgagagctctgggaagctgaagagaggcccggggaggggtgaccctgggtcctccaggggcttggagctcaagtctgaaagacactcctttccatcccaacccatcccgggggccttctggagaccctagtggtttgttctgaggggttctgctccttctaggaagataccctggaacacacctcaaaaaaaaaaaaaaaagccagagcgcctgctcccgcaccaagccttaggggtgagcccatgggtgggatcagaagtcacactcaccaggggctactgagctgtggtgggggaatctctggaagcccagattcatagcctgtccccaacacttcctggttgggggactcagcacaagctacagaggctctccaggcttcagttctcaccacttgtaaagcgggaatcagagaagattcctcctgggtctaatgggtcttcacccagatcctcccatggctccctcacagcactccagtccctacccacacgtcacctcctcagggaggtcctccctgatcacccagctatagtggagaaacatgcccacactctcaacctggccctcatttattttgccttcgtaatatcaaccacacctgagcccaaccagagacctgggtgctgggcgccagtcacaagccctggtctttccaattccagaggagcactgggaatggcgcaggcctacaggcccacggcagcgtggacgcagggtcagcgggtgctgtctgtatcaggtgtgactgctgccctgcgttgctattcagtattagtccggctggttgggttggggaggaatgggcagagaaatcagcccaatgagcctcccctcctctttccctaaaagtaacagccacgggctctggagaacacggtgtgaaaaccacaggagggaggcaaccctcaggcctttgctggctgtaaggcagtgatgctactggaggggaagtgggaggcctgtgaaacgccctgctccgctcagtcaaatctacccacgcccccaggcaggagcctgtgaccggctcctgggtcacctgctaacaccctgaatctgaccaggctgttcctgctgaaattccaaactccttcacagacagtccacaaggctcccagtgaaagggccctgcctgccccgcagccccaggactcatctcctccctgctccctcgctctgccaagccacacaggcctccgtgaggcttgtccctgcacctcaccaagctctgtcctcccttcagacctttgcactgtggttccctccacctggagggctgttccttctcctcccatcccacatgactgcctcaccttgccaaactgggatcagctcagaggccctccccacagccgcatgcatctaaagaagtgcccagtctgtcacctgatttgaattcgctgcctagctcctccccctctaaccggctccttgcttattaacctgtttcgggttggtcttgcttagccccacaaggatagggactttggcaagtacactgctgtattcccagtactgatgcaacgctggcacatacgaggtgttcagtaaatggtggcggatgagtgaaaccttttcctcggctccacaatacccttaggatccatcctcacctctcacccaggcccacaggccagtgcagcacagcccctgccaacccctgcaggcacttctgctgctccccctgcccaggcccagccttcctgccactcccagagctgtgagctgtggtgggctgggaaccaggggcagtggcatgcacctacggtcccagctactcaggagactgaggcaggaggatcacttgagcccaggagttcaagactagcctgagcaacatagcgagactcccgtttccacaaaaaatttaaaaattagctaggcatggtggcatgcacctgtagtcccagctactcaagaggatgaggtggaaggatcactaaagcctaggaggtcaagcctgcagtgagctgtgatcacaccactgcactccagcctgggtgacagagggaggccctgtctcaaaagaaaaaaaaaaacaagcacagagcctgacctctgaaaagactccagtgtgtctaccttggaggcgctcagggctgcaaagccactgcgtggaagaggagtgggcccgggagctgcccttgtcagttctgacttgattgcatgtctcccccgacctctgtttctgcatctgtaaaactgagatgctaatttcagccctgatctcctcctagtgctctctgacacggttctgtgaactggcaaaggccttcaaagtcccggcagaaatactaagaattacaattgctaagacagaccaacagctcaccatgtgtcgggcactgttcttagtgaggagacatttccggtaggcttattgtatgccagaacagttatgaatgcttcccacaaattaatccactcagccttcacaataatcctatcaggtgggaattatcatcatccccatggcaccgatgatgaaatgagctcacaagggttggggagcctgctcaaggtcacacagccatggagtggcacggctggatttgaaccctgtgctctcactcgcttccatacacctctttacagaggctggaaaccagaacattgaagttctggatcctagctgggccaggctggggagctggatcccggaatgctcgaggggaccaaaagtagggggtgggggaggctggatgcctccgttccataacataatcatgactgccaaccaagacttacacagtaccaggcaccattctaggagcttctcgtggattaattcatttaatcctcacaacagcccaaggtggac

SEQ ID NO: 2 - DNA, 6201 bp, Homo Sapiens
gtccagaggaggaggtagggacgccgggaagcaacaactctgattttatttcgccggctccacagcctcccattgccccaggagcccacccgcactccaacccccgcatctcggacctgtggcctcagcccagactcacatcaccaagtgcacctacccagcctccgttatcctggatccaggtgtgcaggtgccggttcaggtactcagtcatccacagggcgatgttgtccaccaggggcgacatctcccggttgacgctctccacacacatgaccccaccgaactcaaagaaggccacaatcctcccccagttcaccccgtccctgaagagctcctccaccaccgtggcaaagcgtccccgcgcggtgaagggcgtcaggtgcagctggctggacatctcggcgaagtcgcggcggtagcggcgggagaagtcgtcgccggcctggcggagggtcaggtggaccacaggtggcaccgggctgagcgcaggccccgcggcggcgccgggggcagccggggtctgcagcggcgaggtcctggcgaccgggtcccgggatgcggctggatggggcgtgtgcccgggctgggaggagaagatgcccggtgcgggggcggcccccgggggcgcggcgcccacatctcccgcatcccactcgtagcccctctgcgacagcttataatggatgtacttcatcactatctcccggttatcgtaccctgttctcccagcgtgcgccatccttcccagaggaaaagcaacgggggccaacggcacctctcgccccagctcccaccccacggcccccagagaaagaagaggagttataatccagctattttattggatgtgctttgcattcttggacgagggggtgtcttcaatcacgcggaacacttgattctggtgtttcccccttggcatgagatgcaggaaatttttattccaattcctttcggatctttatttcatgaggcacgttattattagtaagtattgttaatatcagtctacttcctctgtgatgctgaaaggttaaagaaaaaacaaactaataagtaaaaaatcaggtgcgtttccctgtacacactgagtgaaagcagggcatacacactacaagtaacacggctaaaaagaatgtattaagctgcctggaaattaaatttactcgaatgcactttaagtaaaaaatctcaaaggtttccattgaaagttacattaaaccaatttcctgtgcagagaacttacttgtattttttaagtacagcatgatcctctgtcaagtttcctttttgtaaaaccaaaacaaatgcataaggcaacgatcccatcaatcttcagcactctccagttatagctgatttgaaacttcccaatgaatcaggagtcgcggggagagggagtaaaaattaggaggatttccagatcgattcccagacttctgcttcacagaaatgtcaatccgcaggaatcccaaccggagatctcaagagctcgagaaaaaaaaaaggcagcggcggcggcagatgaattacaattttcagtccggtattcgcagaagtcctgtgatgttttccccttctcggcaatttacacgcgcgcacacacgcgcgggcacaggcatgaatctctatccacgggaccgcttcacgcctccccaggagagagacaggggagaggggacgatgaaggagccggggacggaggcaggaatcctcttctgattaaactccgaacagcaaatgcattttccgaaaagctgctggataaatgaaggcaggacgcgcctggcccgccggtgccgagcgctagaagcccgcgctgtgtgtggtgcggcgaggggtggggagaaggaggtggtgggggagggttttattttttccctcttttcctaaaaaggatgactgctacgaagttctcccccctggaccccctcttccgctgcaccccaccggcgcaccccgcctccgggctgcgcaccctttctcctcctcctggtcctgcgcggcggcgctggctacggccgcctcccggagctcccgccgcgcagcccgctccgagcgctgacggccgccggcagggagggcccggagccccggcaccttcgctggcagcggcggcggcggcagcgcggcggggccacggagagcggcgggcgggagcgcggcgggcgggcgggcaggcggcgcggaggggcgggcgcgggaggaagggggcgggagcggggctgtggtgcctgtcctcttacttcattctctgcacagcccgaccggtttcctgtgcgtaacgtcacacggttcattcaaaaaaagaagaaagaaagagccctcctctgagccacccgaccgccccctccgccccgctccctggcccgggttaaaggcgccgcggcaggcccgggagtggcgcgtcccgccgggggcacatggcgcgcggggccgcggccggggagggcgcgtccgggccggccacccgcccgctccgctgcgcccgcggggcccggccagtgggtggcgcgggcggcacaggcctcccgcgcggccgcggcgcggtgggtgtgcgcggggccttctgctcaggcctgcggcaggccgcgtgcggacttggtggtcgctggggtccgcgacggggtgggggctcccggggaaccgcacgcggccgggccgggcggacgacggagtgcggaggggggcggctggcgggagggtgcgccatgaaaacaagggctggaaaagcgccgggaaccgcctggaccctttctggccgtgtgagtgtgtgtggagtgtgtgtgtgtgtgtgtgtgtgtgtgtgtgtctcgcctggaccttttctagccgtgtatgtgggagtgtgtgtgtcgcctggaccctttctagccgtgtatgagagtgtgtacacgcgcctacacacacacacgttgtgttaccggcgctcggccgccgggggaagacccaggccaatgccgccccccaccgcccccagcagtgggacctcagcgctgccctgctgtgaagacaggtgactctgcacgttttaagcaatgtctagggacgccccgagcgtggtgtttactttcaagtagcttcctaggtgtccgcgcactacacacgcacgcgcatccccgcccgtgtccacctgaacacctagtccgtggcccaggccatgcagaactcagcgctccagggaaggggtttatcaagggctttacgacagtttaagtcaatgttttccctctgtccctaacaccttttacactggtttagtgctacacgatgaggacttccatatagtaactttcaggcccaccgtcctaacgctggggtgggtgggctcctaaaggtctccacctttgcctcgtagccaatcctagttggccgcactttctcaaatgaggtacatagatacacacatacacattcacactcgcagacgtgtgtacgcgcaagcagacagttttaaattaatcagcatgaatagcccctagcaaaaaaggacaagaggacaaacaagttgcacgtgtgtatttttatctccaagagtctttgacaaagcaccaagaaaagaaaaaggtcttctagaagcacagcggcttacttaatagggctcgagtgcaaatatatagggacactggattattggggtcaagaaagatgacaaatgagtactacaatgtgtacaaatatgctatgactttttttttttttttgagacagagtcttgctctgttgtatcttggaggctggtgtgcagtggtgcgatctcagctcactgcaacctctgcctcccaggctcaagcaattctgcctcagcctcctgagtagctgggattacacgtgcacgccactacgctctgctaatttttgtatttttagtagagacggggtttcgccatactggccaggctggtctcgaactcctgacctcgttatccgcctgcctcagcctcccaaagtgctgggattacagacatgagccactgtgccctgcctgacatctttattttgtctcattcctactctaaaatcaaaacattctttaaaaagccagaaaagcacaccaaattatgatttttttaatttttacttagttggccttttttttttttttttaagagatggcttttgctatgttgcccaggctggactcgaacttctgggctcgaaggattctcccacctcagcctcatgaatagctgggactatacgcactgccatctctcttgggtgtttttattttatttcttcatttattgtatcccatcagcccaacaagccaacttctctcacataggaatgggggcctgggtacaaatttcttatccaggcaagaggggatgaaaggagatcctccttcttgcccttctgatggttgggacagagtcccttttatgcgcgtgggaggtgttttggtctggatagacactgggtatagattgacctagaataaatgttctcacataaattcataccaattgcacaacagtatggtttagaaatcttgaaagcgtattttaaagccccaaaattacctaagaggaattgaaaggcttcaagctcctaatactcagcatatgagtgaggaaatgataggacaaacctgcaaaagaaactgtacttctgcaaagggggcagccagaaggaaacggatcccctacttccagagaaagaaaagctgactgattttcgtcttcctttgctcccacagagcctcactctatggattttcccagactgattccttatgtggcatcttggctataatcagtcttgagacaggtctgtattgcagtctttggctaggggttatattttccctgggaatgttctagatactctttcaaatgaaagagtgaaaccattcctgcgttcagattccatgtttattagattccattttaaagcataagggcaagtattcccaggaagtatgtgacattgactactcgtctttgggcaatgctgaggtgggggagggaacaccagcctgaggcaggagtaactggatttgaatcctagatctatgcctgagaccttccaacaaccttacaaacatatgcacagtggacttttcactttccaagatgttttctacttgtaagagccaatggatgacccttttggcagctttacctggttggattctacaagtagcgtggcaccaggaagagaaaaaaaacaagatgcagggaatggagattgtatcaagagtctgaatggcctgtgttttctttccgtcttcattccccaggccaccaaacaaaaagcttttgattgccagttttcgccacctgctggttgtttcacagcgttactctcttcatccatccaagaaagttctttcatccatcatcaatataaatattctccaagtttatgaaattcaaaaggtacattattctaacatgaacatactaatgtttaatataggtatgtatcggccaggtgtggttgctcatgcctgtaatctcagcactttgggaggctgcggtgggtgtattgcttgaggccaagagtttgagaccagcctgcacaacatgacaaaactctatctccacaaaaaatacaaaaattagcggggcatggtggtgtgtgcctgtagtcccatctactctgaaggctgagataggacgatcacttgagcccaggaggtggaggctgtagtgagctgtgatcacaccactgcactgcagcctgggtgacagactgataccctgtctcaaaaaaaaaaagaaaagaaaagaaaaaaaaaatcatgtgtgtgtatcaaatcttcccagctagtaaactttttattgaaaatgtgggtagaatgagactattaactgaggatattgataactaataggtcagatggaagagtaaaccatggccccaacctgaaatggaaattaatccataaataaaatgagctgactagagagaataaaaacaagtagtccatatagtttgcataaaagaaaaatgaggccgagcgcagtggctcacggctgtaatcccagcactttgggaggcagaggtgggcagatcacctgaggtcaggaattcaagaccaggctgaccaatatggtggaaccccgtctctactaaaaatacaaaaattagccaggcgtggtggcggggacctgtagtcccagctactcaggaggctgaaacaggagaattgcttgaacccgggaggcagagattgcagtgagccaagat

SEQ ID NO: 3 - DNA, 6213 bp, Homo Sapiens
ttgggatttactatttagctatattcatcatgctatgaaacacatctcaaaaaaaacaatcaaacttattcctcccatcttaactgaggctttatatcttgattaccatctccccattcctcccaccccccagctctagtaaccaccattctactctttactgctaagaatgtaattgttttatatttcacagataagtgagaacatgtgatatttgtctttctgtgtttggcttatttcatttagcataatgctctccaattccaaaacttcaatttcttcaagtataaaataagaaggctagtttaattaaccctaaaattccttcctgtggtaggctgaataatgcccccccacccccaatgtctatgtcctaatcctcaaaaacttttaatacattaacttatgtggcaaaagaggctttgcagatgtgatttaattaatggtcttgagggagattatccagaattttcagggtgggcccaacataaccccaagtgtttttattagagggtcacagtcagagagaagatacaagaatggaagcacaggccacagagaaaatacagagaccatgagccaaggaatttgatggtcactagaagctggaaaagacaaggaaacagattgccccttagagtttccaaaaggaatgaaaccttgtggacccatttttgacttctgatctctagaactgtaaaataataattttgtgtttgttttagctaacacatttgtgataatttgtaacagcagcagtaggaaactaaaacacttcccaggtttatgatttgagagttcattaaacaagagatggtcacctctttggttcctaaatcatcttggaaacaaagccatttccagagaggaattttaaaatactgtctgcagtcatagcaaccttaaaatttgagtgctgcatggtggaagtagacaatttattttaggataactgttatttgttatattagtttgaggatggtggtgttaaagaggagttacttatttttaggtacatttcatactaaacacaaattgcataatttgcctaaatcaaggaattatactaaattatattatggttattaaatcctgtcctgagaaagtgaaactgactcagttttcaaagagacaaagagaaagtataagcaaaccaaattgcagctacaaaaagaaagacaaaatgttgcagtatatttattgttttgtgtattcaatgaagtccttcgtcttggtcataaaactagccttaaaggtttttcttatatttcatagtatgaaaaatctaaaaagtaacccatatgtaaatatttaaatcatgatagaaatccaaagcaaaaagaaaatgaatcaattgaattaaaatgtgtaggatgcttaaacccatttgataatatatccatttgataatatactaatatgaatttagtactttaaaatgttatataaataaatgttcctatattaaacaccaatgtagttaggattctaagccaacatcatttccccttttctacatgttcttctcccgtctccattaaaaattgtcaaaactatccacttttctttttcctttttgtttttaaacaaataaggtctcttctaagatattgtaggactacaaagccaaactcccgggttcaagctgttggcaaaattttagagatgctaagttacccatgtattaattacttttaaatcctcccctaactccctcacaaaacaggagtagggagaggagaaacacctctgttcaaaaatgaggaattgaaaactcttatcacaaataaactatatcaagtaagctaaagatagtaaaagagcaaaaatgttagcagatattcccaaaatggtaactacatattacctctggaatgatcacatgaatgtggctcattatttcctaagttcctacagcaaacatatatttatttgccctactcagttaaaaataaacacaatatgtagttgcttctgaataatttttctctctctctttctctctttctttctttcgacaaagtctcactctgtcacccaggctggagtgaagtggctccatctcgctgttcactacaacctcagcctcccgggttcaagcgattctcctgcctcaacctcccgagtagctgggattacaggcgcctgccaccacccccggctactttttgtatttttagtagaggcgaggtttcacctgttggccaggctggtctcgaactcccgacctcaggtgattccccccgccttgatctcccaaagtgaagggattacaaggcgtgaggcaccgcgcccggccgcttctgaataatttcgatcaaaatttatattcgatatttattccaacatacaccacagatttccactgataatccctcctagtaagaaagataagctccatccaggtatctgtgaattggaggctaagtagtcccagcacatcttacatttctttaagactccctttttatcccaaacgttcgtaaattttgtatctgataaagagcatacttccatctaatacaaatatgttccccccttcagatcttctcagcattcgagagatctgtacgcgcgtggctcctcattcctcttccttggcttcccaagcccccagggcgtcgccaggaggaggtctgtgattacaaaccccttctgaaaactccccaggaagcctcccctttttccggagaatcgaagcgctacctgattccaattcccctgcaaacttcgtcctccagagtcgcccgccatcccctgctcccgctgcagaccctctacccacctggatcggcctccgaccgtaactattcggtgcgttgggcagcgcccccgcctccagcagcgcccgcacctcctctacccgaccccgggccgcggccgtggccagccagtcagccgaaggctccatgctgctccccgccgccggctccatgctgctccccgccgcccgctgcctgctctccccctctccgcagccgccgagcgcacgcggtccgccccaccctctggtgaccagccagcccctcctctttcttcctccggtgctggcggaagagccccctccgaccctgtccctcaaatcctctggagggaccgcggtatctttccaggcaaggggacgccgtgagcgagtgctcggaggaggtgctattaactccgagcacttagcgaatgtggcacccctgaagtcgccccaggttgggtctcccccgggggcaccagccggaagcagccctcgccagagccagcgttggcaaggaaggaggactgggctcctccccacctgccccccacaccgccctccggcctccctgctcccagccgcgctcccccgcctgccagcaaaggcgtgtttgagtgcgttcactctgttaaaaagaaatccgcccccgccccgtttccttcctccgcgatacaaccttcctaactgccaaattgaatcggggtgtttggtgtcatagggaaagtatggcttcttcttttaatcataagaaaaagcaaaactattctttcctagttgtgagagccccaccgagaatcgaaatcacctgtacgactagaaagtgtccccctaccccctcaacccttgattttcaggagcgcggggttcactaagtcagaaaccctagttcaaaggattccttttggagagtcggactgctctctccttcccctccccttcccctcctgcgtgtaaaacggctgtctggggcaagggtttctcagacgtgtacattgcctggtataagagcagactctgaaaagatgaggtttatttaatacggacgggggagaattctgcctgtaggcagataggaaaatggggagggagtcattggaaggacggactccattctcaaagtcataattcctagaccagaaaaagtgctcagtgttctagaagcagagttgcacagtgatccaaagaccagcttcaaatactgtcctgtctccttcacacttctcacatttctctttcctactgaaaataccttgcatttttcgtaattataaagggggaagggaatatgagtgccccctgctttataggggttgttgtgagtttaaatgatgtattaatacatataagccttaagaacagtgccacacatcctaagctaatacctgttagctcttgaattatccgctttgaggactggcttgcaatcttgttttgaggcatagaaagaaaatgctttggagcaggacgcggtggctcacacctgtaatcccagcactttgggaagccgaggcgggcagatcacctgaggtcaggagttcgaggccagcttggccaaaatggtgacaccccgtctctactaaaaatacaaaaattagctggccatggtggcgcacgtgtgtaattccagctactcaggaggctgaggcaggagaatcgcttgaacccgggaggcagaggttgcagtaagccgagatcgcgccaccaccctccagcctgggtgacagaatgagactccgactcaaaaaaaaaaaaaaaaatgctttggatagaattatcactattacataaaaggaaagtccggatgcggtggctcacgtctataatcccagcattctgggaggccgagacaggcggatcacctgaggccaggagttcgagacaagcctgaccaacatggcgaaaccctgtctctactaaaaaatacaaaattagcggggcttggtggcgcatgcctgtaatcccagctactcggaggctgatgtaggagaatcgcttgaacccaggagaaggcggaggttgcagtgagccgagatcgcgccattgcactccagcctgggagacaagagcgaaacttggtctcaagaaaaaaagaaagaaagaaagaaagaaagaccaagaagaacttactccctgaaaagattatgggcaccctccaccaccctcacttacaaagaaaagttaaacagcactaaagagtataacaagcgcaaggaggtaaaagttctaatttttcctgtgactactactttttaagcttatcaaaaacatgtactacgttttaaaaaatggattgctcagactttgctgatgccttaagcacatgcttaatctgcctactggataatccagctctgtttaaaagttatatttcaatccctggttgacttaaaccttgtagacccagtatatcttgtacttttagtgtctgcttgattttaaaacatgtagtttttaaaatgaagccaatgaaaacaatttgggatgtcaagtatgttattaaaatctacaatgcattactgtaccatttatattttcctcggggtacctctcaattagctgtgtagcaatgatagggaaaattcaaactatcgataaataaaattattttagtttagtttaagatattttatgatggaggaggaagaaagtggttgccaggatgggagggagggaacacatttccatcactaatacaatggttctttctttttgtttgtttgttttgtgtgtttttttgagatggagtttcgctctgttgcccaggctggagtgaaatggcaccgcacgatctctctcggttcactgcaacctccgcctcccgggttcgagcaattctcctgcctcagcctcccgagtagctgggattacaggcacatgctgccatacccagctaatttttgtattattagtagagacggggtttcactatgttggctaggcttgtctcgaactcctgacctcaggtgatccacccaccttagcctcccaaagtgctgggattacaggcatgagccatcgtgcccggcctacagtggttcttaatgggggtgggagagtgggaagagtaggctccttcaagagtctgttgaaataaataccttcttctcaaaaaagaaagtaggtaatgattttttttaaaaaagatgtgttcacttgcacatgtatttctagataaaactttcagtgaattcagggatttctctgaaactctaccatggattcctacatcaagaactctttcagctcttgtgaaaaatatatatagctattggtgaagaagatgggagatgcaaccatataaaaacaacatttggatgcattataaacaggtgtaaaagttgactgctttggaaataccaagaacaagttttagatatgtatatctcatatcttgcagtagagctctggaaggattatggcatccttgggtggggccattttgctctagaaattgaagtccattatcc

SEQ ID NO: 4 - DNA, 6193 bp, Homo Sapiens
caaacaaaaacaatatacttagtggcggaagggaaaatatatattaacacatgtaaactcaataaatactaagatgtaaagagagaatctatagtaacagaaagggtgaatgcataagacagatgataaatagtacttctatttaaaaaccaaagggatgaaagctcatgaatactacatatttgaatccactttgaggaggaaatacgattttccatcaaataaatgcaaactctaaaaatcagccaatgcaaacttactgtgttcaggttagaataaaaaatgcataaatcttccacaaagttcatgctctgataaatattctaatgtaatttcttaattaagacacatttccagtgactaaatgaaaatatatatataaagcagtaagtgccttgattttcaacaaaatttcactttctatgcatacatgattaaaataaataaaagcagttgagtttaagagcaaaaaaaaggaatactgatataactggagtcatttcatcacaacagaacagttatagtatttccaagcgatttgcagttatactaacagatatttatttagacatattgtgaagaaaaaaataacaccttcttctaaaaagcccccttttatatatatatatatgagaatttcaaattaaaaagaaaacattgtaccgatagatgtgcttacagtaaacacttgtaagaaagagaattgatgctttcttgaaaatatatttaacacctttttcaccacttaacttttattaacatttttcttctcaaatgaaaaataaccccatgattttggagatataatgatgtatcttaaatatgtacgaaagctatatgtacttttatagaatgaaaagcaagactgagttacctgcaaaaaagaaatgggaactgaacttgttcatcgtttatctactaaggtatataagagtaccacctcaatgctactatacattttcttcaataccaaggcaatattgataattttccattatacaaggaagacgaattttagaaccattcctttggttagcaaaggctttataattgccatataaagggactttggctatatctagatatatctaaataaaatgcataattgaaaatgagacaaagtcctttagaatttctaaaaaacatcctctctaatgctgaatttttttccaagcaaaagaaaaaagaggttctcttctgttacaattaagaaatatcttaaagatctatacaacagcatcccccgccctatatttttattctgttcacatagagcagtaaataaggtgcattccttctgcttaagaaattagcatttcaaaaatatgccactttcccctgaactccaagcgtgtctaataatgcgagaagcagattgtcttccctcgtttccttaatttgtttcatctaaaagcaattcactcaacatcttgtcgccctctggcagcttagtttacttatccgcacttaatttctcatttggaccaaaacaaactcctccaaactgctactgactgctaaccgcgagaggggagacgcgcaatatgtatttagttgggaacacacagccacacacatacataggcacaaacacacacagcctcactcataccccagacagtaacttgtttttataatagcactgcattaaaaccagctgaactttccctgccaggtgcggcagggtgggggtgggggaggatgaaaaacgaagtcccccggggcatttacagtttccaatggatcaccttagtatgcgtgttgcaattataccagggatgcacccgagagcttttctttgtgcggccctttcatctggatcactttgtgttttgaacaagtgaggctcgcctttgtgcccccagaatttcaagtacagagtcacacacggaacaacaatggcacgctaatcctcgcgctctaaatgggctcacttgtgggtctgacaattcgcccagggaaacgagaagagacgaagcgagggcgcgagctagtgtcgcctgagacgaggaagaggacagctgcagaactaatttggattacattccttgcagaaattctgaaaagggcttttcggcatagctcaactcggagccgcacagttaataccaaattgctgcggactcggagcggggtcccccagtggcagaggctgaaccagacagcccccagtaggtcgcctcgtagaaattcctctcggctaagcctgcatgtcggtcgccaatgcctttgaatgggtcaatgtgcataatcaacccattgagggaaaatatgaagggactcgaagtggggagggagataaaaagagatgtatctaagaggccgcttggaatgtcaagtccgtgttggtgtgattccggaggtggctggagcgcgggacctggtatgcgtgaagaatttcggagtaattgggagggtgcaaacggccagcacaaacgcctcacatgtgccattcgaaggtcattttgaaagactcgataattgtaacttgttatttactaggcaaaggaggcggcggcggcggcggcggcggagcgggaaaactacagctagccgttttcttggtgaggtcagaaggacaccctccgggggcctaaagcgctccctatcgccactcccgggggctttatcacctcaagctacttcccacgctccagtcaccatccctggatggtttcggaaatctctctggctctccaaaaggcaccccttggccacgtcaagacaccggtcctcctcagacctctcccgtcccactttcatccccaggaaactctagtgtcagaaactttgagctccattgcactgcaggtgctgtcattagtcctgcaagccgtggcgggccagccccgccgcgctgcctctcggggtcaattagccctttgcctgcccaggtacctggggctcgagctctccagcaagcagtggccgcgcacccatcgccgctgccgctttcgcctcgggtggatccagtgacccgcaggctcggcagcctggccgggcagtaaacagacaagtttgaaggactccggccaatagcaagttgaactacaggaagaactcttcccggagccaaacacggcaaccgacgggaaggccgggcttctggctcaagtgtgccaagcctttttttttttttttaagaggtcaggcaggcgagtaagcgcccctcaagtcaatggggagagggctccgggaagccggcggaagaggcccagaactccgggccccggaccgaggcgcgcccgcctgctgcactccggctgcccgggctgggcgcgagttgcgtctgacgccacaaggctcgggcgactgggggcgcagcggtcgccagcagcacacacaggtgcaaagcccgattttctgagcgccgctctccaccgcccttcgggctcggctcgggagaggcccagccagcaccgccccaggaccgcggccccggcggtgcgggttctgccctcggggacccgacagggacagaagagtctcctctgactggggatttgggtctcccatgtcccgaacaacaggcgccaccagaagggatcccgcttaggctcccaaacaaaacgctcgggaaagaaaagcagggggttaaggagagaaaagagggactcagagtgatttttcacgataaataaagcaaacgcacacatacagggtaagtttcaaatggaaagaggggtgaccgaaagcccagggaagaggccccggtcaagcggtccctccacgcctcccgggatgggtgaagagggcaggggagccactcgaggcagccccgccggcggctgcaggttcggcgaccggagtgccagaaggaacccacctgactgagaatcgctgggctggacggtccccgccgccacgagaaggctcacccagacccaaagtcctgtcgccggcttcattttttggaagtctcagatcccgtgctgacaattacatgtccaaatggcatatccccctttcgggcacgcggaggagatcccccagccgggcgcgcgtgggggtgcgaggggggcgggcgcggcgcgcgcggtgtggcgactcccagggcgggcgaccgagtccgcgcccgcgggtccagggccggggcccgaggagggggcgagtgtgagcgcgtgtgtgcgcgtgtgggagtgtgctcggtgtgtgcgcttggcgctctgggccggactgtgcagctatttccccgcgtgagccttcgcttgctcgctccctcctcactttctctctctctcactggttggtcaacaataaaaaaggaaggggggcgaaaggtttccaaaaaaagttgattgcaaagaggcggtaggtttccggcctctccccgcagccgggctatgttctgctccttcttcagtttccttgcacctccagtccaaatcgggaggggagcggggcggggggagcttctcgcttctccccggatcccgtccttctttttcctctcagctttcctcacacttgtccggcggctgcggtaattaaagctccgagcgtcatttccagcgctccgcggtctccagctgcagcccacagagaaattaataagactccagaaaaaaaaaaaaaaaaggtgcggggggcggtgggaataaaacaaccctccacgcaaccaggccggctctgctcagccgcgcaaaccccgcccatgctctgacccaactagccacgcccttcccccccccttccaaagggaaatcttattggctcagccactccccaaaatcctgggcctccggagttgggaaaacacctgtcagggaaagggagcctcttggtgggggcaggggaagctggatttaaagggctcaccgaagccatgcactgaagcactcgtcttccctccctggcagaggcctgggacagctggcctgctgagtggacggaccattggagggccgcttacggaaattttttttttttttaaacaagaaagtcagcattttctccgttgccccacggtgctcatctacagacaagactttccctagaaataaaagtcaatgttgctttcagcaaaaagcctccgcccgcagtactctgccactcatggtccacaattagaaagtactttaaaagtgtgtacagcaagtaactggtagcccctgaggattaggtagtggtaggggtataatcaccgccccgcctcccgcccccagttatgccatctctccgattactcccacatttctaaactgaccaacattgagccaaactaaactttcacatttataaaggcatatcctttgatttttagattttatgtttttttttcacctttggagttcattcttattaagcagattctagtccaaagccactgatttgatcttaaagggctagaaattgtccccagcctgaaagaatttaaggaggccacatcagaacataattaaccttaaatgattctgtttattctacagtagacccagctttaggccccttccttgtcctcactctgcacattcatggtccctaatctggaggtcattgctagttacgaaagtctctgaccttttctgaatctaaaatattctgggactgggtcatttcaatgtacatatcccttgccttttacagctctgaaaccgcaccctggcaagggccagaatctgctgggggtagttattggtttgctatttgtacaggcattctatgtatgaatcactttccttttttggtttttctagaagcagcaaatatataaataaaaagtatcaggggagcttaaaaatcaaaccaccctgcctttcatttgagaccttgatctccatttcccactctcttatctatagccccatcccttaagaatttccatggagctgagaacagataggaggtacagatgcctgaagcctgaagctttccctttcttagacccacagcaaataacaggctccatgaagacgcccaacaagctgagcgtgcggttttaccagaagcagcctagggcagagaggaactaagcctagagcagatgacggagacttgaccagaatggtactgattgcagcaaaactgtgcacactgctctttgggattatctttgttttcttttcttttcttttttttaattactctttctctctgttttctcttctttcattcaatctcttctcattccccttgtcttaaatccttttgaaattctcaggcacctctcttccataaaagctacttcttttca

SEQ ID NO: 5 - DNA, 6207 bp, Homo Sapiens
gcctgttcagcctttccaaagatttaaagaacattatctatttgctttctaagtacccaaaaagcacaaccgtctacattcaccttggctggatgaggacatgcattcattcatccattcaagagatatttattgccagacctggtggctcacgcctgtaatctcggcactttgggaggcagaggtgggaggatcacttgaggccaggagcttaaggctagcctgggcaacatagcgagaccccatctctacaaaaaataaaaaattagctgggcatggtggtatgtgcctgtggtcctagctacttgggaggctgaggtaggggcattgagcctaggagttcaaggctgcagtgagctataatcacaccactgcactccagcctgggtaacagagtgagaccctgtctcaaaaaaaagaaagaaaaagaaaaagaaaaggggtatttattgaacacctactatgtttcaggcactgtgctagatcctaagtgaatatcagcacatgaacaagacaaaggcgaaaagttaccaaacaagtctaagttgatttcggtatatgcatcttcctgacttctggtcccgtgctttgaccacaacccttcaccactagaccagacttccccaaataaacaactacttctgcatgctggggatgggctgtgtgcggcagcatttacgtaggcggtacagacagcagcctttcacttaatgttgcaataacaccaggctaaacaatgtgcactgacttcaaaagtgtggggtcaggtctccttcaagtgccacagggagagtgcaaagtaggaaaagtctatcggatgaggaaacactgtagagggaaagtgaattttttttcaatttgggttaaaattcagatgtggaattctaccctccttttcacttttggatccccagataggaggaactcagcacatagataatcatgaactacacacattttggttttatatgctcagacttgtccagagcatgaaatccctgccctgttggaaggcagcgccgtgctcacggaggcacacaagcacctgtctcaaagtcaccctgacctgcagatctgcaaatggcaaaaataatttcacatgtttgttctgatttgtcttcatttttaggctaccttgtgtgagctccactttttagaatgtgattttgcagtcctgaaatggataccatgagcagattgagatgtgagaatatgttagaatgatcacaggttcggatgttagtggggcaggagagggagtctgagattgtattggcctatactgtggcttctggttgagcacttggtttgcctggatgatgctctggccttactcaatctttatcattccattatccagaggacagaggatctgagccccatctctgtattgcagtcacctcctctgggacctgtttccaagccttcttctgtgttgcctggcacccctttcttacctctttcaaaccacttactgctaccctgtaagctcgattgacttgttggtcttcctatgagactggaatctctctgagggtcgggacaggcctaccctcttcattacagtgagcaccagcctccagcccagtcaatagttttgttaaataaataattgaacaaaattatttgttaaataatggtttgtcctttccagaggatggacttagtttgtcctttccagaggatggatttagtaagtctccaactctggtcataatggtgccagaaggaaagagttaagctatctggaggaaataggctcactcaaagacccttcttcttttttttttttttaattggcaaaggcaggataagtgtatttgagataaatcctggatataaaatcttgacacatcttttaggtattggccgagatgctttggacctgaaagggaagtaaatcaaatcattctaggttttcttttcttttcttttggagacagaatcttgctctgttgcccaggctggagtgcggtggcacgatctcggctcacaggaacctctgcctcccgggttcaagcaattctcctgcctcagcctcctgagtagctgggactacaggcgtgcgccaccacacccggctgttttgtatttttagcagggacagagtttcaccatgatggccaagctggtctcgaactcctggcctcaagtgatccacccgcctcgggctcccaaagtgcaggaattacaggagtgagccaccgcacccagtcaggtttcctgttaagtggcctgagatctagttgtgaatggcagtcatggccagactcaggaattcaaagcttgacctattttgtctgaagctaatattaataataagagagatgtatttggcttcataacccctttccctcccgtccccctctttctttctgtaatcaaggatagaattagaagtaccgaaggccgcagaattgctttaggattcagagcagctccaaggaatctgtgtttacgtattatgtgtgtttttccgtttccctccctttttatgagtgagaaaaaaaagcgcctaaattcccaccaacataaaccaatgacatacaatgatgaaattctgttttcacctctgcctgtgacagggaatgcaaaaatagcaagtggcccagttccacgaatccccgcctcctgccctccccgctcctgccgggttggatctctaagaatggaggttagcgcacagcctcgcgcgggccgctcagcccccggacccggcggatgatgtcaggcgacgggagcggccgcggccgggccggggaggccgcggcccaggggagctgggagggagggtggcctcgccaggccgacggcgcgcccggccgcgcggcgttgcctggagacggccctggcggcgctgtgttgctgtaaacagccgcttccctgttactatctatagcaggatctcctggctcccgggcgcggcggctggaggcaggtctgcggtccggctccccgcgcgccccgaactatccgcccgccggcctcatcctgcctcgcccctctccaggtgcccaccgcgggccccgacccccgggcccgaagagtggagaagggaagaccggggctgtgcggggacatgcgtcttcgcgccctggaggtggccagcgcgctggggctgagccccggcagcgtgaccccggctgtcctacgcagcagggcaggagattggggggcgtggcacactctggagcaccttgcctccccaaagccccgtgttccaggacgtggagccgctcctggggtcccagcagtcgaggtattccgcccaggcgcagctggacactgtccttccagcccccgtcctccaccctccaagtccgcgctggaaaatcacccgctgcgggctcccgtaagcacagcttcctggcgggaccgaaccagccctcagcgcagatttgagttccccgcaggaagcacaccccgccttgtcatcccgaactgaccaccctgcccacataaccacacctcgcactccctacccctggggcccagctcagaaccgggcagacacccccttcaaatgtcttcgcacgtaggttttgcacagtgtttatctgctggtgtctcagggatttgacagtttccttaatattcccacacatggccgagaaaaataaataaataaatgcgctgtcttctttaaaaaaataaataaataaagtacccagtatcgtaaagtaggttatcgtattctcttattttggatcctccactttctgcttccaaacgcaggaacagtgctagtattgctcgagcccgagggctggaggttaggggatgaaggtctgcttccacgctttgcactgaattagggctagaattggggatgggggtaggggcgcattccttcgggagccgaggcttaagtcctcggggtcctgtactcgatgccgtttctcctatctctgagcctcagaactgtcttcagtttccgtacaagggtaaaaaggcgctctctgccccatcccccccgacctcgggaacaagggtccgcattgaaccaggtgcgaatgttctctctcattctgcgccgttcccgcctcccctcccccagccgcggcccccgcctccccccgcactgcaccctcggtgttggctgcagcccgcgagcagttcccgtcaatccctccccccttacacaggatgtccatattaggacatctgcgtcagcaggtttccacggcctttccctgtagccctggggggagccatccccgaaacccctcatcttggggggcccacgagacctctgagacaggaactgcgaaatgctcacgagattaggacacgcgccaaggcgggggcagggagctgcgagcgctggggacgcagccgggcggccgcagaagcgcccaggcccgcgcgccacccctctggcgccaccgtggttgagcccgtgacgtttacactcattcataaaacgcttgttataaaagcagtggctgcggcgcctcgtactccaaccgcatctgcagcgagcatctgagaagccaagactgagccggcggccgcggcgcagcgaacgagcagtgaccgtgctcctacccagctctgctccacagcgcccacctgtctccgcccctcggcccctcgcccggctttgcctaaccgccacgatgatgttctcgggcttcaacgcagactacgaggcgtcatcctcccgctgcagcagcgcgtccccggccggggatagcctctcttactaccactcacccgcagactccttctccagcatgggctcgcctgtcaacgcgcaggtaaggctggcttcccgtcgccgcggggccgggggcttggggtcgcggaggaggagacaccgggcgggacgctccagtagatgagtagggggctcccttgtgcctggagggaggctgccgtggccggagcggtgccggctcgggggctcgggacttgctctgagcgcacgcacgcttgccatagtaagaattggttcccccttcgggaggcaggttcgttctgagcaacctctggtctgcactccaggacggatctctgacattagctggagcagacgtgtcccaagcacaaactcgctaactagagcctggcttctccggggaggtggcagaaagcggcaatcccccctcccccggcagcctggagcacggaggagggatgagggaggagggtgcagcgggcgggtgtgtaaggcagtttcattgataaaaagcgagttcattctggagactccggagcggcgcctgcgtcagcgcagacgtcagggatatttataacaaaccccctttcaagcaagtgatgctgaagggataacgggaacgcagcggcaggatggaagagacaggcactgcgctgcggaatgcctgggaggaaaagggggagacctttcatccaggatgagggacatttaagatgaaatgtccgtggcaggatcgtttctcttcactgctgcatgcggcactgggaactcgccccacctgtgtccggaacctgctcgctcacgtcggctttccccttctgttttgttctaggacttctgcacggacctggccgtctccagtgccaacttcattcccacggtcactgccatctcgaccagtccggacctgcagtggctggtgcagcccgccctcgtctcctccgtggccccatcgcagaccagagcccctcaccctttcggagtccccgccccctccgctggggcttactccagggctggcgttgtgaagaccatgacaggaggccgagcgcagagcattggcaggaggggcaaggtggaacaggtgaggaactctagcgtactcttcctgggaatgtgggggctgggtgggaagcagccccggagatgcaggagcccagtacagaggatgaagccactgatggggctggctgcacatccgtaactgggagccctggctccaagcccattccatcccaactcagactctgagtctcaccctaagaagtactctcatagtttcttccctaagtttcttaccgcatgctttcagactgggctcttctttgttctcttgctgaggatcttattttaaatgcaagtcacacctagtctgcaactgcaggtcagaaatggtttcacagtggggtgccaggaagcagggaagctgcaggagccagttctactggggtgggtgaatggaggtgatggcagacacttttactgaatgtcggtctttttttgtgattattctagttatctccaga

SEQ ID NO: 6 - DNA, 6147 bp, Homo Sapiens
aggctgaggcaggagaatcacttgaaccaggaagcagagattgcagtgagctgagatggtgccagtgcactccagcctgggcagtagagtgacagcctgtctaaaaaaaaaaaaaggcagtaaagtgataggaggatagattagaagggccattttccagatagtgcaaggaagaaagaagaagaagaagaggaggaggaggaggaagaggaagaagacggagaagagggcatctcagaagaaacaatggagatacatttctcaaaactgaagaaagatgaccaacctcagaccgaagggccaagaggccaaaccagagagacagcttggcaagccaggaagagcaccaaagctagacaattagagtgaaattaaagaaaacccaaggtgacaaaaatttaaaaagcttccttgtgacctcagtccattggtgaaaatttaaaaaaaaaaaaaaaaaaaaaaggacagcctgggcaacatggtgaaaccccatctctacaaaaaatacaaaaattagctgggtgtggtggcacatgcctgtagtcccagctattcgagaggctaagtaaggcaggaggatcacttggggccaagagttccagaccagctgcggcaacatacatgttgtgggaagtcaggcaccccgaacggagggactggctgaagccatggcagaagaacataaattgtgaagatttcatggacatttatcacttccccaatcaatactcttgtgatttcctatgcctgtctttaatctcttaatcctgtcatcttcgtaaactgaggatgtatgtcgccttaggaccctgtgatgactgcgttaactgcacaaattgtttgtagaggacaattgttgtgtgtttgagcaatgtgaaatctgggcatcttaagaacaggataacagcaattttcagggaacaagggagataaccttaaagtctggctgcctgtgggctgggcaggacagagccatacttctcttattaccgcaaacaggtaagagaaatatcgctgaattctttccccagtaaggaatattaataattaacagccctgagaaaagaatgcattcccagggccgggccactgaaatggcctccctgagagtgcctgcctttattcagaagtagaaagggatgaaacacgccctagtctcctgcagcacccccagacttgataggattaggaaattccagcctggcaaattctagtcagaccggttctctgctcttgaaccctgacagtgcgtgcacagtgggacctggaagttcattagtgattctagtttcgccgtgaccttctgccctgtgatcttttgtcgcccttgaagtatgtgatctctgtgacccacaccctgttcgtgcactccctcctctttgaaaattgctaataaaaactcgctggttttacggctcagggggcatcacggaacctgcggacatgtgatgtctcccctggacacccggctttaaaatgtctctcttttgtactctttccctttatttctcaggccagccgacacttagggaaaataggaaaggacccacgtgaaatattgggggctgaatttcccccgataataagtctcttaaaaaagacttttaaatgaaatttctttgttttttaacttttatttctgttttgggggtacatgtgaaggtttgttacataagtaaactcgtgtcttcggtgtttgttgtacagaatatttcatcacccaggtattatgccgagtacccaatagttctcttttctgctcctctccttcctcccatcctgcaccctggagtcaaccacagtgtctgttgtttccttgtttgtgttataagttctcatcatttagctcccacttacaagtgagaacatccagtatttggatttctgttcctgcattagtttgctaaggataatagcctctagctccatccatgttcccacaaaagacatgatctagttctttttaatggctgcattaaatgaagttttaaagatacaacataaacaccaacctcttccccaccacaaaaatcccttgctgaatttgattacacttaaattaacgagttttgtttcatgaaagactccttggacaaacttgacagttgatggaataggagaagctgtctgtcatgtctaaagccaacaagagatcaatatctagaataaatggagatctgcaaatcaacagaaagtaggcagcaaagccaaagaaaatagcctaaggcacagccactaaaaggaacgtgatcatgtcctttgcagggacatgggtggagctggaagccgttagcctcagcaaactcacacaggaacagaaaaccagcgagaccgcatggtctcacttataagtgggagctgaacaatgagaacacatggtcacatggcggcgatcaacacacactggtgcctgttgagcggggtgctggggagggagagtaccaggaagaatagctaagggatactgggcttaatacctgggtgatgggatgatctgtacagcaaaccatcatggcgcacacacctatgtaacaaacctgcacatcctctacatgtaccccagaacttcaaataaaagttggacggccaggcgtggtggctcacgcctgtaatcccagcactttgggaagccgaggcgtgcagatcacctaaggtcaggagttcgagaccagcccggccaacatggtgaaaccccgtctctactaaaaatacaaaaatcagccagatgtggcacgcacctataattccacctactcgggaggctgaagcagaattgcttgaacccgagaggcggaggttgcagtgagccgccgagatcgcgccactgcactccagcctgggccacagcgtgagactacgtcataaaataaaataaaataacacaaaataaaataaaataaaataaaataaaataaaataaaataaaataaaataaaataaaaaaataaaataaaataaaataaaataaagcaatttcctttcctctaagcggcctccacccctctcccctgccctgtgaagcgggtgtgcaagctccgggatcgcagcggtcttagggaatttccccccgcgatgtcccggcgcgccagttcgctgcgcacacttcgctgcggtcctcttcctgctgtctgtttactccctaggccccgctggggacctgggaaagagggaaaggcttccccggccagctgcgcggcgactccggggactccagggcgcccctctgcggccgacgcccggggtgcagcggccgccggggctggggccggcgggagtccgcgggaccctccagaagagcggccggcgccgtgactcagcactggggcggagcggggcgggaccacccttataaggctcggaggccgcgaggccttcgctggagtttcgccgccgcagtcttcgccaccagtgagtacgcgcggcccgcgtccccggggatggggctcagagctcccagcatggggccaacccgcagcatcaggcccgggctcccggcagggctcctcgcccacctcgagacccgggacgggggcctaggggacccaggacgtccccagtgccgttagcggctttcagggggcccggagcgcctcggggagggatgggaccccgggggcggggagggggggcagactgcgctcaccgcgccttggcatcctcccccgggctccagcaaacttttctttgttcgctgcagtgccgccctacaccgtggtctatttcccagttcgaggtaggagcatgtgtctggcagggaagggaggcaggggctggggctgcagcccacagcccctcgcccacccggagagatccgaacccccttatccctccgtcgtgtggcttttaccccgggcctccttcctgttccccgcctctcccgccatgcctgctccccgccccagtgttgtgtgaaatcttcggaggaacctgtttccctgttccctccctgcactcctgacccctccccgggttgctgcgaggcggagtcggcccggtccccacatctcgtacttctccctccccgcaggccgctgcgcggccctgcgcatgctgctggcagatcagggccagagctggaaggaggaggtggtgaccgtggagacgtggcaggagggctcactcaaagcctcctgcgtaagtgaccatgcccgggcaaggggagggggtgctgggccttagggggctgtgactaggatcgggggacgcccaagctcagtgcccctccctgagccatgcctcccccaacagctatacgggcagctccccaagttccaggacggagacctcaccctgtaccagtccaataccatcctgcgtcacctgggccgcacccttggtgagtcttgaacctccaagtccagggcaggcatgggcaagcctctgcccccggagcccttttgtttaaatcagctgccccgcagccctctggagtggaggaaactgagacccactgaggttacgtagtttgcccaaggtcaagcctgggtgcctgcaatccttgccctgtgccaggctgcctcccaggtgtcaggtgagctctgagcacctgctgtgtggcagtctctcatccttccacgcacatcctcttcccctcctcccaggctggggctcacagacagccccctggttggcccatccccagtgactgtgtgttgatcaggcgcccagtcacgcggcctgctcccctccacccaaccccagggctctatgggaaggaccagcaggaggcagccctggtggacatggtgaatgacggcgtggaggacctccgctgcaaatacatctccctcatctacaccaactatgtgagcatctgcaccagggttgggcactgggggctgaacaaagaaaggggcttcttgtgccctcaccccccttacccctcaggtggcttgggctgaccccttcttgggtcagggtgcaggggctgggtcagctctgggccaggggcccaggggcctgggacaagacacaacctgcacccttattgcctgggacatcaaccagccaagtaacgggtcatgggggcgagtgcaaggacagagacctccagcaactggtggtttctgatctcctggggtggcgagggcttcctggagtagccagaggtggaggaggatttgtcgccagtttctggatggaggtgctggcacttttagctgaggaaaatatgcagacacagagcacatttggggacctgggaccagttcagcagaggcagcgtgtgtgcgcgtgcgtgtgcatgtgtgtgcgtgtgtgtgtgtacgcttgcatttgtgtcgggtgggtaaggagatagagatgggcgggcagtaggcccaggtcccgaaggccttgaacccactggtttggagtctcctaagggcaatgggggccattgagaagtctgaacagggctgtgtctgaatgtgaggtctagaaggatcctccagagaagccagctctaaagcttttgcaatcatctggtgagagaacccagcaaggatggacaggcagaatggaatagagatgagttggcagctgaagtggacaggatttggtactagcctggttgtggggagcaagcagaggagaatctgggactctggtgtctggcctggggcagacgggggtgtctcaggggctgggagggatgagagtaggatgatacatggtggtgtctggcaggaggcgggcaaggatgactatgtgaaggcactgcccgggcaactgaagccttttgagaccctgctgtcccagaaccagggaggcaagaccttcattgtgggagaccaggtgagcatctggccccatgctgttccttcctcgccaccctctgcttccagatggacacaggtgtgagccatttgtttagcaaagcagagcagacctaggggatgggcttaggccctctgcccccaattcctccagcctgctcccgctggctgagtccctggcccccctgccctgcagatctccttcgctgactacaacctgctggacttgctgctgatccatgaggtcctagcccctggctgcctggatgcgttccccctgctctcagcatatgtggggcgcctcagtgcccggcccaagctcaaggccttcctggcctcccctgagtacgtgaacctccccatcaatggcaacgggaaacagtgagggttg

SEQ ID NO: 7 - DNA, 6237 bp, Homo Sapiens
gtgtccggccctggcagctcggccctgggcgccctccacctccaggcgctgtctcctactccaggctgttcttccggccgccgcggggttgcggcctgggcgccatagcaacgggagccaggcctcatttgaatacgcaaatatttataagtcgccgggggctcgggttccgtgcggctgagccacgccccttagcaacggtcgctagggcggggccacgtggactggcacgtgcgtgggcgcccctgctgcgggcgatcccaggggaaggtgacgcgccaccaactcgagttgggtgggcgcaggcgcgtcaggtgccagcttcctgcggctccgtgcctgggccgtcgcgatgcacgtgtcgcgtttcctcgcgatcctggcgcttcccacgcggggcgggtaaaggcggtctctgctggaggctcgcgcccacctttcccaggtggaagggtcgcccctggggccgaggcctgccgtcctgaccttcggttggaagtgaggccgacggcaaaaggaagcaccgggggaagcgcccccgaggaccaggaaacacacaccggacgccggagcgcacccgagtgcccggcccgcgggacacgctgccgcccgccgtccagtcgccgcttctcactcgcgttcatgcgtgtccgccccgagccgagctctgactgcgaccgcgcggtggacggacggcaggcgggacccccgggaccgcacgtgggtggagccccgggtcagcagcgaccggcgcaggagggcgaggcgggcgctggactgggcagaggcagggtttgcctgactgtaaaacgccttttttgttttgagacgaagtagcgctctgttgcccagtgcagtggcgcgatttcggctcaccgcaacatccgcctcccgggttccagcgattctcctgcctcagcctcccgagtagctgggactacaggcgcgcgccactgcagccgactaattttttgtgtttttagtagagacagggtttcatcatgttggccaggctggtcttgaactcctgacctcaagtaatccacccgcttaggcctcccgaagtgctgggattataggcgtgagccaccgcgcccggccctttttgttttttaatgaggatgtatttctgattcctttgcaattttaaaaaatgttaaaaacatgtctttttgggtttgaaagagctaggatgtgcgtctatgtgcttggggtgagccctgggcacttcgctcccctgtggcaacttgtgggtacggtttaactggaccacgctgagcttctgcagcgttggaacctcaagtttggggggactgggcgggcagggtcgcctgccacgcaggcccgagaaagaggagagtggtggagggggcgttctcacgcctggccccagggcacacggctgcgcccgccgcccggaaccccaccggggctgcaagcgtcctcggggtgggttgcggtgggagtaggggagctggggtgcgtggtggtaggtggggtgcgcggccgctccacctgcgcggaagggcagccgggcaaccggaccccgcggccacccgggggcccccagctccgagcatcccgccttggtcccggcggatcccagcctttccccagcccgtagccccgggacctccgcggtgggcggcgccgcgctgccggcgcagggagggcctctggtgcaccggcaccgctgagtcgggttctctcgccggcctgttcccgggagagcccggggccctgctcggagatgccgccccgggcccccagacaccggctccctggccttcctcgagcaaccccgagctcggctccggtctccagccaagcccaaccccgagaggccgcggccctactggctccgcctcccgcgttgctcccggaagccccgcccgaccgcggctcctgacagacgggccgctcagccaaccggggtggggcggggcccgatggcgcgcagccaatggtaggccgcgcctggcagacggacgggcgcggggcggggcgtgcgcaggcccgcccgagtctccgccgcccgtgccctgcgcccgcaacccgagccgcacccgccgcggacggagcccatgcgcggggcgaaccgcgcgcccccgcccccgccccgccccggcctcggccccggccctggccccgggggcagtcgcgcctgtgaacggtgagtgcgggcagggatcggccgggccgcgcgccctcctcgcccccaggcggcagcaatacgcgcggcgcgggccgggggcgcggggccggcgggcgtaagcggcggcggcggcggcggcggcgggtgggtggggccgggcggggcccgcgggcacaggtgagcgggcgtcgggggctgcggcgggcgggggccccttcctccctggggcctgcgggaatccgggccccacccgtggcctcgcgctgggcacggtccccacgccggcgtacccgggagcctcgggcccggcgccctcacacccgggggcgtctgggaggaggcggccgcggccacggcacgcccgggcacccccgattcagcatcacaggtcgcggaccaggccgggggcctcagccccagtgccttttccctctccgggtctcccgcgccgcttctcggccccttcctgtcgctcagtccctgcttcccaggagctcctctgtcttctccagctttctgtggctgaaagatgcccccggttccccgccgggggtgcggggcgctgcccgggtctgccctcccctcggcggcgcctagtacgcagtaggcgctcagcaaatacttgtcggaggcaccagcgccgcggggcctgcaggctggcactagcctgcccgggcacgccgtggcgcgctccgccgtggccagacctgttctggaggacggtaacctcagccctcgggcgcctccctttagcctttctgccgacccagcagcttctaatttgggtgcgtggttgagagcgctcagctgtcagccctgcctttgagggctgggtcccttttcccatcactgggtcattaagagcaagtgggggcgaggcgacagccctcccgcacgctgggttgcagctgcacaggtaggcacgctgcagtccttgctgcctggcgttggggcccagggaccgctgtgggtttgcccttcagatggccctgccagcagctgccctgtggggcctggggctgggcctgggcctggctgagcagggccctccttggcaggtggggcaggagaccctgtaggaggaccccgggccgcaggcccctgaggagcgatgacggaatataagctggtggtggtgggcgccggcggtgtgggcaagagtgcgctgaccatccagctgatccagaaccattttgtggacgaatacgaccccactatagaggtgagcctggcgccgccgtccaggtgccagcagctgctgcgggcgagcccaggacacagccaggatagggctggctgcagcccctggtcccctgcatggtgctgtggccctgtctcctgcttcctctagaggaggggagtccctcgtctcagcaccccaggagaggagggggcatgaggggcatgagaggtaccagggagaggctggctgtgtgaactccccccacggaaggtcctgagggggtccctgagccctgtcctcctgcaggattcctaccggaagcaggtggtcattgatggggagacgtgcctgttggacatcctggataccgccggccaggaggagtacagcgccatgcgggaccagtacatgcgcaccggggagggcttcctgtgtgtgtttgccatcaacaacaccaagtcttttgaggacatccaccagtacaggtgaaccccgtgaggctggcccgggagcccacgccgcacaggtggggccaggccggctgcgtccaggcaggggcctcctgtcctctctgcgcatgtcctggatgccgctgcgcctgcagcccccgtagccagctctcgctttccacctctcagggagcagatcaaacgggtgaaggactcggatgacgtgcccatggtgctggtggggaacaagtgtgacctggctgcacgcactgtggaatctcggcaggctcaggacctcgcccgaagctacggcatcccctacatcgagacctcggccaagacccggcaggtgaggcagctctccaccccacagctagccagggacccgccccgccccgccccagccagggagcagcactcactgaccctctcccttgacacagggcagccgctctggctctagctccagctccgggaccctctgggaccccccgggacccatgtgacccagcggcccctcgcgctgtaagtctcccgggacggcagggcagtgagggaggcgagggccggggtctgggctcacgccctgcagtcctgggccgacacagctccggggaaggcggaggtccttggggagagctgccctgagccaggccggagcggtgaccctggggcccggcccctcttgtccccagagtgtcccacgggcacctgttggttctgagtcttagtggggctactggggacacgggccgtagctgagtcgagagctgggtgcagggtggtcaaaccctggccagacctggagttcaggagggccccgggccaccctgacctttgaggggctgctgtagcatgatgcgggtggccctgggcacttcgagatggccagagtccagcttcccgtgtgtgtggtgggcctggggaagtggctggtggagtcgggagcttcgggccaggcaaggcttgatcccacagcagggagcccctcacccaggcaggcggccacaggccggtccctcctgatcccatccctcctttcccagggagtggaggatgccttctacacgttggtgcgtgagatccggcagcacaagctgcggaagctgaaccctcctgatgagagtggccccggctgcatgagctgcaagtgtgtgctctcctgacgcaggtgagggggactcccagggcggccgccacgcccaccggatgaccccggctccccgcccctgccggtctcctggcctgcggtcagcagcctcccttgtgccccgcccagcacaagctcaggacatggaggtgccggatgcaggaaggaggtgcagacggaaggaggaggaaggaaggacggaagcaaggaaggaaggaagggctgctggagcccagtcaccccgggaccgtgggccgaggtgactgcagaccctcccagggaggctgtgcacagactgtcttgaacatcccaaatgccaccggaaccccagcccttagctcccctcccaggcctctgtgggcccttgtcgggcacagatgggatcacagtaaattattggatggtcttgatcttggttttcggctgagggtgggacacggtgcgcgtgtggcctggcatgaggtatgtcggaacctcaggcctgtccagccctgggctctccatagcctttgggagggggaggttgggagaggccggtcaggggtctgggctgtggtgctctctcctcccgcctgccccagtgtccacggcttctggcagagagctctggacaagcaggcagatcataaggacagagagcttactgtgcttctaccaactaggagggcgtcctggtcctccagagggaggtggtttcaggggttggggatctgtgccggtggctctggtctctgctgggagccttcttggcggtgagaggcatcacctttcctgacttgctcccagcgtgaaatgcacctgccaagaatggcagacatagggaccccgcctcctgggccttcacatgcccagttttcttcggctctgtggcctgaagcggtctgtggaccttggaagtagggctccagcaccgactggcctcaggcctctgcctcattggtggtcgggtagcggccagtagggcgtgggagcctggccatccctgcctcctggagtggacgaggttggcagctggtccgtctgctcctgccccactctcccccgcccctgccctcaccctacccttgccccacgcctgcctcatggctggttgctcttggagcctggtagtgtcactggctcagccttgctgggtatacacaggctctgccacccactctgctccaaggggcttgccctgccttgggccaagttctaggtctggccacagccacagacagctcagtcccctgtgtggtcatcctggcttctgctgggggcccacagcgcccctggtgcccctcccctcccagggcccggg

SEQ ID NO: 8 - DNA, 6237 bp, Homo Sapiens; identical to SEQ ID NO: 7

SEQ ID NO: 9 - DNA, 6110 bp, Homo Sapiens
aacaaaacaaaaaagaaaaacacagcttgtttatggcaaagtcttggtaagcaagtactaacatgtcaactaaatccttctaagagtaacatttgaaaaataacgttatggctgggcgcggcggctcacgcctgtaatcccagcactctgggaggccgagaagggcggatcacgaggtcaggagatcgagaccatcctggctaacacggtgaaaccccgtctctactaaaaatacaaaaaaattagccgggcgtggtggcaggcgcctgtagtcccagcgactcgggaggctgaggcaggagaacggcatgaacccgggtggcggaacttgcagtaagcggagatcctgccactgcactccagcctgtgcgactgagcgagactgcgtctcaaaaaaaaaaaagaaaaaagaaaaataacacgattacctcatcatttaagatggagttttactaagttttcagtcatagttcacagtgaaaataacatgaacatgtactggaggctaggaagccaattttgaggatattaacatctcacttttctcgttctgtcatgaccactcacttttatcttcttgataaatgcttcagaggcatgtgtgttctctccctcactcacgacacacccaagcatcggtttttagaaattttattgataactgatggttttccactcttttctttctgcagttttatctgtggttaaataataacaacatcaatttgagtagtatttgtcattgccagcgcaaatattttgctgagactgcctgcataaccagtgcatctgtttcctgatggctacttctgaatccaaactgttgaactagcaagaagagacaagttaagttgtagctcctaggaaaagaagactctttataagcctccgtgtcacaggagagcagacacgtaatgttctggaagaagtgcactgactagtcacaaacatccatatatagaaatttcgcctgcttttattaacttgaaagataaagtgtaaagtctgactaaattgttttcttaaaattttaatgtatgaatgaatatttatcatagcacattagttaagactgacactatatacgtatggctagagagagaggaatatatatatatatatgtacatatatatgtatatgtacatatatatatatatagagagagagagagagagagagatggagtctcattctgtcgcccaggctgagacatatatatatatatatatatattgtcatatatatgtgtcatatatattgtcatatatatgtgtcatatatattgtcatatatatgtgtcatatatattgtcatatatatgtgtcatatatatgtcatatatatgtgtcatatatatgtcatatatatgtgtcatatatatgtcatatatatgtgtcatatatgtgtcatatatatgtgtcatatatgtgtcatatatatgtgtcgtatatgtgtcatatatatgtgtcgtatatgtgtcatatatatgtgtcatatatatgtgtcatatgtatgtgtcatatatatgtgtcatatgtatgtgtcatatatatgtgtcatatgtatgtgtcatatatgtgtcatatatatgtgtcatatatgtgtcatatatatgtgtcatatatatgtgtcatatatgtgtcatatatatgtgtcatatatatgtgtcatatatgtgtcatatatatgtgtcatatatatgtgtcatatatatgtgtcatatatatgtgtcatatatatgtgtcatatatatgtgtcatatatatgtgtcatatatatgtgtcatatatatgtgtcatatatatgtgtcatatatatgtgtcatatatatgtgtcatatatatgtgtcatatatatgtgtcatatatatgtgtcatatatatgtcatatatatgtcatatatatgtcagagagagagagagagagagagatggagtctcactctgtcgcccaggctggagtgcactggcgcagtctccgctcactgcaacctccgcctcccgggttcaaacgattctcctgcctcagcctaccgagtagctgccactacaggcgcgtgccaccacacccggctaatttttgtatttttagtagagatggggtttcactatgttggtcaggctggtctcgaactcctgacctcgtgatccgcccgcctcagcctcccaaagtgctgggattacaggcgtcagccaccgcgcccagcccatatatttttattctactaaacagaatagtagaataaaattagacatggtagctgaaaaggatgattttttgactattttaaatagagatttttaaactttaaaaacctcagaaattaggaatttacaactttattacacaaacgtgcgttgttaaaacattcaagagtaacagtatgccctgcattaacagggataatatataagaaaaatagagatagccacacaaaactatatattctctgacattctttgacagaaacttcaaaagtagaggtgaaagatacatggattttggagccactgaagccgtgaaatttcagtaaaaattatgtcaaatgtgacttcaaattaaattcgagaaacatttattgagaacctgttctatgtacagcactgtgctaggtcccatagggagagtaagtcatttaggattgcactctaaaatctgggcatattggtgcaaagggaggtgaacagcaggcgtaggtgagtgtcagaggacctgacccaagctgggaccctcctgcaggtaaaacggtgggtagtgagaagctctaggaagggggcgcttccgaacacgcgcgtcgaggagggcgttccaggactctgagggagcagcccagctggaccgaggccgcgtcgttcctgggcttactattcccagacccggactcccgattccggagtcacggcccaggacgcgaaaagactctacactggcaccacgctcctccttaggcgggccgtcagtcccgggtgcgggctgcgctggaggctgaggtgggagcgacatggtgtggaggggcaagaaatgtcggcactagacgcgccaagaaggagattctacgagcaattcccccctcgggccattgtgttgctgtttattagcccctgggagggcgtcaggacaaaaggaaccctcctcccttcttagtacttaggcccaaggtcgggtgtgggagccggcgcgctgctttctaggcaggcactgaagctacggcagccacgcaaataggtatcagccgttaaagcttggctacaggcaaggggggggcaataggcccctggcgctgtggggccccgcatcccacaatccccgcggctagcctgtgtggctactggcggcagctagcgggctgcgaaagcgagcccagcgtccttgacagcagcccacgcgtcggggcggggcttgagcccgctgctttaaaaggtccgcgcggccggccccgcccctctggtgccgcgattggatccggcgggggtagcgttgatttgataggcgcagagagggtggggctgcgcacgcgaggccgggggccttgccgctgcctcccgggctggggcacgagtggctgcggagtgtgggtggttgggcgtgaggggccgacgggctcgcgcgcgcgccgtctgctgaggtccctcgggaaggaggagagcgcctgacgccgacccgcaggcgcagcccggcagtcggcggcgcgccgagggcggaggtggtgcgtgcgtgcgtgtgtgtgtgtgtgtgtgtgtgtgtgtgtgtgtgtgtgtggagctcgggtgccaagggcgagccgtcagtccccgggtgcgagtccctgctgtcttccacacccttcctccctccaggctcctttcctacatccttcccgcgcccccacggttgcggaccgagcgagaacccccttaagcaggtgtggggggcgtgcggggtggcacgagacaaaaggggcacgggggtaagcccgccatggcctcccggagcctggggggcctgagcgggatccgcggcggtggcggcggaggcggcaagaaaagcctgagcgcccgcaatgctgcggtggagaggaggaacctgatcaccgtgtgcaggtacggcagcgcagggcgaggggaaccagcctcccgccggggctgagagctctgggcttccgcgcgggtccttgggggtcccgggcatgatgggctgccgcccagtgcccccgcctatgttgcgccagccaaatctgtgagcgcgcagctccttggacaggggcccgggtctggacaccgtcgcagccctggactttgtgtcagttccagtgctgaaggtactggagggtagagcttggggcggggctggaggaggatttgttttgaatgtgcaatctagcgtcagagtgaaagaggagggcaaggaagaagagctctttcatttaatgcccattcagctgtcagcgagctttggataaagtggtagttactgtgattgtttactgtgttgcccccaaatcagagtgcatttcgttgttttggcttgtttacattatcttcagccatttcatttcacacgttagttgagtgcctactacatgccagccattgtgtatgtgagcgtgtgtgtactatccacttttcagctacagtgctagtgctggttctgcagttgttattaagagtgggactgtggaggatacctagtctttatgtcaatgatttattttaaggcctgcctttccttaatgctttataactgtaaatgtagtatttccttcagaaaaatatagaaacaataaaagaataattactattgggccgggcgcggtggcttacacctgtaatcctagcactttgggaggctgaggcgggcggatcacgaggtcggagttcgagaccagcctggccaacatagtgaaacctcgtctctactaaaaatacaaaaaattagccgggcgtggtggcgggctcctgtaatcccagctactcgggagggtgaggcaggagaatcgattgaacctgggaggcggttgcaatgagctgagataacgtcattgcactccagccgggaccacagggggagacttcgtcaaaaaaaaaaaaaaagaactatttatagtaagcctagtattcagagataactggtttttaacatgctgatatattttctttaagtcttatatctgagtattaagaaaaattgaaaccctaagcatcaatttcttaggaacttctctgagccattaagttgttttaaaattactttcctccatcagactcctaatcatcacctagtgatattcctcttaagaatcagatgatgatgaaactttttcttcctttgcaatttctctgtatttttccgttatttttcttgtgtaaaaatgtgtctagcatcttaagtggaatacagataattattccaggacttaaatgcaataactcacagtgactttttaaaaaatacttgaattattacaaatgtttatctagcaagaagaccttcttcattgactgtatttgtataatgtaattattacagcactttgagttgtaaatggtaaagtaatatggtatccgtttaatttgccgtttgtgctgtctaggatgtaactttttgagacaaataggctgttaggtgttttaaaatataggtaaatatctttaaagtaggtaaatggaaccataagcaaggctgattttcttaaccataatatacagacatcaaaaattgctttaaaaataagggtagtttcaacatatacagtgcttcttggggggtaacatatttaataaaagctctatcagcttttgttaaacttcacaagggcagtgattctatctgctttttgcttagtctttttttttttttctttcaaattctcagtatagcatctaacactcaaaaaatatttattgaatgaataatttcagtgatgggtactgttccttttgcttctccatttttgtcttggctggctttaggtcatgtaatgatcatgtgtgcccttatcagagacagttgaaaagaaaaggatttgtatttcaaccttatttaaactaaattttaaattatctttaagaaattttaggaacgtcacactgatttctggggacagctctctgtattagttgtattttcatga

SEQ ID NO: 10 - DNA, 6110 bp, Homo Sapiens; identical to SEQ ID NO: 9

SEQ ID NO: 11 - DNA, 6000 bp, Homo Sapiens
actgtttctcttcacataccctcaatatttcttagttaaatctacctaaatgtttgtatcataagtacataattctttaagctatcaagttttcaaaaatacaaagttaaaaacaaaaagtggaatacctaccctccactctatggagtctttttcatggtttatatgaacatttttgttacaaaaattttcaattgcaattacatgttctcctaccattatcacatctaagaaaagtgattacaattctgatattggctaatatctaatgcacattcaaatctcccaagaatgttttccataggattttttccttgttgaacttttagattgtttttgttttgttttgtaatgttcacacactacgtttggtagttatatctctttagtctctattaatctagaagtcctccttttatttttttaacattgacttttgtaaaggaacaagaacagctgtcttacagaatgtcccacatcttgggtatacctgtatcaaactgaatacaaatgggaggtgcaataaatgtaaaatacacatcaaacaggagatttagcataaaagagaatgtaaactatcttattaatcattttgattacatgtagaaaatccaatcttttggacatattgagttctataaaatatatttacaaaattactttatctttttattttcattttttactgttgctactagaaaattttaaattacaaatgtggctcacatgatatatccattggacagccccagtctacaagtttaattgtatacagactaaatgtttttgcagatatattaatatttgctaggtgatgttgtttactcaaaatccaagtgatgagtcatttactacagtccattctaccgtgagagataccaggtctgatcactcggttaaggtgctaactgcaaaatctttaattggagaagcatattctccttccaattagtaaacattctgaagaaaattcttagatacaacatttttctgatagtttagagttcattgacaatccttgcctgaatctattataacaatggaagttccaaaatgatagctggaatttttctctaaagatcattgctttattttctctacctctcacactttctttcagtttcccttctctcagaatattaagcattcagcagtagcattcagtatctcaaaatcagttacagttacgatgttctttgatgctcaaattgtcccagagttggccattggaagcatcttccagacagcttcagtgtgctttcgactactccattaaactccacttccttattttcaggtaccacaagatactccaggctcactttctatttttcctgtcccagacctggctgaaattagctactgaggggttcatttcttttagggaggaatggtatttagaaacccagatctggtactaacagtgctcattgttactgtccctttcagtggactgaaaatgaactattaaaagattatgaattcatattgaaatttctaattcaaacttaacattatttttaaaaatgtatttgatttccacatttgtattttttctcttacactgaaaagcttggtttcttataatattaatgtgtttactaatttatcttataatttacattacagtttctaatattattaaacttactagtctattttacaatttactactaacaatgaatctatttagtgaagttttaaatattctataaaggcagagcaccatgatcaaaatttactttaaataattattttccctatatgattacattaccaatattatatacagatatttattgccagttaacaacctaaatgtacttttgaccttctgtctcatcagccaggccacaaacgcgatgtttacatagccatttaccggaagcaagagcctggaccacagagcagatcaccagcagcatatggctcacgtgtgggcgaccaacaccacttgaaaagcagaagttcataagacagaaacacatatgagcatccgcctgtctggggcaggaaagctgagaaagaggcacaccaagactaagggaaagaggccgggaagggtaaaaaggtgaaatgaaaagaggttggtgaatgactaagaacggttggataggacaaataagttccaatgttcgatagcagacgagggtgactacagttagcaatatattgtatatttcaaagtagctagaagacttaaaatgttatcaacacatagaaatgaaatatacctaaggtgatgtatccttcaaatacccggacttgatcattacacattccgggcatgtaaaaaacgcttccatgtaccccatttcataaatatgtaaaatattatgtatcattaaaagaaagaacaaaaaagacagggaaaatgcatatgctgtgctccactcagccaacaaacttctgctctaagcagggatattgattccaaaggctagcttgcgtttcttaaaaataattaaaaacaacaacatgtcatttatttcagagctggaggctagaaataaattactcaaatctcgcaactatgtaaactatgaaaatgaaacaagctagttaccttttattgttcagtttaaaaaagttcttcttctttgctcctccattgcggtccccttcaagatccattccgacctgaagagaaaccgcagctcattagccaaatgcatgagcctcaggcgcgctggaggtgagactaacctctagtcccccgtcgaagccagagagcagtaagagggagcgcccgccgttgatgccccagctgctctggccgcgatgggcactgcaggggctttcctgtgcgcggggtctccagcatctccacgaaggcagagttgggggtctggcagcgcgttctggactttgcccgccgccagtgcgattctccctcccggttccagtcgccgcggacgatgcttcctcccacccaccgcccgcgggctcagagagcaggtccccgcaccgcgcgggctgtgcgcgctccgggcaacatggtccagtgccactacggtttgggcgctgctccaggagctcctgagtctagatctaaccccacttggtccccatggacttgccagaggacttcacactatccacgcctcaagaagcccttctcccgtgaagaccaagttcaggaaatctgaaagcctgacacttgggaactgtcccatagtagctcccagctttgcgtgcccctacctcgcgctccttggaacggccaccaagacgtgaaattttggaagaagatactccgactttagtggaaagacctaaaggaaacgaacagcggcctctgcttctttgagcttggaagagccgctactcgaatgagctcaggcttcctgtggcaaagagagcgaagcggctgtgctcagcccacgccccggcgctgttcctgcccagccaatcagcctcaccacagatgactgctcccggcccggattgactgaatgctgattcctcgagaaactgcgaaacaggttgaatttccaggaggaatgttctggcttccgttgcacctctctagaaagggcaagtagagaaacgcgcatcagctgaatcattggggacatttcaacttatgtagacacgtctttcaaagttcacataagtcttcatatccatataactacaggacgtagttaagggaaattttctcgggattcgcatttaatacagttaatacaaaaactccgacctctccaattctgtatcacctttctgcttcctaacacctttgaaaaggctaggagaaatttttctgcagtggtctttcttcagcatgcttgacagtttctgagttacatctgttcatcctttatttgatgataaatggaatgaaagaaaaaggaagttttaaaaaatatatagagacaggtatttcaaggtacaaatgctatttcaaagtgtgtaatattttaaaacttcagacgtcagatcaatgcccgtgtttttccagggcattttaaattcttacattttaattcaaattagtaaaataaacatagcatgttttagcatattacattagttgtaatttccttccatatttactgccaacatttaatattttttcctgtccactatttacttcaaactgaggaaaagtacgtgcaatctgcacaattcaaaattgtaaagcaatgctaactcacatcagagcttttcttacttcttatgaacatagaggaaataggtttgttgtatcctctagtctacattctatgactttcacatattacctatcagtttattgcataagtttagaagaagaaaatcactttgttttttactgcatagtctgaggatgtttccactttctttaaataactcatacttcaaagccataatttttttctattcttgactacaaattttccttatcttgatatattttgttcttggccttacaatacaatgaagttttcttttgtttttctttcttttttcttttttgagacggagtcttgctttgtcgcccaggctggagtgcagtggcaggatctcggctcactgcaagctccgcctcccgggttcacaccattctcctgcctcagcctcccaggtagctgggactacaggctcccgccaccacgcccggctaattttttgtatttttcgtagagactgggtttcactgtgttagccaggatggtcttgatctcctgacctcgtgatccgcccgcctcggcctcccaaagtgcagggattacaggcgtgagctacagctcggcctctttttttttttttttttttttttttcacaaattgttaattaggcttctaacaggccactattttttccacatgttctaattgcatatgcaagtgtacagcattgttcactgtttaaaggcttaacaacaaccctgtggtccatctggggtaaatgtaaaagctttcatcttcattacatgcgtttttaatcttatttgtgcctatgatctctgttttcacttttgttttgctttgttgctttatctcacctttcatttatgtaatcttgttgtattttatgtatccttttgaatggccttaaaccctccctaaacagtgcaggatataaatacagtgctatactgttatgttgattatactatttctacaatcttgagcatcaggtaaagatctctatcaaagatataagtaagttaaagatcagaataacacagattttaaaaataagattctaccattctattatattgtattccatttctttgctccactgacatgaaagtgtgaatataaaacatgatggacctaaaacaaactagctcttgctactttcaacagtccttggtttcttgaaagacaccagtcttgcatttgtgccaccaccacttctgtcaagctgaacttggctgttctccttaagcttccttaatttctgatgaaacctacctggtccccttgcaagttgacactcatataccttcattcaagcggtgatatttccatttgaagtgactgccacaatctgcaccttcttgtcctccgctctcatgtagccatttcaccaacttgtctatactctgacaacattaaagatttgcctctctgctgcagtctgttctatatgtatctatgggagtaataatatataatgataataataacaactaacatttattaactactggtcatttatcaggaactgccaagcacttcaaagaaattaagtcatttaatctttacaagaatcctatgaagtagttactatttttgttactcccatattacaataaaagacactgaggtttgcattatttgcccagtcacacagcaggtaaggtgctaaccagtagtccctctctcataactgtactcttaaccactatcctacactgtagtacattatcataggacacaccacttcactgccttttccagtcccacgaagtgttttctccttatgagtccatcttggaaaacctgcaatggctccctgccacagactatatcatatctaacagtttcctcttagcttttaag

SEQ ID NO: 12 - DNA, 6228 bp, Homo Sapiens
tctttttttctaaaagcctgaaacaaaggaaattctctgcttccaggaatagccttaatcagtcacatatgtgaacatagacccagtgactgctcagacaattttccaccaacctaatgtcgggattttctcgacacattgatttttttttttttttttttttgcctattatcagtataagcagtttaaaaaaaaaaaaaaaaaaaaaaaaaagcccagacatgataccagacctctcaaccagacaggcaagatgctgacaatctgcagcgtttgaaagcaaagagaaatgaaggattattgagggtggaataatggttttttcccaaccagtccctggttggtaaaaaaaaaaaaaaaaaacagctttaaaaatcagaattgtgccctgcgggggtggatttgctgaactgtcagctccaccagttaatgaggtagtttgtcaaatggagatagaaagaccatttataacaatgctatgctttgtgtgtgatttaaaaatcaaattgagtggaaactcagcaaatactaaattgtattgtttattttctaattaatttgctacaaactacaaaataaaactattgaatatattggataacgtatgcttttttgaagaaaaagcaccaaaatcatctctgagatgaaaccgattcagaggctgtttactttcttttcatcagagaaacaagttgtagtttgaaagtttgaaaaaggcattgaaattttgggtgggatttttagaattagtgtgttgtataagccaacaggcaatgtcatctcctttgtaagttcagcggagtactagggggcctgggaccatatggtctcactgttgacactgttcgtttttaatattaataggccagggattcaaggccctggggcagatgtcatctaagtgaggacagaagcaaatatcacgactgctcactgagtttttcctctgtagagtacaaccagcataacaggcgttcaaaatatataagcttagcttggcagaggggcaagagcagagaaggtgattcaaattctggcttagcgagggcttactctgtgacattgaggggaattcattgaaactcactgagacctactcttctcatctggaaaataaaaaatatctgccttaaaaagggttagagcttatagtgaggtgcctcacatatggtaaatagtcaatgaaaattatatttgattagaacattgtagggtttataagaatcaaactgactcacttcaaaaactgaagtcaagaaggcttaatgagtgattgttctcaaccttacccagatccctcgttttcttccttacttcaaggacgtaagctttagtcctaacattgttttcctgggattactataatgtagtctccctgccctaaccccaaaacctcttgtctattccagcaagcttgttgtgagaagcatattattttgatgtgataacaaatatgttaatgttaatagaaactcttaccaagcgtttactatttacctagtgtttactatataccaggcactgtttctctgttgtattacttcatttaatcctcacaataccattctgaagtaaattctattattcttattttacaggaaaaaaaaataacattgaaaggacaaataattgccagaggggcagaattatttgagctggacacactggctctagaatcacgctcttaacaactactctattctggccttgaagtactcttgtttcgtgccacatgaatctttttttgtgccacatgaatacattcagaggttgccattcagtgggcagagtttgggagcttctacttaatattggttatcagggccaaggtgaggctatgaagtttacagccagcccactctagaatttaagcttcttctattcccagtctcaaggaatcctaggtgttgagcatctctggattgtccttcatgaagcatggggcagtttagacttctttaacaatatgacctcaatcaatagttgttaaaactagcagctcagggcagaaatcacattagtgttctttggcactgtgtatatctctagttcttacattagtgcctggcacataatagtgagatttgattggtgaataggtgactggataggcagacagacaaatgggtcaacaaatggatggatggatgcacagttgtgaaagatgttgataataaagaagtgatacataatattttactatctctctcattaggttatagtttctcccataattttattatcttggctatgtcactccaaatagccaccgtaaaatccaaagttactcatataaaagaagtaaaatttggaagcatatcagttagaatagcattaaatagtttccctaaaaaagcaagaaaaaaaatttcattcattcaactaatacatactcagggtctatcccttgtcaggtactcttctaggagcttaaagcataactgttaacaaaaacactctgccctcctggtgagtgcatgctaatgggggagacagacaaaaacaaacactcccacatgtaatgtatcaagtcgtttaactgccatggagaaaaatttagcagagtgatatagtcaaataacacaggagtggaggttttgctatttaatatcagatggccagttatttttaaattgagtaaaagttgtagtctatgttagaatgtgagaaaagaaaattaacactctttgggaagcagtaactgtaggaagacaaggaattaggagacctggattagtattagagacgttttgtatagtaacttgataaaaagggagagattttttgtgatatatatatttttttcattttttcttacagaattaacagctctgaaatttgaaggtgctagtgtctcactggtcttaaactgcgaagctgaacgacgaaagcatccttcctgtaatcagtgtagcaaaatgacaggcagagaaaccatgctgggaagaagcaaggtcatcagttgaaccatcttgactttggcccagaacacagctcagcctcaactcctgcagtgcatttgcctccctcactttggtttaagacctggagtgatgtgttcctgctccagagcacctttctttctgtgaggcccgaaacatgaccaccagcggccacgcatgtccggtcccagcagtgaacggacacatgactcactatccagccacaccctacccgttactctttccacctgtcatcggaggactttccctgcctcccctccatggccttcatggacatccgcctccgagtggatgcagcaccccgtcgccggcaagtaagtcctgctggaatttgctctcttttctctgggttgattggatgaagggacctgagaaaacggaatggttggtatccagggcaatttcttatttcattgggtgctggtttcttttggtcttgaattctacttttagttctgtggaaagagatatgatttgaaactagacaagtggcaaattttagaattcaacccgttcaaagctgctttggtattttgctctgtttcataaaatgcaaacacaaaaagtgatgagcatgtgtggttaatatctgtgatcaatatctaaagaaattggccatatgataaataatggaagcagtgaattaggagatgataccataaaaatcactaatgataatactagagttaaaagctattttggttgtgagatcttctctgaatcttttacttgtttcctgtgtacaaatgatatctgtaattgttctcaacttcccatagacctttgctaccaattcatatcacattaagcttttttagtgtccttggcaccttttgtttctgtactagctatttcttatcccagatcttcccttaaattttctgtataaggtactataaaataaaaatagtcaaagttagaattctccaagactgatatgacttccacattgaaacatctatattgtgcaatttttagaaagttctgcctgtttaaagacaaactgtggtagccagcgagcttttccacctgttaataacaacttacttggtttagcatctggaggtgaaaaggcatatttatttaacaacaggcatccacagcatgttctccaagtcctttctggctcatagagcaacagttctttgtaactcttcctggtgattgttttgcattttgcttctcttcaaggacttcccccaaatattagcatggtatcattgggataccaccttaatctttctatattgtgctcttcgtgccttcagtcattccttctactacatccttagctcaccgaaagcagggagcttgttctacctaagtagaatccccggtacattgccttcaaaaatagtaggggatgggtgtttggatggacgaacagactgacagataggcaaacagatgatagacttgcacttttgggatgttgattgcaatcatagtactatatcattcctgataaacagtgactcgatttgctgatgagtctttccttctgtgtttcgaatttctggcttgaacatttgaccctcatgtctctggaattgcctaaaaacctcctcccatgcttctgaagttcaaactgaaagttgaagcagccaaagcggcgtattgactatccagagaaatggacatagtaccagtactcaaaatatcttgctgacccaagtgctgtttcaaatcatgttcactcaatatgcaaatgatataatgaagttacttttagctaacaaatgaggaggtctaaatgattgataaagccattaaaattttacctatgagcctctgtgtctaattccgttgctcaactggcctgacagcacattttaacaggtttctttcctgagatcagaagcatattttgtagatgtagccaagaagttgagatatgagtaggattcccatgctgaatgatcaaatttggcagattgaaactctaaggcagcctgaaacctctaggttcccaaaagcaactttgggctttgggcttctttggctactgatttatttttatttatatttatcttttctttctttctttctttctttctttctttctttctttctttccttccttccttccttccttccttccttccttccttccttccttccttccttatttatttatttatttatttatttttgagatggtatctcgctctgtcgccgggccagagtgcagtggtgtgatcttgactcactgcaacctccacctcccggtttcaggtgtttctcccacctcaaccctctgagtgactgggactacaggcacgcaccaccacacccagctaatttttgtatttttagtagagacgtggattcaccatgttggccagaatagtctcgatctcttgacctcatgatccagccacctcagcctcccaaagtgctaggattataggcgtgagccaccgtgcccggtcttggctactactgattttaaggaaaatgcagagcatattaaatggaaaaatggttgagatatatcatatctaagcctcttttgcactcaaaatacaaggtaattatttttatttcacagttactaataaagtacaagatgccattactgttagattaaactataatgcagttgtcattttctagatcaaaactggttatatagtggcaattgaatagattcaacctttgaaaagcgagggtttgaagttcaaaaaaagggtaaatagtggctgacttttttcttgagggccttgtaaggagagtgctaagtaactgcaccttaaaaggtgtttggagaaggggcagaaaaaggactaggtacagaaagttcaggctggaacatcaaagattacttacttcataccctaataccttgtattattatttcttgctacagtcgaagcacatgaaagctgctcagatggaaatgattaaaagaagccacaatgaatatgactctgttagttggccctcaaagaaggaattgtccttgttaaagcccgtgttttcaaaagttcctagaaaaggacaaagacttaaaaattaaccacagacttggctaaaaataaatttaaggtttttatccatgtactgagattagtaggaaggtagccaaattctgtaaagactcaataactagcaacacacatacttgggtggaaaagctgaccaacgtggaataaaaagggagcaaacatgttggagaatgactctgtaaagagattcatgtcattgaactgtaggacttactgatatctcttttgtaatctgtacatgtcttgattctgcagct

SEQ ID NO: 13 - DNA, 6190 bp, Homo Sapiens
tcaagttttcaagaagtgtaagcatttactgatgaagaaataattagcatgtggctaaatcatgggtctgttttataaattaatacttggattaagtaatagctctaattattgctatcagcataattaattcatgatgaggaatgattaattgactagcgaatattgtcatattataagaaacccatactattcctttcatggggatttaaatactgattattcatttcaaggcccaagttcatttctcagttgagaacttcaaggtaattatatattttacattttcttgcacaaagaaagaaaacatcgagtcgcccaacctttaccacacacagagagagacacactaatgttgttatttttgtgcaatgatacagtatagaggtaagaaattcggaagcagtggtctcgctcaatgaggctgattccatagcttaagaaatgagaatgaacagaattttgaggacacccatccccatcttcacttccctgggaccagtgcatctctactctttggagagatgttaagcaagaatgtgcagcagcctcccctggataacagatccctgtacacacatacctgtcagtgatgccatgtttctcatctctaacttaagtttctcctgctctacttccaatatagctgtttcctcttctcttgtctaacaacttttcatccacctccactgtccggtaaaaatgaactcagtttccaaggaactctaaggaccttaaataagcatttggagccataagcctcatggaccaagtagaaattggcacataatgtagtgctttgtgtatctttacaactaccttaatgacagtgtgttaaatgttttgtaaattcctctgtgttctcttgcttaaaatgtgtgttttctttgtagttaaagggtttcttacaataagtctctgttacaaaatgatggccatataaaagagagaagagaggcgcaaaaataacaaacacagattcagcaaaaatctcacccctttattgccctgaacttttcaatagcaagaactgagcttgctgggctgaaaattgttttaatgtaccttcataaaaggatctttgacttggtaagtgtgtgcgatgcatacttttcatgttacaccacaagtgccacttagcaactccactagacagggcagtgtttcagcatggggtggggtgccccctgacaggcttttaaaaggcccggatgccaatgcacattccaacactatccacaaaaaggagactggagcagtgctcttccctgcattgggcaaggagactctccctccctgcctaaccacttgcctgccctgttttgtgggagaattacaagtaaatgctacagaggcagtggagaaaaaagggtgttttaattcctctccagagtttcctttatttgatgtatgttgcatcctttaaacaagttgtgcaaaatggctgcagggtagattggctctcccttttaaagctctccatccggctgggtttatttgtaaatactgcatctatccttcttagtgttttaggactggctggaaagactcttcttcctgtaggttgggtcagtgtgagagatctaaaaaatcattttcccttaaaattactgtattttaataaaaggattgggcaggggctggaatgagagaaaactggtccttcaaaatgtaaaactgtcatacttaaaccagtttacaaaatatgcgtttaattatgtggtgggatgtgtgtaggtgtatgatgagagaggcaaccaacatggctatttggggtgcaaggatgtgggaacaggcaagtaattttcacattggactttcatcctagggagctgggttctagtcacagctctgagctgtgtgaccttgggtaggtctcatctccccggggttttgtttcaccagttgaacagtatgaggatgagtcacagctaacatttgttccatgatatttacccagcaccatacaagtgttatttctgtcctcccagttaacactgacgtgggtagtattatatgcccattttacagatgaggaaactgaagcctgaagaagttaaatacttatcccagaacacacagctggtaagtggcagacctggaattggaatctagttcagtttgattccccaacccatgctcttgaccactatactgttttttcaagtccagatctgaaatctcattttctgtgtggctgtgtgtttgggacaggggtaaccaattcctgactactctatatgctgcatagaacctggagaggatttttcaaagtaaatgaatctcgaaagctggattgcagagcaaacgagtgcagtcaattcagccaggggcttgcaagagggagaaagagaaaaagactgtggaatggaaagtttcccaacccaagcctttcccaaggggtagccattctctgttctacagtttagggcttgcatgtgctttttctggagtggaaaaatacataagttataaggaatttaacagacagaaaggcgcacagaggaatttaaagtgtgggctggggggcgaggcggtgggcgggaggcgagcgggcgcaggcggaacaccgttttccaagctaagccgccgcaaataaaaaggcgtaaagggagagaagttggtgctcaacgtgagccaggagcagcgtcccggctcctcccctgctcattttaaaagcacttcttgtattgtttttaaggtgagaaataggaaagaaaacgccggcttgtgcgctcgctgcctgcctctctggctgtctgcttttgcagggctgctgggagtttttaagctctgtgagaatcctgggagttggtgatgtcagactagttgggtcatttgaaggttagcagcccgggtagggttcaccgaaagttcactcgcatatattaggcaattcaatctttcattctgtgtgacagaagtagtaggaagtgagctgttcagaggcaggagggtctattctttgccaaaggggggaccagaattcccccatgcgagctgtttgaggactgggatgccgagaacgcgagcgatccgagcagggtttgtctgggcaccgtcggggtaggatccggaacgcattcggaaggctttttgcaagcatttacttggaaggagaacttgggatctttctgggaaccccccgccccggctggattggccgagcaagcctggaaaatggtaaatgatcatttggatcaattacaggcttttagctggcttgtctgtcataattcatgattcggggctgggaaaaagaccaacagcctacgtgccaaaaaaggggcagagtttgatggagttgggtggacttttctatgccatttgcctccacacctagaggataagcacttttgcagacattcagtgcaagggagatcatgtttgactgtatggatgttctgtcagtgagtcctgggcaaatcctggatttctacactgcgagtccgtcttcctgcatgctccaggagaaagctctcaaagcatgcttcagtggattgacccaaaccgaatggcagcatcggcacactgctcaatgtaggtttatttttttcccttcttctaccaagaaaaaaaaaattgtctctcttgcatgcaataaagacgttggaaataaactgcattggtagcaagacaaaggatttaatgatttaatgctgaaggggtgtgatatgctggcatgcatattgattccctttgctgaaaatttcctgttagatgttttcttcccaaataacccctcccgcccccatgctcctctccttaccaaccttatagtctcttgaaaacagtttttaaaatatgcataaaaatgtggggggtggggagtagagggtgaccacaagactttaaaacattcttcaagtagggcaatttgacacattttgcagtttttactaaaatgtatgcagagtggaatttaactttgctgttctttggattagctactagttgtataggtccccccaccccttgtgtattccaacagtccaaagtaattaaaatatgacattttccttgaaaggaatttagtttaattaaggtggctgctgctcccgaagttcataaaccaccagttcaagctgccgcttccaatgttttccttgctaaggaaaggcaatatttcttagcattgaccctgctgccacctttccaagtcactttgttggtctaagaagttgctgttttgctagaaaactactggcaatgaacaccccttggactgagccatccattatttccatatcttgcagttcagcccggaacgtggacatcagttaaaggaaaggaaatataagtggggtagcccaatttaaaaaaaaaatattgactattttgttatctgatgctgacacagtgccgaggtacgcacctggtcaacagtagcctggctgcaggcttgagaaatgatcaggagtcccagaaaatcccaccttcgggtggctgtagtgggagcctgcaggatgcttcgccgccctgacagtgatttagataaatggctcagctatctatcaaaatgtttttagtactttatttgacaattcattggagcattagcctgaaaatgacattttaaatctttgttttcaaagaggtcaaagtttaactggaagaaattgagttttcctaataacatggtggcttatctaaagagagaagaaaaaggggagaggggacaatgacaggatttaaattgccctctctgaaactttttcttaagaataaagacttgcttcttgggccgggaaatcaacaggtttgtagctgaaaaatcaataaccatttgatgccaacagcctggctgtctgacttaacattttgtagagccataagcagggcaaaaagaatatcgttttcagaaggcgccttaatcttcagctgctccccaaatgccttttcttttttggtgcccattttatttctggagaactcaaagaaactggagtgttacaaaataattttctaatccaagaagagacttttcagacctgtcctctttgtagcaattaaaacagtatgaacaatttctgttggaatcccagggaactggggctctctgaaactttttcttgttagagaaagtggtaatgaaacatgttttttaacagaaggaaaaaatatgctcaggatcctcgccaaaagttattagacctaatagagtttttacatgtagacattcttccttttgtaattaaccttccaaagatgcctattaagttgtaagagtagggggaaaagctttgtttgttcttggacaagttaaacaagggatttgctttatctagggagagcgagcggtgaatgtgtcattcgcctaaaactacccgataagcaagaagtgttgataacagcaaagtttagctaatcaaagaaacttgcattagacaaagtaaataaaggcatttgacaaagggatttcagaaattccagtgtcttatttttgtaagcagggcaattagttcttattgtggtcagtttcacaagagtttgaatcccacaccccaactttaggttaaatgaataaaatgtaaatattgcttgtgcccttgcagagttgctttaccctcataaaccactttatgatggtcagttgttccaacgatttttttttttttttagcataaataaaactaaaacttttttttttttttttttttagagattctaacaaatgtcttgtgccatgcagtgtttggttcagggtggtacagctagttagggctattgaaataaaagtatattagggctacatttgtgtaagtaagaacataaccacaaccttttccattttacttaatggctattttgacgagaagcagatctgtttttgcttttaacacagaggaaacagtgggcaaagaagaaaaagtactaaattccaaccaaaactattttctgctttgagttttttttatggtgtgtgtgtgtatgcatagtaaataaagtaagacctttgaacatggagcacaccatcacaagctcactttgaaaggtgttaaaatattccctttattttctttttaattttaaaggcagaaaaatgatatgccagccagctgccatttgtagtagtgtctgtgaattgcttcttataagcattcaaagtcaggattaggggactactaagggaatgtggtctaaatattacgattgacgactgcccctggaaggtataggagtcactaaa

SEQ ID NO: 14 - DNA, 6244 bp, Homo Sapiens
gagaatgctggagagaaagtggttaagaaaactgcctttactgaacttcttgggctaactttgattgtaagtctctgaacaatcaaagcctgtgaggagacagctaaccttcttattcttcctatgtcaatagtgaacaattgcagatcccctttcctttccttctcctttcccctgttcctctctcctccctccctgaatactcttgcttttttctgggactggtctagagcatgggtggccattgttgacctacaggaggcaccactgtcaccaacaaagggtaacagtctttcttttcaatatttatttatatccagtatttattttcaatactgactatggagagagctctcctgtgctcaaacactgcaatactgggggtctttcaaagcacaaaaacatatatttgcatgatggcatcattaacatttttatggctttctatttcttttttgtactggtctcaagagccactcataaatctctcagtaactgcatagtgtcccagggccagagaccggccactcctggcattgtgattagagtcatttaatatccaaggtggtgactaatgtctggcaacaaagcctccattgggtgtcatgtgtcctgggaccctgagcgtgggcactctaggagcacctcagtattgcgtgttagtactatggccgagagaatagttgagaaagtggtcaagaggtggatccatgtgaacgccactgggaaatgagagacctcgttcccaatcacggtcagtgcaactcgaaagcctaaaatcagtttaaaacaaaggtatctacctttatcttatgttcatatcctaggcttttaataatacgtatttttcacatgtttacagaaagcagtcaactgagctattcatggaaaggtttgtgggtttggttaacgaagtggaggagtattacatttcagctggaaacacatccctagaatgccaaaacatttattccaaagtctggtttcctggtgcaatcggaggcatggcaatgcctctgttcagagactgggggctagggccagtaaggcatttgatccacatgtatcccagaaggcttttattgttaaattatattctttcggaaaaaccacccatgtcctattttgtaaacttgatatccatacacttttgactggcattctattttagccgtaagactatgattcacagcaagcctgtttttcctcttgcttggggtggcagcagaaagcatagggtactttccagcctccaagggtaggggcaaaggggctggggtttctcctccccagtacagctttctctggctgtgccacactgctccctgtgagcagacagcaagtctcccctcactccccactgccattcatccagcgctgtgcagtagcccagctgcgtgtctgccgggaggggctgccaagtgccctgcctactggctgcttcccgaatccctgccattccacgcacaaacacatccacacactctctctgcctagttcacacactgagccactcgcacatgcgagcacattccttccttccttctcactctctcggcccttgacttctacaagcccatggaacatttctggaaagacgttcttgatccagcagggtaggcttgttttgatttctctctctgtagctttagcattttgagaaagcaacttacctttctggctagtgtctgtatcctagcagggagatgaggattgctgttctccatgggggtatgtgtgtgtctcctttttctttcaggacttgtaggattctttgtgccatttgcatataatttggcaggttcacattttttaagagccctatgaagtgctttttgcatgtgttttaaaaaggcatttgaaaattgaaagtgtgatttatggaaattaaatcatctgtaaaaaattgctttggaaagtaatgattgctggccataaagggaaatatctgcgatgcacctaatgtgtttttaaccctttatttgctgacaatctatagtcattaatgctaaactcgattttggcttcagctacatttgcatattgtccaacaatggtctatttttgtaagaattagataaaatgtatacttgatataaaatagtcaaaaatgtaactcttagtaacagtaagcttggcatttagatagaccatgaacacttcgtcagatactctgttgggtgtttgggatagcaattaaaacaaagtattgatagttgtatcagagtctattaggctgcagcaaaggaagtttattcaaaagtataaactatccaagattatagacgcatgatatacttcacctattttttgtctccttaatatgtatatatatatatatatatatatatatacacatatatgtgtgtgtgtatgtgcgtgtgcatgtttaacttttaattcagttaaaaacttttttctatttgtttttcatctggatatttgattctgcatatcctagcccaagtgaaccgagaagatcgagttgtaggactaaaggatagacatgcagaaatgcattttaaaaatctgttagctggaccagaccgacaatgtaacataattgccaaagctttggttcgtgacctgaggttatgtttggtatgaaaaggtcacattttatattcagttttctgaagttttggttgcataaccaacctgtggaaggcatgaacacccatgtgcgccctaaccaaaggtttttctgaatcatccttcacatgagaattcctaatgggaccaagtacagtactgtggtccaacataaacacacaagtcaggctgagagaatctcagaaggttgtggaagggtctatctactttgggagcattttgcagaggaagaaactgaggtcctggcaggttgcattctcctgatggcaaaatgcagctcttcctatatgtataccctgaatctccgcccccttcccctcagatgccccctgtcagttcccccagctgctaaatatagctgtctgtggctggctgcgtatgcaaccgcacaccccattctatctgccctatctcggttacagtgtagtcctccccagggtcatcctatgtacacactacgtatttctagccaacgaggagggggaatcaaacagaaagagagacaaacagagatatatcggagtctggcacggggcacataaggcagcacattagagaaagccggcccctggatccgtctttcgcgtttattttaagcccagtcttccctgggccacctttagcagatcctcgtgcgcccccgccccctggccgtgaaactcagcctctatccagcagcgacgacaagtaaagtaaagttcagggaagctgctctttgggatcgctccaaatcgagttgtgcctggagtgatgtttaagccaatgtcagggcaaggcaacagtccctggccgtcctccagcacctttgtaatgcatatgagctcgggagaccagtacttaaagttggaggcccgggagcccaggagctggcggagggcgttcgtcctgggactgcacttgctcccgtcgggtcgcccggcttcaccggacccgcaggctcccggggcagggccggggccagagctcgcgtgtcggcgggacatgcgctgcgtcgcctctaacctcgggctgtgctctttttccaggtggcccgccggtttctgagccttctgccctgcggggacacggtctgcaccctgcccgcggccacggaccatgaccatgaccctccacaccaaagcatctgggatggccctactgcatcagatccaagggaacgagctggagcccctgaaccgtccgcagctcaagatccccctggagcggcccctgggcgaggtgtacctggacagcagcaagcccgccgtgtacaactaccccgagggcgccgcctacgagttcaacgccgcggccgccgccaacgcgcaggtctacggtcagaccggcctcccctacggccccgggtctgaggctgcggcgttcggctccaacggcctggggggtttccccccactcaacagcgtgtctccgagcccgctgatgctactgcacccgccgccgcagctgtcgcctttcctgcagccccacggccagcaggtgccctactacctggagaacgagcccagcggctacacggtgcgcgaggccggcccgccggcattctacaggtacccgcgcccgcgccgcccgtcggggtggccgccgcgcccggcaggagggagggagggagggagggagaagggagagcctagggagctgcgggagccgcgggacgcgcgacccgagggtgcgcgcagggagcccggggcgcgcggcccagcccgggggttctgcgtgcagcccgcgctgcgttcagagtcaagttctctcgccgggcagctgaaaaaaacgtactctccacccacttaccgtccgtgcgagaggcagacccgaaagcccgggcttcctaacaaaacacacgttggaaaaccagacaaagcagcagttatttgtgggggaaaacacctccaggcaaataaacacggggcgctttgagtcacttgggaaggtctcgctcttggcatttaaagttgggggtgtttggagttagcagagctcagcagagttttatttatccttttaatgtttttgtttaatgtgctccccaaatttcctttcatctagactatttgattggaaatatgtcagctatgatgatgactttctgggaagcgattcctgtcacccgctttcccctcctccccaccccacgtcctggggctttagagagcgattgggagttgaatgggtctgatttcggagttagctggctgagtccgcgctggagcggattgctggcatgtgacttctgacagccggaaatttgtaggtgtcccgcgagtttaaaacaagccatatggaagcacaagtgcttaaaaataatctcctgccagcccagtgacaagcctgtcccacccggggagaatgccccggagtggcgtgcgggtcagccagggtctgcgcctcgcagccactgtggaaggagcgcggccggtccaggacacaggagaccactttgtgacttcaatggcgaaggttgtgtgtcctcattttaatttttttccctacaagaattgttctttctccctctcctctccctcccattttctcttgcccagtttctccttttgttttttgttttttgttttcctgatgggcctgcagagggattaggtgggcgcttctggtgaacaccttcctaggtggccacaggacaggtgtaccccggactgggtttggaagcttcagggcgccacatggctgggtcctgaattaggcatttcccaactgtacactggtatccggactggtgtccctatatctttctgccttgtaagccgtggaccagtttttgttcagtattctgtttccagggatatttatagcagaaggaaggggactaaagtgcagtttggccccagaggatactgaagggcagattctgggggtattcagtgtgcatcttcagccgccttggagaaatttagagcatcccacagccacgcagatccaagctgtctttactcaaaagacaaacaatgaacaaaacttttaaaggttggcatatttcaaattaattttacttgttttaatttagggttaaaacagagaaaaaggatttcttctgcccacctttttttttttaaatggaagaacaaagtacagcgattaagtctaattccacacaacatttaaaactgcttgatgtgaaggaaggcactggtatgatgtgaattccataaccttatgatggactccagaaaccattttcttccctatttaattttcagttcttttattgcaaattaatgctgctgaatttcaatgggcactaatgagactgctccttggtagattatttactgccttgctaataattacaaagtgaacctggtcaaatacagaggggatcgcatcttattcaaaattgttcatcatcccagtgataagtggtatcagtgtaatatgccctatcttacactttctgcattacatgatattcaaacactcttagaataataaaaaaagagacaaggaacttaaaaattaaaaaaaaaacttgcacaaatgggactctgtgtggaaattcagttttagaatgatttttcctgtgttttatttcccggattatctttcctcttttgttagaattctgcctgttattatccagcaaggaaaagaagcatctatgcaagttcttcatatggacaga

SEQ ID NO: 15 - DNA, 6199 bp, Homo Sapiens
cagcatctctggctttctgggccagcatgtctaggtcactttattactccctggacaacttgataggatgaaaagtgttggctttagaattatgccaaccttggtgtaaattctcattcagacacttaactggctgagggacacctggggtcagtcacttaggcacaaagaccttcatgtgtaaactgggaataaactcaccttccttggaaggttactgtagaatatatgaaacagcatgccgtttccatgaaggaaggtaccatgcgtggcttatggccagcacctagtacactgctagcttcacagtagatgctcaagaaacactggttgcataagtagaggacctaacacagtgcctagtacttaacaggtactcaataaagactaatttccttcccctttcctgtagggatgctaaatttagaacatagccctgagtagaatagcccataactcctacccttaaggatctcccagccgcagtctccaggataattacccgatgccaccacagtagccagtcggtgcagcttggaacaggataatacctgagaggaagggggcgggtaccttctacccaggctcaaaggatcctgagtcaaatgttctttactccctggccttagggagagaatgtgtgctcagaaatggttctgatataactggctcttccacacacatcccctctgttcaccaagaggaagtgacatgtggtatgttgtccaacaggctctgatgattcttaagcaaagagatggaagatggaatttcaaccccatggagatctaataaacttacccagagttgctgtgtctaagacctctttcatatgcaccactgggcagctggcaattctctggtaggggtagccttctgcagaggctggctagcagaccaggcacctctcccagactgccttttgtttatagctggcaacaacccacctggtattaggaccactggccaaagacaatagtcaggcaaagtgggcaagcagcctcaatccctacttggagatgcctcagagggtgtgtctgcagtactggaatcctgtccctcctgtaatcagctgaacaaatatttgccccaaaagagaatcaaagcaggagggaacaggagaggtcactgcacaaaccaacaggaactatttaatcatttatccccctagagagttcatttacagaatggctttcaagtctagtcagctagctcaagagaacccaccacctttacctcccctgaccccaccccagttatctgacctctattgacttgacccccttgccttttacaagagctggcacagacgagttgaaattgcaaagaaatgcaaaatgagagagggggtggggttccagggcaaactcaggaggtctcttgctcagtggtaaagtgaagtgcctgccacaccctaggcccagcctatagacagttgcattcttgacattcctgagtccatggtgcatgtccccttccacctcagctccttcaatggatgacttattttccacagcttgatgcttttctgcatactctgaggggatagaacatctctcataaaacctgcacctccgctaggtagggagataagcaagaaaacaggactgaattcactgaagagcaaaacttgcctacagtgaccactggtaaagaagctttcaccaccatctcatcctggctcagtgatgggcaggagaactctccctccctggaaagggaatttgctggtgtcagtcactgtgctcacattatcgccaagatttacaatacactgtaaggcaaggagagcttgccacattttttagtgaaagaaactaagcctcaagaaagtaacccagcctgtccaaggtcacacagctagttacatgacagaactggaacttatacctgcatgtgaagtctgttactaaatctcaatgtcccacagagccccaaagactaggttcttgctttgccagcaaacagtgcttgaagaggcccctgggctctggccggaaagtaacaggcagagcagctggagctccccaaccgaccccaggcaatgaggtgcaaagtcccctggcttaatgtgtgacacagcaagtgctccacaaacaaggcaaccatgcagaaagtcgcacactttgggggaaatgaacttagggggcgcagtgcaaacacaatctgcacagcctacactgccccaaaatctgacaattctcagccattcaacccagtgggaactcctgcctatggccatgccctagtctgagaggagagtgccatacacgcaaactttgaaataaagggaacttgatttgggggagagaagcccaggataggactgagaccccttggggggaacagatggagaggtctgtgggtcattgatgctcatcatcttctccaggcattatactcatcacccctttgtgtgtgaaccattgtataaggtaagggaaacaccgaactaacttcctaccctcacaggtttgggacttaatgaacacataggctacagttttctttgctgagaaactggaacacaagtatggaatagtggagtcatgggggtgaccagggtgaaagatgcctgatctctgaagcacagggtcatttgtatttccaaggagttaacctcttgtggtgaaatgaggccagtcaggtttcctcaactatcaacgtctccaacaatcacccaacacaacagaaagagatacagaagaagggctgttggggatctctgaccagaggccaaagaaaagggacacacaaggggcttggttcttacccagccgccgttctcctggatccaaggctctaggtggtcattcaggtaagtggccatccaagctgcgatccgactcaccaatacctgcatctccttgtctacgctttccacgcacagtgccccgccgaaggagaaaaaggccacaatgcgaccccagtttaccccatcccggaagagttcattcactacctgttcaaagctctgatatgctgtccctggggtgatgtggagctgggatgtcaggtcactgaatgcccgccggtaccgcagttcaaactcgtcgcctgcctccctcagcgcttgctttactgctgccatggggatcacctcccgggcatccaaactgctgctgtggccagtggctccattcaccgcggggctgtctgccaggtgccaggatgggttgccattgatggcactgggggtctccatctccgattcagtcccttctggggcctcagtcctgttctcttccacatcactaaactgactccagctgtatcctttctgggaaagcttgtaggagagaaagtcaaccaccagctcccggttgctctgagacatttttataatagggatgggctcaaccagtccattgtccaaaacacctgctcactcactgagtctcgtctctggttagtgattctcttctaagatccaaagccaagataagattctgaagggagagaaagagcttcaggaaaaaaaaataattaatatgcatgccatttaccctaaaaattccattccccctccaggtaccagaactggtttctttgtgggtcttacgaaggtctgggtctaggttccaagatacttcacttaagtcaaatcgaaagcaccagtggactctgaatctcccaccagccttttctacccccgtcttctccgaaatgccttcctcggaaagtcactccctgggcagtcccccccgccccactcccgctcccccgcaccacctacattcaaatccgccttaggcaaaggcaggcaggtgcagcccccggaagatcttttgtatcacaggtcgggagaggaggtggctgcggggatgccggtaactcagccggcctcgcggtggctggcaaaaaaaccagctccggccggagggatcatgcgacccggcaggctgggagcccagaaggcgacacaggaattgcgaagctcaggaaccagccccctcgcttgcttcctcctccatcgcccggatcgagggcggccgctccgcagccgcggcctcctgccacccgggagcccagccccctctctcttgcacgccccttggctctccgcctcctactgggagccaggagtactctcccggaggtggctggtatggatttagttggtttttgtttttcttttttctatttaagcaccagcccagggtgaggtggaggcgtccgaaaccctaaagggacttctcaatggggttcaaggtttcagtgagggacgcagggagggggaaactgcctcagatctgcaatctgactttgggaaggccacccccaggcctgtctgtgatgttgaaggccggagacccccaacaaatgccgctggtttgctctgaattccccaaaggcccagaacgtggcagttggggattgccgggtcctccattccccgcccggacacaatggccgccggcgccctgcacaaagactgggtgagggtgaggcgctgggcctctcctcaggtcaggaagaggggtcgaggcctgctcgacggccccacagctgagaccacgttttcctggggacaggcccaaagtggctttctggcgcccccgggagggctccggggccgggggctgcacctctccggagcccagggtgggccggctgcggcctagcggcttctcgagctcactaggccgggtacccgccgagccaccgccccgttgctaggcaaccgccctcccccgggggcgccccctagaccttcctgagaggaggggcctcgcccccggcggtccgccccagcgcagccaatcagcgagcccagccggcacggaagcgggacggcgaaggctcctattgggcgcaacggctgtcacgcacaggggaggcggcgctctcacctgcgagccccgcgagccgtggggggccacatcccccttcatcggcccggtagcttccagacgcaagagctcttcgcggccgagttccgcgccgcggacccgggccggcctacctggctgccggcctacctggctgactgctcgcgccgtctctcccgaacaagccggcctcagtttcccctgaagagacaggggaacttgcaagctcagtcacttccggtgccgcggcaacgcgcgcgagcccgagacgcaaagggagtgcgcgccttgagtgactggcatcaggaccggggagagatcgccccctcgcggtagatctggggaatcgggaggcgcaaaaaatcaacatttataatcacatttccatttattcattcagtcagtcagtcagtcactcatcagtcaatcagcctatttcatccgtccgtcagtttatatatagaagaagcatcgccttgtggttaagcactttgtctggattctaactctgctagttaggcaagtttctcaactgctctgtgcttcaatgtcctcaattgtaaaatgggtaatagtaccaacctctctcgttgagctattgtgatgattaagagagttattaattgtaaactccataggacaggccgggcgcggtggctcacgcccgtaatcccagcactttgggaggccgaggcgggcggatcacctgaggttaggagttcaagaccagcgtggccaatgtggtgaaaccccgtctctactaaaaatacaaaaaattagctgggcgtggtggcgcatgcctgtaatcccagctactcgggaggctgaggcagcagactcgcttacaggagaatcgtttacaggcgtgagccaccgcgccccgccaatttccttacaccctgaaccacacagtgtgttatcaaatgttttatccttgccaattagatgggtaaaaaccgaaggcactttcatatttctttttttattatgaatgaagttgagcaatttgtcatattttttagtctttctttggagggtggtggatcttgtattggtgaattttcttcatattgtttacccctttttcaggtggtctttctgttgaactctttcctcatttttttttttttttttgttattgttgtttgttcgagatggagtcttgctctgttgcacaggctggagtgcagtggtgctatcttggctcactgtaaactctgcccgccaggttcaagtgattgtcctgcctcagcctccctagtatctgggactacaggtacacaccaccacgcccggctaatttttgtatttttagtagagacagggtttcaccattttggccaggctggtctcaaactgctgacctc

SEQ ID NO: 16 - DNA, 6155 bp, Homo Sapiens
ccagaaaacatcttaggctgtatttatagagactggtaatccatagtcaagtaatagttttctgtactctgccttggaaatactgattccagaatattgtagtagattttcattgccacattttgagatgaatattagcaaaagggcatatccaatgatggcaaaaatgagatggtaaactatcttgcctgaattatggttgaaggaattggtggaaaaagacccaggggaaattctaatagctttcaagtatgtgatgagatagagaaagtggaactgagggaatgaacaagataatttaggagtaactatgtttagggataacttcagaattactccacaaaaagttccctgtcaggcagtaagctcccagcaatgaaagtacccacttaaatcacttctgagatactttcctatttcaagattttaacttaagggcttaaagaacttaggttgacactgtataggactgtagtttgcagaggcagggtttgggataacttcttagccactgggcacttatgcggttgataccaggtaattctaatacattacagggatcagcaaactttttttctgcaagatgccagatagtaatattttaggctttgcaggccatatggtctctatagcatctgctcaactctgttgttgcagtgcaaaagtattgttgacattatgtaaacacagtttgttacctgtgttccaataaaactttatttacaaaagcaagtggtgagttggatttggcctgtgggtcatgctttgacgacccttgccttaactaatgaaatctagaaatagagttctaatgtaaatatagaaaggctttcaatctagggattaaaaatcgaactgtcaagatgtcattgtcttcttggtctgaaagagtacacatcaagtgttcaaaatagtgaattgcccaatgaattaagaaaccttccagtataaaagtcaaatgacaatggagaatctgatactgttttttactctttatttctgctacttaacgttgttcttaaaggcgtcgttacttctgctgggtagtactgtctactcagttggactgctgatgcagacccagtccataccaacaagttaacacaggttcaggccttctgagaaccaaaagatttttaagtacttccttcctaaatacagtaacttttaacagtaattttaacaccagaagcaagaagtaaacaaaaatctctgatgatcgaggcatctgttgtcatatattttgtgctcctaaggtcatacagcagagcctcttgtattatcttttggtctgttggcctttagtttatagtttgtaaaatggtggtcacatgtcaatgctgactagaagaaggagatgctactgtaatcaggcaggttggccttcgctgagaagtgaccattgattgctagaaaacaaagaaatgggaggcattcagcaacctggggttgttggttttaggaccagaaatgtacccccaagtctccaccaaatttctcaataatcctgaagagttttgctgtttgtgttttaatataacacagtaattggtgcttgtaatgaggactataattcatcaaaaaggtaaattgtgaattgtgcacacgcacacacactcttctaagcaaatgggactgctctattttgaacagtcttcaaattgaaataacttatttcgatatgtagaaaattaggataagcaaaaccaatttatttactcttaagagttccagatagtagtgatttgtcagtatgcatatgaatctttagtcctggcattctgaactcaaaacctcaatagagtggtttcttgacccttaaagtgttttatttttagtaaatacatttttaattctgtgacctcaaacctccaagctacattatgatttcataattttatagtgatttatccccccattgctttaaatttaataatcccatcctctttattggtatttaattttttctgtagtctaaaggcccttttatttaaaatgttatatattctgatttcttaattttagggatttttctctagacaattgagaatatgtaatttttacactttaatgttcatttgattataacctacacttgaaaagcaatttttaaagaaatctgagagaatttaaaaatcattttaaaagcatcatgtcatttttagctcaaaatacttcagagaatttattttattttattttttttggagacagggtcttgctctgttgcccaggctggaatgcagtggtgccatcacggcttgctgcagccttgacctcccaggctaaaatgatcctcccacctcagcctcctgagtacctgggaccataggcatgtgccaccacacctagctaatttgtttgtttttttgtagagatggggtcttgagcccaggctggtctcgaactcctcagctcaagggatcctgctgcctcagcctcccaaagtgctgggattacaggtgtgagccacaacccccagcccagagtctcctttttactaacggtgtacaacataaaattcaaactctaacatggttttacatctggcccctacctaccttttgcctctccttctttgtcacatactccacctgttcccatgcactttagactcaagtaatgaaaaacagcttgtattgctaggaacaggccgcattctttcatggtctgactttatacacactctcttgtggcaacctagaacacctgtctataggctctcttacatcaggccataccctttctgtgaaatttttaatctgtaatattctactgaaactttacctctctgaagccttccctaatctcctcaggcttttccattgttcatattctgtcttgtaacagttatcacattgttaaagtcgttccccagtaaactatgagacccttaactgtggaagggaaggcatctttttaacctttgtttttgtgccatacttagcctagagcctgacattaagcaggtacttctcaaaaaaaaaaaaaaaaaacacagggtagagacagataacaagggattcctgacacctacgctgtagatagctataacatttcaataggaatcttgggaatctggggaactggaagcagctgggaaagcaccggcatctgagccactcagtactcttccaggcttgtgtgtgagccttgccaccttcaggtattagcacttgaaatctaacttctttatgaagctccttatttacttgccttctcggtgaaaaaaaaaaacaacaacaaaaaccgtttccttccccatctggtgccagcactgtataattcctaataagcttgaaaagataatgttggcaatactttacaagtttattgctaatgtttaacatttattaggtgcttgctgtgtgctgatctctgtgcttacatatttttcatatatcacttcatctatcttcacaacagtccagtgaagtagatgccattattatcccaatttcacaaatgggaaaaatgagattcattgagataaattaaactacccaaggccatacaactatagactaagggggccaaaatttgaatctagtgtagattcaaattagagctcattctcttattcactactggggaatattgcctggccataactgaagtccaaataacagcatggttataatatgggctttaaaataatctagacctggattcaaaatccatttattggaggcaagtgacttcacttctgatcttcagttttctcatatgtaaaatgataatatctacctcaaaagtgttactgcccacccatgtacatggtacatactaaaaaagcaaatgttagttccatttgccacttctacactttatgtgaaccctgggggtaatggtttgtacagaataaggcctggcatgagaagacaaaaaccatctgacaaataaaaaagctgtcattctgtctaccagaatgtcaaccagtgcctgccttccaggatcaacaagtgttttattaccataatcacatttattctcttaatgaaaagggtgtgtcttgagtatttaatagttaattacccataaatatactacagtagaataaggaataaaaccagtgatctgtctactatagtaactaggtttctttcttggtaatacttagggaacatatgagggttccctgtgggttgttatttattatataaaatagttgctctggtagttccataatagagacctgtcagtgccattcagcagagaaaaatcataaacacagctgctgtttttgtgtggcttgtggttttggttttgttttcatttgaacttttttatgcaggcatgtcatcatttaaaagtagtcatttggcgttttcccttgcattcttcagattttttgtaggcttaaaaaaatttaagtcacttctataattgttcatacagattgatccatctggtctttttactagccaatgaaatttttgacatgtaggaaaaaggacaattattttaaattctataatttcagtggatctcttttataagtttgaagaaaaatagtttcaactatcaaaaaatatttttcttatattcttcattgtttcctgttaatttctgtattttcgtgggggctaaaaaggctaataatttctgctattcctactcttcacatcctttgtgtgttataactctgaagcataccataattatttgtttgcaaccaagaattggtacagcataaatgtctaatcaaattaggccctcttgctctctttaagtcacactggctatgaggtggaggtggattatagggggcaggcatcaattcagggagaccatttaggcctttgcagtggtccagacaagaaatattgatggccggcccaaggtactaagagtggtatttgaagaatgtagacagaataaagagagaattaacgaagcttgttgatgggttagatgttgattggtgtgagatggagagaggagtcagggatggcaggtttcctctcttctttcttgttgtgtttgttcaactcttgcttatcttttttttttctttgttttttgatggagtctcgctctgtcgcccagactggagtgcagtggagcgatctcggctcactgcaacctctgcctcccaggtttaagtgattctcctgcttcagcctcctgagtaggtgggattacaggtgcatgccaccacgcccagctaacttttgtatttttagtagagacggggtttcaccgtgttggtcaggctggtctcaaactcctgacctcgtgatctgcccacctcagcctcccaaaatgctaggattacaggtgtgagccaccatgcccagccacttatctttaaaggattaagtttatgtttcctactatgggaaaccatcccaccccaaacttgatgaccgcattatgtgcttttatagaacctggcacttctccaggatagcatttattctgttttgtaagtgtgaatgtaattaccctacacacagcatacacataatcttcatattctttgccttgtcttgtgaaggcaagggccatgtctatcttattcgtcattagattcccacatccaacatagtcctggggacagcaccaatgcacttttggtgcataagcaaatagtgtcatttatagctcttacctacaatatctgatagactaatcaaatatagtaggttatctgggcctttttgattcatgtctctagcttaactttcatttttttcttatttggtatctctcactttgccttttgatatactcttacagtttcgctcactgagtaaaagaaaatataaacagcaagaagtaaacttgtgttttatggattttgataacatcttctaaaagaccccccaagattgttgatgtctaaaaaaattaagggccttcaactcataataatacttaatagttcttaaaatattacaaactgattggaacattgcactaacagagagagtcatggatcttatttatgtgtagattcatttcagtcagaagtattaggactggtttatttgagaaagtaaatagatcattacaaattcatcgtcatacttcaaggaaaattcattgatgacactttctaatattgtgactatatacctaaatcatactttaagaacagaatgtctaagatatcacctagataagaatcaatacaaaaagaaaaaggaaaa

SEQ ID NO: 17 - DNA, 6155 bp, Homo Sapiens; identical to SEQ ID NO: 16

SEQ ID NO: 18 - DNA, 6239 bp, Homo Sapiens
ccaatatttattaaatgctaataatgtgcaatggagaaggttaacagcagggtatttcatcaacctgataaaaggctataatctggatcttggattcaaattccaattacatttgtatttcacttaggaaacgacaatcacaaaaaggggacttagcatttcaaatggagagtcagaaggtcaaacaagcctacagcagtgacagaagtagttcccacatctaaacaacttcagactagtaaaaaccttatcagacaggagaaatcttatcagatgggggtatcttttcaattgacatgtcctaaacgtaaaatacttttttcagtccacattttagataagctaatcttgttaaaagggccaaaggatgtgatgggaaattctgagcctctcataatgagacatgttcactggcacacttcccagtgagtgcaacagcaatgcgatgtgtggtggagaaatgatgctactggcaatactttctctccattactttttagggccttatttctttcaggctcgacctaatttaaattctgtcttggctcctaagcctgtgagttcacattaattttcacagttgtattcagcattttgctcctaaacaaagtgaaaacattaaagattcaattaaaatctctttaaaaagaattttaactaatctttctatctagctacaatacttggtaaaacataccttctatggcatttctaaaattatgattgaaatttgaatacatttccgaaacagacttatatttactttataacagtaagatacagaaaattctgcaagtattaattacactaaggaacgcagagtgttttcctaaaaacagctgaaaagagctacagtgtgtctagtagaatctcagtctacaatcttaataactctagttctatgacctcaagaattggcttcacctcgaaatactttctcacctgaaaaaaggaataacaccatcttttcctccctcaatgtggctgctcaaataaaatgaaataatatatgtagcacagtacctgccacgaagggttcaataaattattagtttactttcttcagtcaacacaaaagacacattcacaagattcagatttaaggaaatctatttccacaagtcctcaccagcacaaaatgctatcgctagtttgctctaataaaaactaccatcagccgggcgcggtggctcacgcctgtaatcccagcactttgggaggccgaggcgggcggatcacgagatcaatacatcgataccatcctggccaacatggtgaaaccctgtctctactaaaaaatacaaaaatgggccgggtgtggtgtcgcgcgcctgtagtcccagctactcgggaagctgaggaagaagaatcgcttgaacccaggaggcggaggttgaagtgaaccgaggtcacgccactgcacttcagcctggagacagagcgagaccccgtctcggggggaaaaaaaaaaccgtcactatcatttcacttttctaagggacctgaatcaagatgagggagtctacgtgtgattctgcaagaactccattaaggctgcatacataatgaccactaaatcattaacaggagtccatagcaattgggctaaaacatctgggagcatttatgctggtaaaagagctcacttgggggctaaaaaaaaagtcaaattaggcccaactctaaacggatctttaacaaatcaagagagtaatgttagtttatccttcctgaaacgccagcagtacgatattaaaatccacttagaagtaaaaacttcaagacggaaatatgccaccaacactggcgtcagtaatccattttagaaagcctgcgcggagaccaccattagcaccgctgaggatatttaatgaaagccgttggctgcaaacagaggcgaagagagaaaaacgattatttcggtgttctgcacacacgcggaggcaaaacgctttcaggacctcagcagccaccgccgccaacaccgacaagcatctgatggaattcacagttttacaatcgaaagtccaaaagaaggccatgatactagcaaattgaggggtggggacccttccgttgccttcccgagggtccagactttaaaggccgcgctgcgcccggggccaagggtccactagtaccggcctacgccccccgcgccactccctgagccccttcccgagcgaccgaaggcccgggaaccgcgagcaacaacacctaaacctcaaccggcccggggccgcgcccgagccctggcgcgcggaccgcggtgaagtccgggttcgaggtcgccgcggcgcctgaggccgaggcgcgggcgaggccgaggctgcgtccgctgcggccccgggcggtgggggggccgggcgtggccggtcgcggacactcaccacaccatgccgtaggcgccctcgccgatgtacgagaggttggtgtagcgcggccccacgtcgaacacctgcccgcggaccatctccgggcccgcgcccgccgccgccgccgccgccatgttggctgccgggccgccgccgcctccgccgcgctgagctcgacgctcggcggccgccgctcagctcttgtcgcccctcccgcagggactgcgccgccgccggtgcagccgccgacgctgaccgggaggaggaaggaagacgccgagcgggagagctgaagagccgacagccactcggaccgattgcctgcctgcctgccagactgacgggcgggccggcgggcgggcggagggaggggcgcgcgccgaggagggtgccggggcggggacaagaagtgtgcatgcggattggttcctcgcggctgggggcggggccgcgcgggccggcggaagcggcgggcttcgggaggggcactgcgacggcgttgactgagggggcgccactaggcgcggtcacgtgcattcgcggtgcattcgcgggggcgtcggtgcgggtcgcgtctcttaagacacccagggagacagacgtggggcagaactcatgggctgaagtgagagatggctggggcccaggcgagcgaccgagcagggtccgaacagagccagcgagggaccccgggctgtgcttgaggcccgacgacgcgccatatcccggcagcgccgcagctcaggcctctgcgaatctgtggtccacacgctgataaacttagaggcctctgcactggggcagaaaccgaaaggcatgacccagaccgagaaagatatttgcatactgagaaagtgtgaaacacaattgtcgagactaaaaggagacactgagaggatacgccaatcaggttagttcagatgtttgttgagcacactccatgttcctggggatccacccttatagaagttaccttttagagagaggagacagacaaatacgtgtaatgctcaagttgtgataagtacgatgaagaagtacaaagcagaagggagggcgcggtgtctcacgcctatcatcccagcactttgggaggccgaggcgggcggatcacttgaggtcaggagtttgagaccaggtctctactaaaaatacaaaaattaagtccgggcgaggtggctcacgcctgtaatcctagcactttgggaggccgaggcgggcggatcacgaggtcaggagttcaagaccagcctggccaacatggcgaaaccctgtctctactaaaaatacaaaaattagccgggcgcagtggtgggcgcctgtcatcccagctacttgggaggctgaggcaggaggacaaagcagagagtaagggattagggggtggtgggtcgaaacacatgagagatacatttgcgttcagagacagaccgagattggtacagataggcagaaatgctgacagagcaggtaatgaaatagaaatgcaaagatagagtcactaaaaccaaaacatcgaggtttagagaaaaagagacacaccaggttaagaaacagtcacaaacaacagaggttgaaaaaataaaaattagagtcctgaagcaggtggataccaaggaaagctaagacaacgagacggacaatgacccaggcactgcttctgaaccttttcccctgccatgtttggagggagaaggaagagcggcagaccctatatcctctttgttcaactcttccaagtttaaaaccatcaactcttgacttctagacatcaacaaagattaattagtcaatctcaaaggagaataaacaaagttttttgtttgtttgtttgtttaactctctggtggaagctggtgtggtggctcacgcctgtaatcccaacttgggcccaagaattcaagactagcctgggcaacacagcaataccctgtctctaaaacagagaaacaaacaaacaaaaaatcctgtgggggaaaaaggatgtgacacatgagaaaaggaataaactgctccagccaaaatttactccttcaaaatatatttagcccatgaagcaggacccaattttagaaaatacctaattcttgagttaatgggtgcagcacaccagcatggcacatgtatacatatgtaactaaccagcacattgtgcacatgtaccctaaaacttaaagtataataataataataaaaagaaaatacctaattcttattctcaaaagaggacattgcatatttttttaaaaaacaggccaagataaatggagtaccatgaaattaaaaccacaataaccggccgggcgcggtggctcacgcctgtaatcccagcactttgggaggcggaggagggcagattgcccaagctcagaaactggggaccagcctgggcaacatggtgaaaccccgtctctactaagatacaaaaaattagctgggcctgccggtgtgcctgtagtcccagctactcgggaggctgaggcaggagaattgcttgaactcgggaggcagaggttacagtgagctgagatcgcgccactgcactccagcctgggccacagagtgagactccgtctcaaaaaaaaaaaaaaaaaagaggccgggtgcggtggctcacgcttgtaatcccagcactttgggaggccgagatgggcggatcacaaggtcaggagatcgagaccatcctggctaacatggtgaaacctcgtctctactaaaaatccaaaaaaaaaaaaaaaaaaaattagccgggcgtggtggcgagtgcctgtagtcccacctactccggaggctgagacaggagaatggcgtcaacccgggaggcggagcttgcagtgagccgaggtcacgccactgcactccaacctgggtgacagagcaagactccgtctcaaaaaaaaaaaaaaaaaaagtagacttgatgcagaagagtacatcagcaatatagaagataaacatgagaaaattttcaagaatatagaacaaagtgatggaatcctgtaagagaagataatggggatggacagcatctagggattctaactctaggcatccccacaggaagacagagcaaatcggttagagcgaataatcaaaattacaataggagaaaagtttccttaggttgcaaaaaggtctgaggtggaggtgggaaatagagtgggttcactgagattgagaaaaattaagaagaaaccaacaacacataatctgggaaaatcattaagtttcagggataaagaacagacactaatagacccaattagggaaaaaaatgttatttataaaaaagctggccagcaggcacggtggctcgtgcctgtaatcccagcactttgggaggccgaggcgggcggatcatgaggtcaggagttctagaccagcctggccaacatggcgaaaccccatctcttctaaaaatacaaaaattagctgggtgtggtggtgtgtgcctgtaattccagcttcttgggaggctgaggcaggagaattgcttgaatccaggaggtggaggttgcagtgagccgagatcgtgccactgcactccagtctgggcaacagagtgagattccgtctccgggggaaaaaaagatggctgggcgaggtggctcacacctgtaatcccagcactttgggaggctgaggcgggtggatcacctgaggtcaggagttcgagaccagcctggccaacgtggtaaaaccttgtctctactgaaaatacaaaaattagccgagcatgatggctggcacctgtaatcctagctacttgggaggctaaggcaggagaatcgcttgaacccggaaggcataggttgcagtgagccgagattgcaccattgcactccagtctgggtgataagaacg

SEQ ID NO: 19 - DNA, 6178 bp, Homo Sapiens
gactcccttttaatttaaaaggattattttttgcaagactcttcttccccatttaacggcgcttatatgtttgttatatatcaacgaaaaaacacatgccacaaagcgtttatgaattcaatatcaatttaaaatgaatacatgttactaattacatagagacttaatgtatgtttaaaatagtatatatatgtgtgtgtgtgtgtgtgtgtgtgtgtgtgtgtgcgcgcgctttagtctatagataattcgatttaccaaccccttggaaaggaatcccagtacatctcaaactgggaattgctgacattgctgatgtattaaagtgacttcctaattggaaaattctatatgacccggttattttcttcccaaaccattctatctttaaataagctttgtgcctttaagaggaattatgattataccgcatactatgtatatatatttaaatgaacaattaatgaaaattgttcccaattatttaaaaaaaaaaaagaagaagaatactattttgcggaggcagtgcgtgcaaatcctctgatgtgtcatggtggagtcattctcaatatctaatggctagaaaattgagtaaacatagaactaataaagaaaagatttcttcacatcatataaaatcagcctacaaaagagtacattgctgtggaaaattttgagacaagcacagggatttttttcacagtgatgatatctcatgcttgcaggcattagttacaaagttaaaaaattcctcttcacatatcaataccatagaagtgactgttgtcaattattgtcagcatgacccattctccccatcacatccccaccatctttcttttcagcataaaacacactatatttaaagaaacaagccattaatcaggattaaaaactcttcctctcactctttgcaagtacctgatagaaaatgctcccagttgacattccattcgtttgaattctgcttccattcctcaaaaacactgggactatttttttttccagatccaatttgtaggacaaaagccattatataaccataaaagtcactttacctctttctaatttatgaaacttgtgatctctaccaatgctccataaaactataacccatttctaatatcattttccttggttccatttcttcttttccaaaataagctattaagtgagaagtcactcaatgcctgctttcttgatagatttggaagctagacttaggaacccagcctacctctatcctactgttcattgattcatttaacttacaaatattgaccaactaccaagtaccaccatcttaagcatcaacgtttgcatataatggtaggtatttttagtgagcactaactcggtactaggcactctactaagcactttcattattttcctatgcgctggatactattattatccctgttttacgtatgaggaaattgagacagattaaataacttgtccaggaattcacacacagacagtttaaatcttaacccctgataacatgatgaagtatttgtttcttttttttttttttttgagacggagtttcgctctgtcgcccaggctggagtgcagtggcgcgatctcgactcactgcaagctccgcctcccgggttcacgccattctcctgcctcagcctcccgtgtagctgggactacaggcgcgcgccaccatgcccggctaatttttgtatttttagtagagacggggtttcactgtgttatccaggatggtctcgatctcctgacctcgtgatccgctcgtctcggcctcccaaagtgctgggattacaggcgtgagccaccgcgcccggccgaagtatttgtttctaacaagagcattctggacattaaagggccttagagtatgagagaaaaaagccagaaaaaaaaaaggaatagtaataataattttttaaaaagtagaaataaaaaggtaaggagttaacatccattagattccattttctattcaaatatgtatatttacatacagtactgctgaattgactcacagttcttaggtcctatagaggagtgcagtgaaaaggaagacaatttacacagtacagagctgaacataggacttacaaacaaaaaaaaagtcaaggaatacaaagtagctttcccaggtgtaaagtaccgggtctagaattctatgaggctagggagaagataaacgacaaaagctataagagatcagaatgaaaagagatccacaagcctaagaagcccaggcccttgaggagaaccatgaatttgagcaggatttcactaattcctttaaaaagtagccattgcctcaaagtacgactccatcagcataggcaggaaagtgggagtgaggaaaggcttagagttttccagcctggctggggtcagacaatttgcctggggaaatagtgggagctgaggttgaaaagaccgattggcttcacgtttgtggcaggccttgtccaaaaagcaataggaagtcgttgaaaggttttgtgcaggggagcgacaggattaaggcactacttagtaggaagtcatatcaaaagcagcaacctgacaaatggcaaatacgacagaaggaaaaaaaataacaggaattttcttcacaatgactcgactttgaggtaataaatgcctgagccacattggaagcaggggtctcagaaggaaggcgcagatgggaaaggcttttctgggcggtggcgtttcaatgcaaggagggcgcttgaatcactgacagacttcaagttaagggagttttcgtggctgaggttagtaagtcacacgcacagctctccaaaggcatgtatggggaacgccagccttggctaaaagactgattcaagttatgtccgtcaccctgagcaaccaaaaccacccactacagggcaggtgaccccacaaagcaaaccaagccatctggtccacgctccccacctcccggagggagatggaaaagtttcgggagtagtccccggccaatcggaaagacattttttcattcctcaaccactactctcaggtgctccagggagggaggatgacttcctgacggtcctcctgccgctcctccctcgggccaattatgaaactctgggcactcttgacctcaccccgttagggcccgggaggggctccctagtataaagttcgcagcaccagacagttgagctcacttgcctgatatttccagtgtcagagggacacagccaacgtggggtcccttctaggctgacagccgctctccagccactgccgcgagcccgtctgctcccgccctgcccgtgcactctccgcagccgccctccgccaagccccagcgcccgctcccatcgccgatgaccgcggggaggaggatggagatgctctgtgccggcagggtccctgcgctgctgctctgcctgggtaagttctccccctctggcttccggccgccccaaagaggagacaaataaggaaggctcctgtgcatttgtcattcgacaagtacggagttgtctccaggttcaagtgtgctctatttaaaattacgtcttgttttgtgagtctgtcttcccctatggtgggactggggtgggggggactggggatcgatgttaaaatgctttttattggtgaattaattattggcatatatgttatgcatggattgaaatatctccttattaaacaaaataaaaagttgttgaaaaagctttttttttttttttgaaaagttgccagtcctagaaatctaaaggcctggaacgcactgttaacatttcatgtcttgttcctttttgttggagagtggggaatagaaactagcgtaagaaattttttggaggggggaaaaagcttttctcctctgtcttgcgctcagttttctaaaacctagcctggtttagctttcccggaggagctggtatgcgccagtgccagttggctgagctccagacacaagagaaataaaacactggtcgagggtatctggagcagaagggccctgggcaggtcctggcgctccccaccgcccttcgcccctacacctgctgcttgcgtttttccctgcagcctcccaagcagcctctggagcaagcgttctgcacttgctgctaattgcactccatagcctgtgatcgctgagggtatttaaatgccagtcttcctatttgagatgatttagttcaaggggaaaaattttctaaatagcctttctgttaaaaaaaaattacttctttccaattccttaaacttcagtttaaggaatttgaaagagtttgaagtcgtatatgaatatcttaataaaaaaataaaagttaccaccagtctcatattctccctggagttggaatgaggctgattccccagacactctaactctacctgtgaaggatgtgactgttaaattattattttggcacaccttatctcaggggttgagagacctaatgaaatgcatactatgcataattgaaacttacaagtctaagtccaggaacacaagtggaaactagatatgtggtttctgccaaaactgagctaagaaagacttgctagaagattctcagtaaacaatgtggctttgctgtctttgttttgaaaagaattaaattagaaaggtgacagtcttcctagagttagaaattaacctcgaggtcagaataacttagcacttattattttccccacatgtaaggttgcatctgaacaatgcacatgtctgttctgggtgtttcattgaatattctaatttgagacagccagagcctgtgaataacctggttactacccactagtgtgtgtgttgtgtgtgtgtttgttgtcatgaaagtgcttacctccttcattgcattacttaattatagttcatctatttcgtcagctgccaagcccatttccaaatgagttaggtcagtttctgttttcccagtttgtttggatatttctctgccactaggaaagttcctgtttcaagttctgtattatatctctaaactctattcagttatgcagagcccatagccttattttggcaagaccacctgttatttctgaaattgccttctttcccccaaacaaaatatttcctaaaaatacttttcccaaatcttgtccttcccccagcaaaaaagagcgagacatttattttaaattttagcatacatgttataactgctttatgtagttatgactagggaataaagttccagcctccacccttaacacatacagatttaaattgctatgcacaatcatttggttacttttaaattttacacttgtttaatattgaggctcttgttttataaattggggaactgtgacccaagttcacatagaaaaatagtgacaaagtgagagtccacacttgggcttgctagcatttttggcctactgaacattaagtagaagagttgaaataccggataacatttttttaaataatctataattttagagcagaattttgtcttttttatcttgtgatttttctaaagagaggaggataaatttttatgttgaattctgcagttatgttcaggggctttctatttaacatcaaacatttttattcatgcctacatgggtttttgaatatgttcctgaatgacatctccaagataatttagtcgtacttcatcaatgagagagaattaagcagaagaaatattcttttttgaaaatatgaggagcataaatctcaatgagacaataggcttgtctttgatcatttctgttgactctgagagtttatgagttacctgagtcttggcacaacctgagatgacaaatcttgtcagaaaacgtgatgacaggcctttcctgtctggattttgaccaggtaccctcaccaccttctgcacagtcttgccatgtgagcagcttgggtaattggggtgtctgattcagcactaagacccaaatccaggagttgagaagaaaactaacagttactaaatgcctactgtgtggcagccatgttgtgtattaggtgctttaaatacatcatcacctctacttcttaaaataactgtgtgaggtagatttgattagcccagtgaagtcaagtaccttacaaagactcagagatagtaaatggccaggtcactctgtgataatgaggaaagagccaatgagattcagggttagcaggagcataataaacatagcagattctaatagagaagttcca

SEQ ID NO: 20 - DNA, 6134 bp, Homo Sapiens
ccctagttagaatgcgagtgtcacagacacagctaagctcagcgctgaccaatactttgtcccagaagaattcccacaaggtttcctgtagaatgatcttgtgcctagcccaggagagccagggttctccctgactccgccctggagtccccttaagcacttaaaccatctgatggggacaaatggagaggacagatgagggagcagggtggagcgttttagcagaatgctccttacccagaacccgctgctattctgcagccagcaaggatgtggggctaagaactaaggccagggccttacaggaaaaaggtaaagggggaggggtgggaatttaagctcattttcttccccaagtatccaaaggtctcctggatggagaagagcactggagtaaaaaccccagtacaaaccttactggggacagtgggcaaccttgtcgggttagtaaaaacaaatggtgtgggccctggaaaatgagggctggaggctgtgaataaagcagtggatgtgtttgttcagtacaccaacgggaagaagtacccagatgggaggagtactaggggcaggagaaatgccagacagactctagtgccagggcaagaaggaagatcattttgtttgcagaacagggagggcacagggatggtgctaacttgttcttgtgatggctctgagctcctacctaacaatgagaaagcttgctccttcttcccttcctggatgacccaggagccctgggctgggatgcagtgacctcatttccagccccttcccttctggtgatgaacctccctatcttcactcagaaaacagacttggattagaggcactgcacagcccttccaggattctaaaggaggaagagtttctttttctgtttccaaagctgcctgctggaagaggatttcaacagccatcccagtcggatgcacagcaggaccatggaatttcccttctgcaccatagggacccaccctccactctaccactgtccataaaaactgatggttttttttttgagacagagtctcgctctgttttccaggctggagtgcagtggtgcgatcttggctcattgcaatctctgcctcctgggttcaagcaattctctgcttcagcctcccaagtagctgggattacaggtgcctgccaccacaactggctaattttttgtatttttagtcgagacggggtttcaccattttggccaggctggtcttgaactcctgacctcatgatccacccacctcggctttccaaagtgctgggattaaaggtgtgagccactgcacctggcctaaaactgatgtttttttctttttttttaacatataacttgggacttctcagcctcctattctttctttttttttttttttttttttgagacagagtcttgctctctcatccaggctggaatgcagtggcccagtctcgactcactgcaacctctgtcttctgggttcaagtgatactcctgcctcagcctccccagtagctgggattacaggcacacaccaccatggccagataatttttttgtattttcagtacagacggggttttgctatgttggcctggcaggtctcgaactcttggcctcaagtgatctgcctgccttggcctcccaaaatgctgagattacaggcatgagtcaccaagcccagccttctttcttttttttgagacagagcctcaccctgtcacccaggttggagtgcagtggcacgatcttggctcactgcaacctttgcctcccggttgaagtgattcagtctcccaagtagctgggactacagtcacacaccaccatgcccggctaatttttgtatgtttagtagagatagggtttcaccatgttggccaggctgacctcgaattcctgattgcaaatgatccacctgccttggcctcccaaagcattggcattagaggtgtgagccaccgtacttggcttccttttctatttttgagacagagtctcactctgtcactcaggctggagtgcagtggcacgatcttggctcactgcaacctctgcctcccaggttcaagtgatccttctgcctcaccctcccaagtagctgggattacaggtgtgcacctccgtggctagccctccttttcaattggttagtgtcttgtggttttcccacctttccacagtggaaaatggctcaggactgactgacatgaagacaagcccaggggtctacactcaactcaacccttgcacccaagctctgggctaagattttggcgtgctgagcaccacccattttgtaaggaattttgtaaaattttatctgaagcatcactcacaactccactttctttacttaaataaggatttccgccccatttctgccaggcatactgagcttcacagtccctgtttctttttcctggtgcctaggcctggttctctgagcctggtggtcacaccaatggcatctggcacacagttctccgataatggggatacctaggaggttccgagacaccttacagtcctgggttagtaacctggatctctttttccacctctttaggcattttataatctagctttcccccttcctgtgggtaaagtgctcctgaatgcttatggtccaaaacaagacttctttcctatctattcccaaatctttctccagatccaccctagaggaagggaacagaatcttccacattccagcagctggtgacaggccagaacagggaagaggtgagggctcagctggctccatacaggagtgcagatggaggagcaggatctctctctgcctctcaagttttcctaaacatacttctcaattcctggcgaggactcttccctctccacatcctcccctagtctccccaaggagggagcaggagcattcgaacgcggaaatcgaggtgctagtccaaactgctcggtcggctttagtcatagctggataatgcccggctcaggtctaccacaagccatacagctgctttttccgtgttcaacctgtctgtgacagaaaccaagggggccccggcacccagcatctaggcggtggaatcggggtcttacgcacggttccgcgggcaggtccccggccaggacccgcggggagccacgtagccaggagggtggggctgcccaccgacccaggacgcggcaacggaccggggagggcggagctccagcgaccgcttcccctcccgcccgccggcaccccctggctcccacctggtcccggcgcggcctgcgagctagcgaggttcgcgcggtgaagtactgctcgagctccgagtccgagtcctcttggctgcagtagccactgctcgtcgtgctgctccaggtcatttcgaaagaaggcgcctccgcctcgcccatagccgtacccgcccgtcccccagtcctgcgcgtccgtagccgccaaccaccgccccggtcgcgtgcgtgcgtgtacgcgtgtcagtgtgcgcgtgcgcccgggccagagccgcgccgcaaccgttaagactgaaacgtagatcgccgggatctagctcttgtctcattggggcaggaacgccggggcggggacacgcacgcttcgcccccaggaatgacctcatcgctccggagctccactcacagaccccacctaccacagggaacgggggcgggtgccagcgtccgggcaagcgcacaagagtggcctctggccggaggcgagggcgggaaggtgcgggaagtgcgcgtgcgcggagcctgggtcagcctgggcccgggtccgcttgcagcgggtggagtacttgcggagccggcaatccaggctcccctcccagcccccgcgcagaattagcctctctgtgccgccgggaaatcggcaattagaacgctccttgcgcgcggcacccaggcagccctcgagaatgcctgcactgtggcctgcccatcctcgcccttcccatacgccctcggccccgcgctcaccacgttcgtgtcccgctccaccgcgggttcccagcccaggtcccggggcccgcaacagtccaggcagacgagcgcgcggcagcggtagtggcaggtgaacttgcaatctgcagagaggcctggcggtgaggcggaggagctccaggtcggggaaatgtcccggagattgaagggaagccccagggagagggccgctgctcgccaggctccgcaggcccgacctatctcagtgggttacctcacactgctacgcggactctaatgttggccacctgggcgtctggaaaccggccggaaggccacaggcagagaggcctgctcaacagttggatctctatcgcctagcacagaacttcccctttcctcattggcaattaaaaaaacaacaacaaaaaactgcgtcttgcttttgtcacccaggctggagtgcaatggcgcgatttcggctcaccgcaacctccgcctcctgggttcaagcgattcttctgcctcagcctcctgagtacctaggattacaggcgcccgccaccatgcccagctaatttttgtatttttagtagagacggggtttcaccatgttagccaggctggtctcaaactcctgatctcaggtgatccacccgcctcggccttccaaagtgctgggactacaggcttgagccaccgcacccggcccttcactgggaacgtatatggaatacatctgcccatttacttgaaggaaaaactaaacacctttaacctacgtctgccctgtggttgtcacctgtctctactcccctcagaccaagacactggtctctatacactctaatccttcgccttcactctcccctctacccactccagccaggcttgcctcttcctccaggaaactgcccgggacagggtcctcagcgatctgtgtactaccaaatggaatccagtgttccattctccattctcaccccctcagcatcatttgaagcttgctccctttgactcccaggggctacactctcccagttttcctcctaccccctgcagctcctgctcagctcctttgcagattctgactcaacttccatatctcacgatgaagtctgggctcagtcctgatcactggcctggtctgtctacattcatctgccccagatccacggctgaaacactgacctaaaccctcagactagatcctccgtgccagtaccttcactaggatgtctaaaagacgtttcaagtgaacatggccaaaatttaattcccttttcttcagcctcactgctacacttgcccagcttcctctttgcagcaaaaatggccactaggctcccagttactggagacaaaagcccaaacttatctttgatttctcccttgtctctacctctgataaacatgcccaaatcatcctgcttcttatctccatggctactttatttctctttgagaacgctgcaatgtcccagccttgttctttttttttttttttttttttttgagacagagtctcactctgtcgccaaggctggagggcagtggcacgatctcggctcactgcaacctccgcctcctgtgttcaagcaattctcccacctcagcctcccgagtagctgggattacaggcacccgccactacgcctggctcatttttttttattttttagtagacatgaggtttcaccatgttggccaggctggtcttgaactcctgacctcaggtgatccacccgcctccgccttccgaagtgctgggattacaggcatgagccaccgcgctcggccccttgttcattctttgcattctgtcacaactttgtgctccccccagctgaatttgtgatgtcctcttgtaccggatgagagggtctccatgcacacacagacctgggacactatccatccacaagttcctaaataggccagagcagtgatgctcaacccagactccatgttacaataatttggggagtttttaaaatttactgatgcctagggtccactcccagcagttgattcaacaggtctgcggtgggatccaggctagcggggaggactgtaaaagcacccctggtgattccagctggtgtctacccaggggagagcaacctttgcttgctggcgattcccaggggtgcagaaggactgctgggtgtgtggctgcgtgcatattttagcatctgattcactgggtcag

SEQ ID NO: 21 - DNA, 6210 bp, Homo Sapiens
gggcccgcaacagtccaggcagacgagcgcgcggcagcggtagtggcaggtgaacttgcaatctgcagagaggcctggcggtgaggcggaggagctccaggtcggggaaatgtcccggagattgaagggaagccccagggagagggccgctgctcgccaggctccgcaggcccgacctatctcagtgggttacctcacactgctacgcggactctaatgttggccacctgggcgtctggaaaccggccggaaggccacaggcagagaggcctgctcaacagttggatctctatcgcctagcacagaacttcccctttcctcattggcaattaaaaaaacaacaacaaaaaactgcgtcttgcttttgtcacccaggctggagtgcaatggcgcgatttcggctcaccgcaacctccgcctcctgggttcaagcgattcttctgcctcagcctcctgagtacctaggattacaggcgcccgccaccatgcccagctaatttttgtatttttagtagagacggggtttcaccatgttagccaggctggtctcaaactcctgatctcaggtgatccacccgcctcggccttccaaagtgctgggactacaggcttgagccaccgcacccggcccttcactgggaacgtatatggaatacatctgcccatttacttgaaggaaaaactaaacacctttaacctacgtctgccctgtggttgtcacctgtctctactcccctcagaccaagacactggtctctatacactctaatccttcgccttcactctcccctctacccactccagccaggcttgcctcttcctccaggaaactgcccgggacagggtcctcagcgatctgtgtactaccaaatggaatccagtgttccattctccattctcaccccctcagcatcatttgaagcttgctccctttgactcccaggggctacactctcccagttttcctcctaccccctgcagctcctgctcagctcctttgcagattctgactcaacttccatatctcacgatgaagtctgggctcagtcctgatcactggcctggtctgtctacattcatctgccccagatccacggctgaaacactgacctaaaccctcagactagatcctccgtgccagtaccttcactaggatgtctaaaagacgtttcaagtgaacatggccaaaatttaattcccttttcttcagcctcactgctacacttgcccagcttcctctttgcagcaaaaatggccactaggctcccagttactggagacaaaagcccaaacttatctttgatttctcccttgtctctacctctgataaacatgcccaaatcatcctgcttcttatctccatggctactttatttctctttgagaacgctgcaatgtcccagccttgttctttttttttttttttttttttttgagacagagtctcactctgtcgccaaggctggagggcagtggcacgatctcggctcactgcaacctccgcctcctgtgttcaagcaattctcccacctcagcctcccgagtagctgggattacaggcacccgccactacgcctggctcatttttttttattttttagtagacatgaggtttcaccatgttggccaggctggtcttgaactcctgacctcaggtgatccacccgcctccgccttccgaagtgctgggattacaggcatgagccaccgcgctcggccccttgttcattctttgcattctgtcacaactttgtgctccccccagctgaatttgtgatgtcctcttgtaccggatgagagggtctccatgcacacacagacctgggacactatccatccacaagttcctaaataggccagagcagtgatgctcaacccagactccatgttacaataatttggggagtttttaaaatttactgatgcctagggtccactcccagcagttgattcaacaggtctgcggtgggatccaggctagcggggaggactgtaaaagcacccctggtgattccagctggtgtctacccaggggagagcaacctttgcttgctggcgattcccaggggtgcagaaggactgctgggtgtgtggctgcgtgcatattttagcatctgattcactgggtcagaaaagggtgtttgctaaataaagactcaacaaaactcctgcttgcagggggcccaccaaaggttctaaatttttccaggctccctcccataggtggtaatttcccttcaccctaaaggttctggagggggtcatgagtgtttgagaagaggcaagcctgggaagatggactccgaggacagtaggcacaaaccctttctcaagaagggccaaggcattttaaagataagaaacttaaaatcagcgtatttttacatataagcagccacctctgctcatctgtggcccagatacgagtggagtgcgacaagggataaaccattttcgcgcactcttcagcgatggggcgaaagtaacggacctagtcctcgggagctgtccccgccgaccccctctgccgcgacttgacccgcggcgactgcgctgccccttggctgccccttccgctctcgtaggcgcgcggggccactactcacgcgcgcactgcaggcctttgcgcacgacgccccagatgaagtcgccacagaggtcgcaccacgtgtgcgtggcgggccccgcgggctggaagcggtggccacggccagggaccagctgccgtgtggggttgcacgcggtgccccgcgcgatgcgcagcgcgttggcacgctccagccgggtgcggcccttcccagcgcgcccagcgggtgccagctcccgcagctcaatgagctcaggctcccccgacatggcccggttgggcccgtgcttcgctggctttgggcgctagcaagcgcgggccgggcggggccacagggcgggccccgacttcagcgcctcccccaggatccagactgggcggcgggaaggagctgaggagagccgcgcaatggaaacctgggtgcagggactgtggggcccgaaggcggggctgggcgcgctctcgcagagccccccccgccttgcccttccttccctccttcgtcccctcctcacaccccaccccggacggccacaacgacggcgaccgcaaagcaccacgcggagatacccgtgtttctggaggccagctttactgtgctagaggaagagggtccccacatccggccctggccctcctggtccggtttgctgaagcaacacacttggcctacccactgggtggggcaggaagtctcgagccttcacttggggtgaggaggagggagatcggtcagcagctttaccgcccgctctgctctccactgcggagactggggctccggcagaggctggaccgtgatcttgaggttcaggggtgcattctgggtggattcccttggcatgggtggtcggccctcagcaactgcagccctcatttggctctgtcaccctgggctgccaggacacaagtctttccatgcttttcccagtgcttgacttggcactccctgcaggcaggtgggtattgaggatggcaatgcatgtgggggatgtgggagtagggcttagaggtccaaggttctaggataccctcacctgcagcaataccactcattctggcatcgtgagcagcgcttagaagcctctgcactgcagtaagcacagcggggccgctctggagccactgcctctagcacatccagcctgtaggtctcagcccacctgggggaaagtcaggaaggtctgactggccctggaaggtgggggcaccccacccacatccatgcctcctgcatcccctccaccctccctgccatttccacaggccttaccttcgcgcctgcagccgcaggtcctgctctgaggggctgaacacatgctggagctggtgcttggcaattgcctgccacttgcctctgttttctcgctccagccgctcccagatttctgggatctaggagagagaagtggagagtggcaggaaggtgctggtaaagtgggacagtggtcctgagcagctaactttccagtgcctacctgttccaacaccaggtccttcttaggaggctgggtttcagttagggtcagatgggccaggaaactctgcaagtgggccaggttgggcagctggtccagcagtgtgtctgtgaggaaggcccgaagctgcaagggtgtccagtggaggccagtgtgatgcaggtgctggccagggggccaaggaaaaggaaggggctgggttgggctgagaatgcctgtgggggcccatgtcccactagctggtgtgtcacctgaggcccaaggactgaaaagagcactggggttgaggtgggtgggcaaagataaacagcagggacgcagtcggggtaggatggggagggcggtactggggctgtgggggctggtgcggagggagtctgaccttgagtagccgtcccttggcaaaacttgtgaggcagtagcgcgcctgagcctcagggcttagcagcaggttgtacagggcgatccacacttgcccgtccaacttgctcagcttttgctgctctgagggggccacagtatgccaacggctgccctcgaactgctgcagcttgcctggggagaggaaccagcacactgggtgcagacgttgaattctcttcaagtgagccagctgtgggggctgggagactgaccactgcctgggaatgggagaacctgggctgcaggacttgcccaggctatagggctgctgaccccagagcagggtgagcctcagtagtggacacatgggcctggcctgctgcagagctcaggtctaggccaaccttggctgaggcatcctggtatcctcagtgggcttggggacagggtttgtcttcgtgtgtgcaagctgcccccctctatcaaaaagataccctgaagcagtagcctggggcttaggctggtgggggaggaccctacctccttcccgccggctccagggactatgctccagcagttccaccaggaggcagggcaggttgtgtgtgctaagcatacggctcaaggtgctgagagagaggctaggggcagggacgttgtgaaggaggtgagtagaggcaggctacaggcccggtcttccagccctccacagtaggcccaggcccagtcggactgctcacctgtccacacagtctgtgatgtagcgtagtactgagagggccttcagtgcaatctcaaattccatcagctctgcctgcttctgcagctcctgggaggtcacacagtgttcacgctgggccaccctcacctgcgcaggccttggggaacccagacctaggctttcacaaccctaggtaacctcaacccacctgcatggggttgctgtcctgggatccctccccctcaggggggccaccacagccactctgggccaccagcagggtcagtttgcggtggcaatagtctaccaagtccaagacagtgtcttctgctgactcacacacctcctgggaaaaggaggagggaaactttctgtgtctgatgccttccccacacagacacaatctcccttcctgccaggccctgacccggaactgtggcccatgggcagagatagtccctcaccttgtggaagaacactgtctccaagaggttgatgatggaggcctcgtggtgcacctgtcagataaagagaaggacagggcctgaggaagggataggggctaccagctctcctccccggtccagagccctctgaaggagtgagaagaggtatgaaccaggggcccagctcaccaccatgtagatggggaaggtgttctggggcttgaagtcctccaccctgcagaacacagggaacaccttctgcttccacatctccactgcgatcagctcctccaccagtgttgggacctttgaagggtagggtaaaggacagggatgagatgggcctacctttgcctggcaaccctcccatccccggctcagctcaaccctgatatccccaaacactgctgggcccctaaactattccagacccatgagtatccttcctgacttctctcttgcaccttggaccttcattaccagctgctcccaacacctctgtggatgtccctcatgcttatgtgactggctcctgcccagttcccagactgccttgccctgcctgcacctgcacccttatcctctgcccgcccattcaggcatccctttcaagcc

SEQ ID NO: 22 - DNA, 6155 bp, Homo Sapiens
gcctgggaagttgaggctgcagtgctctgtcattgcaccactgcaccccaacctggattacagagtgagaccctgtctcaaggggaaaaaaaaaaaaaaacctaatttttaaaagcattctttgaatgtaaaggcagtaagctaagaaacaattaggaaatcacatttactgaataatttacttaagtaatctttttcttcaggaaacaatgataactttagcgtatgcatattttaaagatgtgcagacaggtctctgccttttaccttctcttaattctcacctaatcatggaaggaatttagcggggagccttgccccaagctgtggctcgaaaaacaagcatggtattgacaggcagctcatgaatggcttgattattattttgacaagggttttatttttatttttctttagcttccacaggctccataatgcctgggttttattgatattggtatcctggctcccagcctcttcaatgattgtaaaaaatgtttgtgtttactgtaaaaagataatcttgcttttcaaagtgattagtcaaatacacagaatttcagtgtgcctgccattcatttgtcaaattcctggtttataattcatgcttcctcccgtgggggagaagaatgttttgttcagaaggtatttttggtgtggttccgttccctgctagtgaaattagtttatgaaaagaggcctggttctgggtgtagatggaagtttggcctgattaattggtccttaccggcagcccagaggtttcttcatcaacaaggagattttgtcctgtaactaactcaggtacctggaagcagcccgacatttgggggtgcatcgctgcagtctcctttggagctggagaaacctatgagcaagaatgggcttatgacacatccatttccactccatccctccttccgttgtatgactgcatggagcccctctgacctccagcagtgtcacctgcagcctggtagtgagaaacagcaggtatggatggggtctacccccagcaacagtagcgccagctgggccatatcctggcactgctccccaggaaacacaccttgtgttgcattgaccagatctgggatcatttggacaatgtcttatgctgcttttccaggatagctgtgtgttcaggagggagcccttactgaaaggaaagaactgttgacttacaagtttttgctaccggtttggtggtcactaatgtgtccagaggcctgaagatgggcgtgtgaggagcctgacttagcttcagaggctctgtctttcgactcacttgtgtgctcactgcacccctgtgctggcaggactccaacctccacccccagcacttgtgtggacagagagcccagtgctcaggaaagggttgggcttcaggcttgtgatgcagattccgtggtggctctgtgactccttctggtcgttcttaaagtagacagggagcttagatgtcacctgtgcattccccttgttgtcctacgagtgagtaaacagggctacagatagcactaagggatctgcgcatggctgtgcagctcattcatggcatttctggtcctgggtcccagtctctgaactccttcctggtctgacgtccctttgtgaatgttcaggaaaatgtcacagggctgcttggcagcattgtaaccataatttgtgctttactgtaaatgagaatcaggctgaggattgaccagctggttagaggtcctggtttgggtgtaaatgaagaccctcaccagatgcagagagatccccaatggacatagcctccagggcagacgaagccttaggggttctgttttgtcctggctacgctggctctgcagggagggctggggttctttctcctttgtgtgtttatacattagatctgtgagtggatcttagaagtcactcaaagtactgcactgattcccaaacttagtaagaagcagagcaggaagaggagaagaaggattcacggtccatggggatcaggcccatcagcacagaggactcagaagtcaaccctggcattgtctgctgccttcctggggaagccagagagaaaggcccactgcggggatctttctctagacctaagccgtagctgtctgctttcttgcctctccagggatggacttgtcctgccacctgggtagccagatagaacggcttcctgtgctggttggatctgctactcgtgtgcacaccctctggggcagaagccacgtctggtttggtgggctttggtcctccaccacctcactggaactcagcctctcctagattgctggttctccacgtgtggtccagggaccacagcaggggtcagcaccacctgggatttgtgataaatgcagattctttgcccaccccagctgaatcagaagctctgggggtggggcccagccctttgcaaacaagctttgtgcacactgaacttggagaaccactgtgttggactccgagtcctcttgcctggatgagaggcccaagagcactgcatgttagtggctcttcctcctcccccacacctccagggactggagctggggctgctcagaatgaaagatgaatgggggagggagaaggcccagggttgaccccccacaagcttgtctccctgtctcatgctgtctcctatcccatcatgctgctgattgggcaggatttacttccatggataatgggagactttagagcaaagtgtacgctgttccgattgggtagcagagcatgtctgttctctcatggactgctttcaagcacgttgtacatacttggctgagaaaaataaccaaaggcatttcttgggaatgattctagtaacatcctctggtacaagaagcattatttgatggtaatagtggtcatagaattaattagcatcttaccgattttgatatgttatccttgaatcatgttgctgccattgttaacagcaactgtctgttctcctatagtgttaataactaaatctcttattggcaaaggaaatgtattgtggagcaggtggcaaagaggacctgtgttacgtggccagcaggctagaggggactgtggccaagggcaggtgcgctaacatcgatttctgtgcttctaggaattactccttctacgtcctcgacaaccagaacttgcagcaactgtgggactgggaccaccgcaacctgaccatcaaagcagggaaaatgtactttgctttcaatcccaaattatgtgtttccgaaatttaccgcatggaggaagtgacggggactaaagggcgccaaagcaaaggggacataaacaccaggaacaacggggagagagcctcctgtgagtgacagcatccaaaacaccgtgggcccaaccatcatgataacagcagaccctcctcccatgtgtgatggcagctttcctctgcggcccctcctggtttcacatgggggaccactagaccatcttaactagcactttgctcctacttatatgtcatcacaatcagtagtgggcagatacgtgatgtattcgtatttataaattctgtacatctctgtgagtgtgtgaaacacttataagtaggttctcaaactttaaagtgctgcttacagaatgcacagttaaatgtccttttatacacaggtgcacagttagatatttctctttcttttttcttttcttttttttctttttttttcttttttttttttttttttgagatggagtctcactctgtcacccaggctggggtgcagtggcatgatcttggctcactgtaacctccacctcggttcaagcggttctcatgcctcagcctcccgagcagctgagattacagacacctgccaccatgcccagctaatttttggatttttagtagagacgggatttcatcatgttggccaggctggcctcaaactcctgacctcaaatgatccacgtgcctcagcctcccaaagtgctgggattacaggcttgagccaccatgccctgtccgattatttttcagggaagagccagtgtgcttcagccctatgagctctacccttctgctcccacagaagggaagcacaggcctgtggggtggagggggctctgccctaagcgcagcccctgtgggccacgggtttcctgtcccttacactcggccgccttgtttctcccaccccaacatgaaaaagatggagtgagcctgcagccctgagttgatattgctttttaaattgagaacaatataattacagccttgtactgtttataaaactttaaggtctcatatcagagatacagcagtgcctttctcatctaaccctgtgtagaatacggctgttgagaatggcgtggctctctggctggatagggttataaaagtaaatcgtcttttcacctttggcttttaataagggaagggtattagaaaaaaagtaatttgtatgatgaagggtgatttgtgcgtgtgtgcagacagacacacatgcagggaggcaaatcagaaccgatgcgtgtttggctttggcttgtttcgctggtgtctggatttacctggcgacacttgttgctctgggggatcttagagggaagcacgctgactgacctagggctgaacagcaggctgacgaccagcgccgcctcccgccccctgctcactctatccctgcaaagcccctgccttgctccctgttcagatcatagtaaaatcggatgtatccgagtatttcagagtgcttgtctccttagagtcagccagtctgacctgtcagatcataatacatagtagccgtttattttcttttgaaagcaaaatcatggtttcctctctaaataacacttcagcaggaactgtgacatttcccaatctcagttgcgcacattttgtcctaaagacttcttagctcttttactgtcttcagtccctctgcttcacctcttgagtgtgtagtgggattcaggcagataagagggcgaaaggacaattcgtcagagagctctgggtctccatgagggtgggcagtcatcagtctttccctggtccttatcgtagtttgaatttggtccaaggaataagagagacacttggcacagcttccctgccatacccgccagccaggctacttcccatagagcacgttaggcttggccaagtgagatcttcttgtcagtgcttaatccagcctcccgttgtttgtcagccctagctggaggcctcacaggagttcctgtgtccttccagtttgataccaagtttagaccaagaaaagttcctttctgtggcacacctgtagtctcttacctgtctttggtggttgtacacgaacaggcagatatccacaactgcagaacaagtgtcatcgtctctcttaagaagtttcagggcagcctaaaggctcaccttcaccctaccaggccccctttcatagccaggatcttagggatggagaagaaagataagttcacctcgttcactgaagtcgccccttgttttcaggttaggaaacccaggttcatgtccaagtccctgggcaagtagccagcgtaactgattgacctaaaacaaaggatggagcccttggagctctgcatagtgaaatgtatgatttcttagtggaaaacgagaaagccactgaggaagcccagaagggaacttagcatatacagccagctttggggaagggggaagcagtgccaagcaagacaggtgcttttcagagacacatgaatctctgtcactcacggatgtactctttgccccaggtgaaagtgacgtcctgcatttcacctccaccaccacgtcgaagaatcgcatcatcataacctggcaccggtaccggccccctgactacagggatctcatcagcttcaccgtttactacaaggaagcgtgagtttctgctttgggtgatgccattctgttgacagggctacgaatgggagaggccagtctttcgatccttgaatgggctggctgaatacagggggtcagcagagtccccagggagagccacgccaaacatccctacttcatcctcatgcaccctctcgggctgtccctgtgatgtcagtcacagccagtgacagccatgattgggaaagtgttagctcgaggcctgtcattctttagtgagtgattagaggtgtttgaataaaataaacccaaaatggggaaagcttgctttttc

SEQ ID NO: 23 - DNA, 6155 bp, Homo Sapiens; identical to SEQ ID NO: 22

SEQ ID NO: 24 - DNA, 6000 bp, Homo Sapiens
taatctataaacatgttatcaaaacacttccttagaaaaacattttttaagtgcttgatgactcctagactttttaccaaagatgattggttccattttttttttcttttcttttctctttgatagactctggctgtgtcacccaggctggagtgcagtggcacaatcatagctcactgcagcctcaaactcctgggctcaagtgatcctcctgcctcagcctcccaaagtgctgggattacagatgtgagccactgtacccagcttcagatttttctatttgagtgaaagatggagagaaactaaacatacacttatggtacaacccagcagttgtaaccctggatatttatcacagagaaatgaaatttatgtcaacacaaaaatatgtacaccatcgtccatagcagctttatttgtaataaccccaaattggaaattactcagatgtcctatgatagatagttagttaaactgtgggacatccacaccatggaatattattactcagcaataaaaaggaacaaaccattgaagtacactacttggatggatctcaaggacattatgctctgtgaaaaagccaacctcaaaagatcacatactgtataattccatttatgcaacatcctcaaaatgacagattatagccaggcacggcggctcacgcctgtgatcccagcaatttgggaggctgaggtgggtggatcacctgaggtcaagagtttgagaccagcctggccaacatggtgaaaccgtgtctctactaaaattacaaagtttggccagtcacagtggctcatacctatctcagcaccttgggaggctgaggcaggcagattgcttgaggtcaggaggccaacatggtgaaaccccatctctactaaaaatacaaaaattagccgggcctggtgatgggtgcctgtatttccagctactcaggaggctgaggcaggagaatcacttgaacccaggaggtggaggttgcagtgagctgagatcatgccgctgcactgtagcctgggcgacagagtgagaccctgtctcaaaaaaaaaaaaaaagacagattgtagacatggaaaacagattagtggttgccaggtgttagggacattggggactaggttgggcagggcagtgagtatgaacaggtggcattagggagagcttggtggtgacggaacagttctgtatcttgattgtagttgtgattacacaaatctacacaagtgatcagtgacacagcaccacacacacacacacacacacacacacacacacacacacacacacagagttaatttccaggtttgatacttatatcatgtaagatgtagtaaacattggaggaagttggatgaaggctatgtgggatctctctgtaactttctcgtaaatctttgcagctttttgtgactctataattattttaaaataaaatttttttttttaaatggaaagtttatagggtatgtagataaattagaaacaacagaaggccaagtaaaaaagtgctgaaggaagcctctacccaggctggaaatgagaatgttgaatgcaatggtagaggaaggactctccccatctgtgggtgggtccagttcctgtaggacccttggggaagccatgacccccattctcccaaacacacaataggaaaataccagagaagttttgtttacctgttagcttttaaacaaaacagaaccctgcatctttgtcttagatacaaaataaccttcatgggtagggggaagggacattaataaaaagagctataatttacattgtttttcttgaatgtttttacttcacgaaatttgagagatgatttaagaacaataatgtacatataatggctccccagcttaccatcctattacacacacatcgcataagttcgtattatttgtcttgtttggaaatcagtccaactttctgacccttgttctatatataactatagatcccaaaggttcagctgctgggctagcattttgtctgctatttcctaaataatggtaggtaagcaggaaaagtgccagtcttacttgtccctgactcttggtggttcgtggcatgttcaggatagtatttgaaacaagagctcattacaaagtaatggaaaccccttgcttttattgtgtatgcagcaaaagcaacatttggatcaatttacaagtttctgcaaaacaccgtcaagaaataatttcggttgtgctttagcaagaaaataatggatctgtgctataccacatgccttttggtatccctcactgggctttgccaaaacactgactgcaggagctagactactgttaggcagagacactgcactccctttgctgtccctgccttctctcctagcgactcctccaggtacacaggccagggtcacagtatcagaaagcagctctgttttcctccagaaccccccaagcttcctttctgcagcactgtctctcccacatggaaccagctggctcaccagtcaacagcctatgacacacaaatgccttgaggatgcagcatgtattttgtctggaagcaagcaacacgctcttcctttgtaggctgtttctccttttgcttgcaatgtgagtggcttatcttgggtgggcttgggggtgagataccatgtgaccacatgaacacttcaaaacagttgctttttctaatgcatgctgtaataacaatgaaaagcatatccttatggtttttttaatgcaagaagacagactcaattatgtgtgtttttgattttttttttcttcttcaacagcatgtactgcatcccttgtgaaggtccttgcccgaaggtctgtgaggaagaaaagaaaacaaagaccattgattctgttacttctgctcagatgctccaaggatgcaccatcttcaagggcaatttgctcattaacatccgacgggggagtaagtattccatccccctggaaaaacggctagatctcatggttttcttttgttgatgcttttcatgctcccgtccctgagtcaccactaaaatatgggcttagataaacaacatggtgtgtaagcctcacgcatgacgtctcttctttgagtttccctgaaagataaagaacagattgaaaggcaatctgtcttttagccattggcacgtcatttattcctgtaaagagggtcatcgctcatctttttgttagtcacatcttgcataggagaggcaagccctgacacatacaaaccccagaagagaccattggatcagacgtgtgactcagcagactccagctgtagccaaatccacacatctttcaagtctaaagagttttggttacttgaatttactgagaagactgagcaaagggaagtttagtgatatcacgttaaaattttatgaagtccaaaagaatgctagatttccaaatttacttgtgagagacaaaaggatacaagtgtgtgtcattgtgtacataaagtttcggtctcacccctgtacaatgacctttatttgcaatagatggcattcctggtaagttgcttctgagttggatttgtgcaaaggatttcccactgacttagcctatgatctcttcacttctttggttttttgtgtgtttgttttttggttttgttttgagacagggtctcactgtatcacccaggctggagtgcaatggcataatcatagctcactgtaacctggaactcctagtctcaaacaatccttctgctcagcctcccacgttgctgggaccacaggcacacactaccatgtctggataattttaaaaatcttttcacttctgatttttcattgccaagggcttctagtaatggtgccttaaattctctgccactgggaccacttggtcaaggtactgatagttttataagctagaataaatatcgtaaaatggctttgaagttgaaaggaattttggggggggaatccttttatgaagaatttttttttttttttacagtttgagaggaaaaataatgtattttgagaatgtgttttccttaatatttgttaaatgagtagactgtattcttaaggtttagaaaggacagaaacaagtttgtgcttagttcttctgaattagttgatatcccttgttgctgttcacaatacacccactcccagccctccgtgatggagataactctgttccccacaactagggcttgcccactctcatggtacttctgatgtttaattcttttggctgtgtctgcatttcctcatttacttttaatttgcttatccctagaacataccttttgagtgcctaaacttttttatcttcctgtcctgaagacaaaaatttaatctgtgaattaaacccatggagaagtatcatttatgaagggattggtacatattgatgcatgatgatgaaatgtgtcttctggtttatgtccattgcaggaaatagattggatttaggatgatgggacatctcattagaggggaaatttcctgatcttgactaaggcatgcttcctgccccacgtttaaaattcaggatctcttccttaaaacatcaactgcacgcaacctctcatctttccaacttgaacttccctttaatttttcttggaaagctattaaattaaattagatgtagggctttatcctttagtacccttattattttatttgtatcaactcaaagcaaaatagagcattttattaaatatgtcttcataaattacgcacagtaaaatcccattaattggaccacacccagttcattatagtgtttattataattttagcattagttgaactgaaaattggtttttgtttactatgagaaaaaggtagactaaacaagatgaaacctgttgtttgcatattatgtttgtacatctttattagcaactatttttccaactattttcaactatttttccaactattttctagttataaaagcaatacataaatactatagaaaatttagcaatgcagaaatgaatttttaaaaatccctcatagatagccattgttaacattttggtgtattttcttcaagtcttagtaaaatggaacctttaaatatagatccctgtatcttaggaattagaaaggcagcaaaggcagttcctaatgagatggagaaaatgttgatttagtcatgcccttgtactgtgggggccatactgtctgttgacagagcatattaaaagacgttccctacattcgtcagccttagctaattggcagtctggtatttatgattttatattttgttaatcagcttgggagctgcagtaccccccagcctcctagaaacttggcttcccctgcctgggaggcctcgttccaggagtcgttgttgagagtcaagccagggaagtgtgtttttgtcagggagcagccagtcctgtgctgggagcatctcagggggcacctgccgttgaattgttctcacttgtgtttgtaagaatccaagtatgtcacccttacaccaagtgagcacacagtgacacaatcccctttcaatgtagataacattgcttcagagctggagaacttcatggggctcatcgaggtggtgacgggctacgtgaagatccgccattctcatgccttggtctccttgtccttcctaaaaaaccttcgcctcatcctaggagaggagcagctagaagggtaagtgccccaaatttcatgagctgacgttctattacaaaataagcagcgtgcttatgaaactgtgttgctgaggtaagagccctccctgccttgttaaagagaagaaaggaggaagccgcagtattgcctgtgctgctcgagtaggtcttgggtggagtcatggttctccattcttaggaggttgctgtttggaaaacagagatgttatcacccttactggattttgcctcatcagtcaagggttgcgtgtctgactgtgaccagtgagacggcagacgggggtgcgcttagggcttttctgccaagaatgacagcagttggtctggagtgctcacctccctgtgaaatc

SEQ ID NO: 25 - DNA, 6192 bp, Homo Sapiens
ggaggatttgggagtatagaatagatttctaaagctgtgtcagcagtcctgaaatagaaagaaaatttaataatttttaaatttaaaataataagaaaatacaatattttgtgtaagaaatagattggctttaaggtaccactttctagaaattataatacaagcagctgtagaatggaaaaattgttcattctaaatggttcttaattaaaaagaaaaaataattctagtttaggcataatctgtatgaatggatagccttctcagaactccccaaattccccttcttatgtaattttctttcctttcctttccttccccctcccttcctttcctttcttttccttttattcctttcctttttccctcccctcccctcccctcccctcccctcctctctcctctccttccctcccctcatctctcctctcctcccctcccctctcctttcctttctttcaggcctggttgtccttggtgctttcatcactcagtgcattgtctaatgagctaacagttttcaattcagtattcattgtttcaatttttaaaaaatacctttcgcagacaattttgtgtttagcttgaatttattttagatcaacttattttaaattaaaaggttacgaaacttttatgtctttactctgctatatgatgtcatgcaatttcattgccatgaatttaaaaggctcatagaaacagaatactaaaatactaccaatattagaaataatatgactgtataatgttacagactaccgagccaaatggtggatatggaaaggtgcctgaattgtacaaaggcaggttatttgtcaaggcagtttacttggaccatcctgatcagaaaaattactcactgtcctcatattgaaaatcaagcgaagcctggacttaattttgacggagtaaaaaagctagttgatagtgtggagggggataggaacctcaggagaacgcacctggactatttctcagcttggttttgacacatggggtgtgttgcaagtaatttattactaatagtgaaagcactaaatttgcacatgatctgccttctaaaaatacatacatttgagtgtagtcaaggttatctcaatgatatcattgctctcatgttcttacaagtatgttttcttaagtgagagagaaagattggtgttagcaaaagtagcacagaatgccacataatcaatagcttgtttatcaatatccccagaaacattgtagagagcaagcctaactagtatatagccaatatatgtggcaattaaaaatgattacaacgttttattttcaggaaaaatgtatttgagttttgtgaaaattatggtataccagtgagagtgtgtcacctgtgagactattatcaataatatgctgtgacatgaaaaactgtgagcgttcaaagctcttatcatggccagaaaagggaaccctgaatagagtcaggcaaataccctggctttggggaaactttaaaaaaattcaaggaaaaaaattgttttgacccatgaaattgagtctcaaataagattatggctaatgaagggagattttttaaaaccaagaaataattcaaataaaatgggagacagctcaggaaagttgaatcgttgtctatttatctcaaattttaaatgacatgtttataagatataagaagggagagtaaccaaaggtgaatagggaaatgtagcaaatctactataaaagttctataaagtaagacccaaatgaatagaggattttaaaaaaggtaaatgtggcctttttttgagaaaaaaaaaaggtaaagatgattttgaggaaaaaaaaaaggtaaaggtgacctttttttgaggaaaaaaaaaaaaggtaacaatgaccaaaaggagccatgaggctttattttattttatttatttatttttctagagatagggtctcactgtattgtccaggctgtagtgcagtggcatgatcatggctcactgcagcctcaacctcctggcctaaagctgtcctctcaccctgacctcccaaagggctgtgattatagccattagccactgcaccagacggatgcttcttttagtcaaaaagaacaaggaggggagagtgacaacagcaagatgttgaatgggaaggtcccagacttcacgtcccttcaacaaaatatccaactaacaactatccacagacaagaacttatgtgaaaaaacccctaaattgggaatgagcctgacactagtgtggaccacagaactggataaaaaccacattaaaatggtaagagaaatggtcttattttgaccgcatctctcctcccttccccccaagttggcagagggccacacagacagaattcccctgggtcccatgattctattttatttatccttgagccataacattttattggtagatcagggaagagccaggagtaagtgtcccttccttcccatcctcctacccaggagacaccctctaaaggagagcagaagcccaggagcctgcctccttagaggatcttggaggtggacaggctattgtagtgctcttcctggccctcgagcaggctgaggtaggtggcgagctcctgctccagccacaacttgatgtccatgagcagctggtactcctgattctgcctctcactgtcagctcgcacatcgcccagctgagcttcaatactgctgatcagcgcctggatctgcgccagctgtggtccaaagcgtgctggtgaccttccaaggcggctttcatgctaagctgccactgcagctcaatctcaagaccctggaggttgcaccgcaggtcggtgacctgggacctgttcatctggagctgctccatgtggccaacaacttcccagttcagttcctcagtgcagctggtgaaccagcgttcagcatcctttcggttctgcttggcatgacctcatattggctctgcatgtcactcaggatattggtggcatcagcgcccagagccgaatccacttccacactgatctggcctcccacctggcccctcagggcattaatttccccctcatggttcttcttcaggtaggccagctcttccttcagcccttcggtctgcatctccaggtcggtcctggccagggtcagctcaaccagcaccccgtgcaggccattatgtcagcctccacactcacgagcagagtctgctccctctcatacttagttcagaagtcatctgcagccagacaggcattgttgatctgcaggacaatcctggaattctcaatgatgtcaccaagaatcttgtagcacaggtactcgatggtcccgtagtagtggctgtagtcatgggagggcctggggcacatgattttaaaatgggaaaacaacaagagacagacatccagcttccctagcattctgaggtgcattcctggaagctcagaccagtcttgccttatgggggacactgggagtaatggcatggttagactgtgtggggtcagttagaaacaaaaaaaggaggcagagctcacagtgaccagtgtgcagatcttggcagtagctctgtgttcctgccagctgtggtgcctagtcagagataccagccaacagcacagcccaagtccaaagctggactgatcactcccagaatcatggtgggaagttcaagctggctttagactctagacatccagcatccacgaccagcctcagagcctatttcaaggccctgcctactcagggagatgcccacaacattgcatttcttcaaagcacaggtgccaaacctgcctgacatgggaggccaaaaagtggcttgatctggccccagagcccacatcaaggcaccacccaggcagggcaacaagcctcaactgtgcatttctatggagtatagcctctgatcccatttgtcccgaatggcaactctgctagcatcaaaacccagcctgcagccctgcccagctgtggaacccaaacagtgataccacccagccagggatataccctgttacctggctgatcagggaccatcatgttgcttggccatcagcttcacctgatagcagagcccagccagtggtctcacttcacagcagagcccagccagcagtctcagacaacctcagagcaacggcagtggcccaaccaaccagagaacccaacagcaactctacctactgtggccattactagctgatctatccagaatcacagggtagactaaatagtgaaagtctatccctgccaaagaacacctgtagactgtaagaggtggctgtctcctcaaatacacagacaccaacccaggacacaaggattatgaagaatcagaaaatcatgacacctccaaaagaaactaataaagctccaatgatggaccataaaataagggagttctataaaatgactgacagagaactcagaataattcttttaaagaagctcagtgaactacacaaatatattgacagaaaattaaatgaaatttagaaaacaaacatgaacaaaatgagatgtttgacaaaaaaataaagaaataggtacttttaaaaaaattagaaatcctagagatgaggaatacaattactggactgaaaacactgcatagaaaacttcatcagcagactcagtcaagataaagaaccagtgatctcaaagacagaacattttaaattattcagtcagaggagaaaaaagaataaagaatgcctacaggaattatgcaacaccatcaatagaactaacatgcatataataggaattcaagaagaagagagaaaaaaagtgtcagaaagcatatttaaagaaatggtgcctgaaaactccccaaatttgggagaaaagatacctaggtacagtaagtgcaggagtttgcaatcaatttcaactcaaagaagagttaaccaagacatgtaataatcaaactatcaaaaatcaaagactaattaaaaattctgagagcagcacaagataaacatatcacatacaaggtagtctcaatgtcagtggatttctcagcagaaatgagggagaaataaaagctttcctagacaaagaaaagctaagagagctcattaccataagctaagggagctcataagggtacaaagtttcagttaaacaggaggaaggaattattttagatatagtgtatagcatggtaactatatttaataataatgtatatttcaaaattgctaagacaatatattttaaatgttcttgccacaaaaaagataagtattgaagtgatggatatattaattagcttgatttagtcatttcatgttgtatacatatgtcataacattactttgtaccctgtatatatatatacatatgtgtatatatatatgtgtatatatatatatataaacacacacacatacatacacacacacaaggtaaatacatatatacacacacacaaggtatatatgtgtatgtatatacacacacacaaggtatatgtatatatatacacacaaggtatatgtgtgtgtatatacacacacacacacacacacaattacaatttgtcaatccatgatttcaaaaagaacaaggaaataagtctacttcttagagatgatagcagaaggtatatcagagacaagacagcatcattcaattctttttttttctcctctcttttctagattggggtttaaattgaatatggagaataaactatgaaaagtagaaattgcagcccaagataaaagagggattggcaagctaactccaagatgtttaaaatgagaccagataaattatgtaccagggtgcaaatagaatttccagctataaactgtttggtagtctttgaaaagtcatggcaaataggagaggtgccacaagaccacagatgggtacatttcatgtttatttttaagagaggaacagaaaggattcaggaaattatagacaacttgattcatatttgcagatttaacaacagattgttaaaaatgctctagtttttgagcattcagaaatgaatgttaaggtcattagtaaccaacaaatgtgaagtaaggacaagtttgatacactcatctgatttattttttatgaggatactaagcacatagatcaacggatttcttgaaaatcaaattgaaacagctagcaattggtatcaccgtgatggagcaatatgggattgtctcttttcaagagtgtctattaatggctttatagtctctagtag

SEQ ID NO: 26 - DNA, 6192 bp, Homo Sapiens; identical to SEQ ID NO: 25

SEQ ID NO: 27 - DNA, 6000 bp, Homo Sapiens
ttgtactcaacattaatgacaacattagcccaggtgacatgtaattaagaaagcaaacctttttccaaccaaaaataatatgagagattccaaatccaaacagaacagagctgtggatcatttcatgtttgtcttcatatcattctctccactccactccactgacacagcgtgatgcttgattgtcctctaagccccttccattgctgtcatctgggatgctggcaatgtattgtgctgaaagggaagcttattaataaagttagtaactcgaagagtcagtgcaggttatttgtaggatgctcattatgagtcttgagtctgactcagtccagaaagcaatggaatattccgcataaccacctaaaggacttctctttcccccttccccagggtctgtttctcctgtaagggttcagagctgcctggcagaggctggctgaaataggagaaatcctgacttaagctgtttcaggaaagtgatccagtctttggagaataatcaggacataattaagtatgagtaaaaggcttagagttagtctgttctcctctgtaatggggtgttcactagtgtgacagttgtttttgtgactattgcttttacgtacatttttgaccagcacttggaacactacctcagggtaacttaaatgaaagtccattttccaggatggagtaaactgacagaaatttccatcgtgcatcaaatctgctataagttgtttgccttctgggtatttttgggccctagttgtactcctgaagaaataaccactgttgctccaagtagaaagtggttgaggagacagctaacagatacgtccagttcttattttctatcacagagatgtgaaaaaaaaaaagcctaaattatcttagaaggaaaagcattcctctgtgctggatttccagtgcttcccagctttgcactgttagcttattttttccaatgtccctataataacaatccactcctttctctgcactcctggcccctcgtgatgttttatcatgctcatgctgaaagaaaaggtgtctgtccatactgtatctcttcatttggcctcagggatttccctttgatttggaaagaataatctttcaaattccgctataaactatacaggagaaagagaaaaataagataaagctcctggaatgtgcactggtattgacatttcgttcaaataatgggctgaaggtgaactatctttactattgctcatgtgaatgatcaattattatcaatccaaactatcaacagtgctgcttattattgatttatactgcatggtttaattttgtctccatccttccagacattaaaacatagccaatatttagcagttcccgccattcaccatgagcacctccacagcccccaactcctctctcccagttctgcccaggatatttatggtgagtagcgagttatctcctctttggcagtcatccctgctttcctgtgtggaggaattgcccacattcgcatttgcaaacagaggctcactcaagtgtcactaaaggaaaggaggtggagcctgaagagctttaaaaagcaaagctgagtcattccacttttcaaaaagagaaactgttgggagaggaatcgtatctccatatttcttctttcagccccaatccaagggttgtagctggaactttccatcagttcttcctttctttttcctctctaagcctttgccttgctctgtcacagtgaagtcagccagagcagggctgttaaactctgtgaaatttgtcataagggtgtcaggtatttcttactggcttccaaagaaacatagataaagaaatctttcctgtggcttcccttggcaggctgcattcagaaggtctctcagttgaagaaagagcttggaggacaacagcacaacaggagagtaaaagatgccccagggctgaggcctccgctcaggcagccgcatctggggtcaatcatactcaccttgcccgggccatgctccagcaaaatcaagctgttttcttttgaaagttcaaactcatcaagattatgctgctcactcttatcattctgttgccagtagtttcaaaatttagttttgttagtctctcagcaccgcagcactggagctgtcctgaaggtactctcgcaggaaatgggaattctacttgtgtgggtaagtactccaatgaaaaggtgctccaggtctccgggaaactgcccccacatccctgttggttcaatctggtatacttgggcatttaacaaagtttgtctttgggtatgtatagttgcttaatttttgttttctgatgcatgtttattttcttactggccattagagctaatctgctaccaactataaaacttcataactctcaaactgtacttctgtgtataagtgaatgaatatgcctcattttaaactagcagaacatttcatggaagcttcagcttttactctgacaagaggagtaattaacacctggctaattgcttggaaattagggaaacagatggttgattttttgtttgtctgtttgaaactcttaagccacaaagaaaaaaatccttccttctgataacttgtaagaattcagaagttctaaaaattagtgaaaaatggaaagggaactgtgaacaaaggtagttgtgaaaattaacctaaatttcaatttcaacctccttcactttctccccactcttactgtttctgaggctctgacacaactccggagttttagtaacaggtgcattgcaactttaagaactgccaaatatgataatgggtaaataagccacactgtcctctcatattaaatgaattttttgccaaggggaaatgggagcttgactgaatgcgaattacaatcctgccaaaggatattgcctgaaaaacattctctctctaactgttaattcatttatttaatccttgggtgagcctccaacctgctgcttagacacggcagccgcctttgttgatgagaggttatagctgccccgacattccatttttatcagcttgcccttttgagatggcgtctggcttttaaaaagaggtagattgagggggaaaacacagtacagtttccagaagagacacctatggaagacagtacacaataggcaatagtttgaataaagagagcagaatggagccaaactgccaaagctaggctgctgtcctggctctcccattaaggaagttcccgatgaggaaatcaggtgcttttgctcagaatctctggactctgttctcaggtagcactccttgtaacaggtgagcagaactctagggtatttgaaataaagacttaatcctagtgatctctatgttcccagcacctaggacattcctgcttccacagtgtgtactcagcaaattcttgtgtatgaatgaggcgtctttctctgatctgctaatgacatagtcctagagaacagcaacaaaaagagggtgacaaatgacaaaaatggccccatgaacctcagactcagctgttggagacagaagtaaaacttctgtatacagttatgtcaaatggactggactctctttggggtgggagaattttccgtggagtagttggcaaatatctagagttgggcactgtcatttgcatgggatgtgaggggtgatggttgggccgatctatcaggcagccagaagctaggaaagaagaacccaggttgctgaagcagaacccaagaaattacaaaaatgagcttttatggatggctctaggatctcagaatagtctgattcctgctggcaagcaagtctatgccttgttttccttgccacctctggtggctcagaagtgccttcattgaggtaggttgtacccaataaacatgaaacccaggatagaaacaataagttggggagactgtgtcacagagtggaaggaaccacaggttttagaaacaaacaagcctcatttcatatccatgctaccaacttaatagctgagttactttagagtatctctgggaaataataccctcgcccactgcttttaggatttttttgtggggaatcacatgagataacctagcatgtaccaaagcatggtgcttagcagagtatgctcaataaatgtcctcctgggctccacgtcttggctaaatctctgatcaagtcatacgatgagatgccgtatttgaacagtgcagtgacacggcacagatccatggagtgtggaatgtgtggatggcactttgggattccctgcctctctgctacctcatttcttgcaagtcactggtttaaatcccgtactttacgctcctggtctcatgttagctgataactgcctgggtcaccctttgtcagtcactgtgtgcatttcagaggatagtatttctttctcctctctaaatagatatggtgccatcatctatttttccctcatttaaattctacttgccttatttcttgcccttggcattgagacagatcacctctgcagccacctgacccagcaggaagaatgctttatggtctaacagtattcaggtaaacttatgcaagattgttactcatgtgactgctagccggataaaccaagtgatagcaacacaattaggtttctttctattcccctccctctccctccttttaactgagtattctgttagcgtctacttgagctacagcaggtgaggacagcaggaaagaaaactgctggcaagtggtttctgaaccttcaagtctatttaccctggaggacaaataacagttgaaaaagaaattgttcctgtttggcttctgtacctgcattatttatatgaacttttttggtaataaagggtaaggaagaagtacagcctcccagctgcgggagggatcctggggtggcactaagttatcacttttagtagtaaacagtgaaatcagtgatttcagtaccggctaaggcgtggtcagcatcccagtcatgtgcaaaccagagtaattctgagaccagaagcttgtctgttttttcagccagggttatgcgattttttttctttttttctaacagcagtgaaactaacctccaaatattcagtggtgtttggtcattgagcttagtggtaaagaagcataaattttggagacagatttcttgcctggattcaaatcccatttctgctgcttgtgaactgtttgtctcattttccttaccctaaaatgaagataattgtaccctcttccgaggactcttgtcagtattgcgttaatgtattcattttcagtgctggctgtgcattagaatcactaatgtctgggtggccaccccgggcagtctggatcagagtctcttctgggagtggaatctaggccttatttttttttaatgtggtgattctaaccaacagcctgggttagaaccactgagttaatatatgtaaagtgcacaaaacagagcttggcatacaataaacactcgataagcccgagattctattaatgttttgttgttttaaaaattatttttatgaatgtaatggtattttctaaatgtggcttggtttcgcctataatcatcgaacattttttatacatgacaaaatgccatagtgaaaaacccaataatagttctacaacattaaaaattatagtcaaaataatttaaaaatacataactcatatttttgtaatcagaagaaatgtttattaaaaatacaagaacatgtcaacttgatttgagtaagtacctttgtgaaactgtggctctggtgtttgtctttttcttataccaactgataaaaaatttcattcattgcaaattaactctgttcgtcgggtttcttaccggtaataatcttattttaacagcagcaaaaacaagccacttgaaagtgatagcgattatttcagttttttgcatatttttgcccatgtgtggaacccttcccttgtggatttttaaagctattaaaagcatataaaaatggtaaattagttttctcagttaatttacattttggggctaatttgagcttgtcaaaatatttgacat

SEQ ID NO: 28 - DNA, 6196 bp, Homo Sapiens
catccatagatggtatatgcattcattattgagcagaatatttttaaccaaaacatcattccctatttttgactaaaaataatttactatggccaaaaaatggcttttgacaatactatatatcatcacagggttttgtttttgttttgtttcctcaatatgagagagagagagagagagagagagagagagagactgattccttacctggggcatatcagcagttgacacaaccacaaatagaagaaaataacagaaacagaaaaaaatatgagaatcgaagaatgaaattggctcaaatagaaaccactcctgtattctaaagtccctggcctcaagtccaatatcaaatcaacacgtgttgagaatcccttctgtgtatagggcactgggctcaaactggcaaaaatcttttattttatttttagtcacaggaattatggcttcatctcttggagggacttatgtgtcactgtatctattttatagcaaaatataccaagggacccctggttggcatgacttagtcaatgatagactgccaaacggcagccttgccaaaagcagcagtcctgtggctcaagtcttcatcctcactctaagtagtagaaaccatgctaagatgatcattaagtttttccatattgttacttgtggcacaaagatgtggctttttccaagaagcctctcaaggtgagtggcttcacttctctcagatgcatctactttcagcatcatgggaagagtccctgacagggtgttaggtgaggggcgctattaaaagggttgtggagtcatgctggaagctataattataagaagagcattttttttgaacctcagagtagtggcaggtccattcaaccccatcacttttggagaaacagtcatttattttctgactaccctccttgccctccatggactctcaatttagtggctctatatcagtggcaaaattttccccatcattctaatgatgatttccattttttgtagtcagaccttcacctcagcaactgaggaaaaaaaaaaaaaaccaaaacccctgtctctcgttaacaaaatataaatattcagttaatggttgtaaagcagttgaagatgaaaagcgccctctatttgcaaatgatcataaataatggacataaaatagaagaggaggtaaaagctcaactgaacatttactgcatttttctcaacaagatctccgcatggaaatcttccaccccctacatagcccaaaacactgggactggaagaagcatgttatcatccagttctcatttttttttttttttggttgtaaaattagtggggttttcctgttcaatatttccattggaaacctcaacaaatccaacccacctggacctcgtggcatttttcaaaagaacaaacctgtgattgatcttgcagagcatacccccacactgcgggaatgggccagttctagaaagtatgttattctaccgaatcctatttctccacccctcccttctttgttgcgttcatagcaatgctgaaggctaagcacctgcaactgtagatgccttcaagttcttcagtttttgtgaaatccagggaaaaaaattactcaagttatagccttagtgaatttcaaacttcattagatgtcaaaactatatttttaatagttctagtataacacatttaagtgcagcgatacatataagtctctggaacttaagaatttaagattttttttaaatagatttctctttttctttttttttttttttgctgagttatattgtcagataaatctcagtacttacagttctaggacaagacagaacctctagtgcattttcctttagtgtagggaacagtccagtacacccacagagaaccagagaattttatgttcccacaaatgaaaacaataccgaacttgcttaggagtttaaagtgtgaaacaagtggtcccatatgttcattatttccttggccttttattttgccaaacacaaaagaaatcaatagagagaaaggaaagatatgatagaaaaaaaagggaagaatcagaaagacatgagaaaaaaagaaaaaaaaatcagaaaacactttctcaaaaatcattcacaaacccaaattttaaaagttcttttttttttaatcttagataaatggaatattaattgattccagatgtctgggccacaatgaaaatgccctgtaaaatttgagggcaacagtcataagaaaatactcactgtaggtgtaatcatttttgtttgttccaggtcttttacagcaggtcagggtgggtattatgaggccgatgtgaatagaaaactgaagtcttaaaaacatgtgctgctttgtgggtggggtttgtgaaagcatctagttacatttggacacccaggcaggtatgctattatgagcctgggtaaactgccttttgtccattgaaacaatgaacaaattgcacagctgggatttaagtcaatcttttccccccagtcaagccacctatttccattgtatgcctattgtagcagcccagatagtgacccaagctccagtccactcccttactcccttcccccgactcactcacttggaaataccttgagagtcagagtacaatcagctggtgagctctgcctctgggcaggacacctttacccactgaattacatgtgaaagaccacgcagctccctcaaaccacttcctgcttcaagtacagaaaaaagtaacaacttattaagagctccacttctgaagtgttcagcatacacagcatgaaaagtgcatttggaaacaattttcttaacttgtaattaatgcagagataacgctccacagcctcttttatgatcccctaagtaaggagacaaaaactccagctgctagatcacatagtatgtatgcacagtgacgtcatttctttgaaagcaaggtggcctgcatgtgttggcatctcaggaacagcagaatcaggtgcctgacaagggtgtatctttaactcctggagccacttacttgactagggaaagtcgtagtggtgaagtgtttgaaagcagcaactgaatgctgcactaagtggcagagacgtcttatgaattgagccctcaggcaattgaatcggtggagccagtgacagcagcttaaaagcgcttgcaaattgaaaaaaaaacacaagtcttgaaggatataattttgctgagaatggaaactagaactacggccagcaatcggaaacgagaagtcggtgcactgacagcagcagccagatttacctaaagggacttcacgacactgaatataaaatcagagttttataacacagaaccccaagtccaaactttgcccatgaaagtcctcttctaaacagaaaagttgggcaagcagctcttagaaagtttctgctttccatatacagtatgtatttgtttaaattatacaaatatgcaaggtcagcaagagttgtcaaggagttcttttttggaagaacaaattacactttactctaactttaacactctctctgggcataagtgcagagttccgggaccttagctccaaagatcatatttaaaagctttaatatcatctaaaatacaacccttcatatatagcatgccttgtaaataaagtcctgatgagttacacacacagagacacatacacacagagacacatacacacatgcaaaagaacatggtcttaaaaataaaacatctgcacctgcaaaagaaaaaaaaaatccccaagttcatatccatgctctatagcccttagccatagagaggatttaaaggaatcttctgtaatgacaccacggaagccctgcagaagtggaggatttagcataagtaccttgcaatagtttctactcatacagatatctgtgcaaatgcatccatctccccgagctatttttcagattccacagaattgcatattcagcaatttataaataactctcggttccgaaacaatgaaaattttaaagtgaagaacagttctaggcagaagcaaacagtacacaatttaaatagaattccccaatgacttcaaagagtaagaaatatttaccttcaagaaatcacaaaagcagcacttaaataattgggttggaagactgctgatttttcccattgcttctgaagtacaaagtctgaaaatgaattggttagcaggaataatgaagcaaaaagaaatccagagagatgggagatgttgagagcaatgtcacatttcaattttgaggactttattccattgcgcaggctctatctgctctgaatttagcagtgacagtgagatttagcaaacagaagagggatttagagaaaatcctcacatttatctacaaaacacagacactgtagacaggaaacagctgggggaacatttgccttctctctctctccctcttctggcaaagttattgagtaaggacttttttgggcatggtgacaaataacatcatacctttgcattttaaaactagagcacagaagcatttttttcccttaaaagaatgtgtgttagtgacagggttcgcagacattaaaatacttatgctgccatagaaaataaggatctgttttctgattaactttctgctgggcatgaagacacaaacgtctgctaatacaccttaccagtattaaaggaatatgggggatgggagagcaattttagattctagagcaaatgcattatttaaaacaaaaaaagaaagaaaggacgataagaccctctccagcaaactctacaattttaaccctgaagtgactggggtaaagtagattggaagacagcactcgggtgaccccttgtcccagttgccaagtgagaggtgtgatctcatttcctagaacctatggaggggcaggcagcattggattggtccctttagggcactgtctcatactttttctcctgcgatgaggcaaagactatgccgagctgtaaaacccaactgaaatagaacatttttctttattcttctactaggctgcctgtcactgtcccctccccaccccaccactctgggagaagggtacctggggggcaaacaattttcctgttgtttgaattttccatataactcaaacctgtgtgtgtgtgtgtgtgtgtgtgtgtgtgtgtgtgtgtgtatgacagagggagtctgtgtgccagagtgtgttttctttctctgatttttgtgtattctaaataacaccagctggctagcaataccctctcgagggttatgatgtcattcaaatccctcaactgggtgactggccggcaacatggtccaagccagctgttttgctatttataatgtacacttgcctttgccattgagaattcagttctgatcttttgtcgatacagtttgtacctatttccctttggttttgtgaagcagtagataagaaagtgaattataaaataaggttgcaaaagcccagagcagacatacctctttccctagagagctctccaggcctggtttcccaggagtggtggaaataacctggaccttgaattttttctttttttttttttccacatgactctcaggggactgacacatcaactgaaaacacagttctgcttgaaatcctactctggctctttgtgttatcctggggccagaaatttgtttgtagaagtgggtgccctaacaaaaaacaaacaaacctgctttgtttggaagggggttgggtttgtttgagtcttctgtgtggttaatacattgtagcaatgtttacctttcagaaatcaaagttagaaatctggaattatgttgtgtcaatggtgcactatgttcagcaacattttgtgagctctactatgtgcccaactacaacatccctaggaaaacaaagaggaataagatatggtcaagtcccttcaggggctttcagctgaatgtcagagacaaagaggaaaacttcacagtcatatgatgggcatgtgctcttttaaaaacatgaacagtgcacaatgagagggagtgacacattctctgggaagacaggggagtaaaatcttttggaaaatccaaaatgagggaggcagattgtgtcatgagaggctttggggtaccatgttgggaaatttcagtgggtgggatttgacccaaagagcacactaagaggtatcatcaagaggtggcctagtaggtggccctggattattcttaatgcagggattatccac

SEQ ID NO: 29 - DNA, 6196 bp, Homo Sapiens; identical to SEQ ID NO: 28

SEQ ID NO: 30 - DNA, 6000 bp, Homo Sapiens
caaagactatgtgcttagagctgacttctccacacacagtaaatctcagcggatgaaaaggaaactgaatgaaatttgttgacaacaattgatgcctgtaggaataattggctcagacacaaaacagacatcaatgtagcctggggatgaccaaaatgcagcagcctctaagtcattgttagtatatattttttcagttcaaaaaaaaataaaagcagttttattaaataactagataaccatgaggtgagaagtattgtccacagtacttgacaaccttaattcttgatggttcttaagaccaagatcccaaacaagtaattccattctattcgattggattcaactagactcaattcaattcaattcaatcctgtcagttcaacaatcaaatatgggcagctactatagcatccaggctatgagctagacacttggattcaaatgtaaataaatatgtcctttggcatcaagaagcccattgacagggtattattcttggcagggtagaccaaaatattcaagaaaaacataaaggatataatttattctccatggttatttttctcttatgacaataatacttagttgcatttttcttttaccactcaactgtaagccccttgaaaacaaggtcaatctctcattcatttctaggcatctcattcatatctcattcaatgcttacacataacagatgctccatcaatgttttgaattacatgaaaataatctaaatggactaatttcttttgggcaaataagattgtccagttgactagaaagttagcaagaatacttttgggcatgaaggtatgttggacacttctgtgcatgagggtatgtcggattaacataagtcatggaattctataaggcaaaactcatgacacacatattttcaatgacaatactgacaagaacatatgatttacaaagccactttctagctaaagtcatatagtaagaatcaagatttgctatatataacatttccttttcaagttattgagatacaatttttaaaaatttgctgaaatttgattgttgcagtaacagaataagagaacctggaaattggtttccattttagttgtccaatatccttaagtgtctgtgcaaacacttataagtatcatacagttacttaggaacaatcattttttccattctaatttttcatcatttaatgcaaacatcataggcatagaaagatccagttttcatgcactgtgcatggaaattctggagcaatgtcgtgttgaacatcacaattcaacctggcacgtaacagaggacacttctaggcttggcaattacctagtgaactggatcaaaggaaattgcacaaatggattatcaaggaaaaaaaaagtccccttgggcataataagtgagaaccactttttcatttctttaaaaaatgaggatcagtagctgcaaattatagaataattatgacccactgttggatcatgtgatgtcccacagttatcttccacaggatattttaaaggtaaaacaagtctgctattggaaaatcactcacccaatgcactcattcatctgctctgcaacagagaactggatagaattgctttattgccagaaaaataaatgagttcgttcaattaaaggactggctggaagcaaatagtgggaatttgcctattcaaatagtagaaggcacttctgattctttgtcactagtgatttaaaaactatttgttgccaaatccactgtaagtactgatcgccaataccctcacaagcctctttcttcccatctcccttactgatctccagactggtatacacaggccaccctctaccctgccagtcatacacacacataccccacctgcctagagagaggctgacatttgggaaggatgagagagacttcaagtgtgtgagtcatcacaggagctattcaaagcatagtgggtaactgaggtaagctgtctacactggagtgatatgaacctttaagaatgactcatgctcagtttcctggaactctctaaaactccaaagaattataaggaacaagcatctggctttaaatctttctctgtcctataatatacagtgagatagatgcatgggagctagattctttaagtgatcagttcccacaggaatcattgacttttgcttgtgtgtattatttatacgccttgacttggctgtctactttttactggctgttgactttctaatcacctaagagctatttaagagataagtgattctgtacttgtcagagacccttttccagatggtgatatcattgatgggtcccggagaagaactatgccaaaagagagcaacaacaaaaaaatcaaggtcaagtggcatagagggcaaatcagtatggcatttcagtttgcatttagagacagtctgtgtatttgcaaacaggcctgcctttaaggggagttaaccttctgtctgttcatggtgatttcatattgaatggagacatctaggatatgccctttaatattttttttcccagatccacatgactggagagtccttactattttactccaaatcacatagcacttaaagcagccctgcatgtgttccatatgtttatatgtgcgcccataggttttgaaaacaaaaacatcaatacctcagggttattttgtcctgtcctttcattgaaaggaatggaatagtgaggtggatcataatagttgaaagaaggcttagcaggaagtagttaaagacgaattgttaaggaggaaaattccatcctagatctgcaaaacctgccaaagtcccgccaaaacactatgcttactttaaggtgaggaatctcagaggcctaggatggctgccagatacgggcactcattcagttattcacacactccctgcggttgtaaatccacagagctgtacactttagacttgagcagcacattgagagggagggctacttactgaaataaaagcccctgtctccacacacgaactgaagagcatccaccagctcagccccgcagagcgtctccggtccagccgtggcagagctggtgaaggtgagcaggcacagcgccaggtagaagagatgcgaggaggacatggtgtgcatcttcacctgcccaagaaacagagggagggtcaggtttcctccttgatccttgcaaggggagtggggtgggacagaagtgcattgactcccacgattccacgactgtcattaatcaggactacccagcacagaagccaatagagtacatgagaacccagagggagttgtggatggagcgtgtctcggcatccaacaacctgtgtttattcccctggctactgtggatctttggaggagtcctccctgaaccctttctttatgggttcctatttcaatgaattgagacaaaatatctagaaacgtttactacggaaatgaaagatgctattattacagtgggatcccatatcactctgagaccctggtagaacttttgaattatcaaaggttaaattgtgctcagtacagatttggggccaaataagttttgttaatttaaattctctcaatattggccatccatagatggtatatgcattcattattgagcagaatatttttaaccaaaacatcattccctatttttgactaaaaataatttactatggccaaaaaatggcttttgacaatactatatatcatcacagggttttgtttttgttttgtttcctcaatatgagagagagagagagagagagagagagagagagactgattccttacctggggcatatcagcagttgacacaaccacaaatagaagaaaataacagaaacagaaaaaaatatgagaatcgaagaatgaaattggctcaaatagaaaccactcctgtattctaaagtccctggcctcaagtccaatatcaaatcaacacgtgttgagaatcccttctgtgtatagggcactgggctcaaactggcaaaaatcttttattttatttttagtcacaggaattatggcttcatctcttggagggacttatgtgtcactgtatctattttatagcaaaatataccaagggacccctggttggcatgacttagtcaatgatagactgccaaacggcagccttgccaaaagcagcagtcctgtggctcaagtcttcatcctcactctaagtagtagaaaccatgctaagatgatcattaagtttttccatattgttacttgtggcacaaagatgtggctttttccaagaagcctctcaaggtgagtggcttcacttctctcagatgcatctactttcagcatcatgggaagagtccctgacagggtgttaggtgaggggcgctattaaaagggttgtggagtcatgctggaagctataattataagaagagcattttttttgaacctcagagtagtggcaggtccattcaaccccatcacttttggagaaacagtcatttattttctgactaccctccttgccctccatggactctcaatttagtggctctatatcagtggcaaaattttccccatcattctaatgatgatttccattttttgtagtcagaccttcacctcagcaactgaggaaaaaaaaaaaaaaccaaaacccctgtctctcgttaacaaaatataaatattcagttaatggttgtaaagcagttgaagatgaaaagcgccctctatttgcaaatgatcataaataatggacataaaatagaagaggaggtaaaagctcaactgaacatttactgcatttttctcaacaagatctccgcatggaaatcttccaccccctacatagcccaaaacactgggactggaagaagcatgttatcatccagttctcatttttttttttttttggttgtaaaattagtggggttttcctgttcaatatttccattggaaacctcaacaaatccaacccacctggacctcgtggcatttttcaaaagaacaaacctgtgattgatcttgcagagcatacccccacactgcgggaatgggccagttctagaaagtatgttattctaccgaatcctatttctccacccctcccttctttgttgcgttcatagcaatgctgaaggctaagcacctgcaactgtagatgccttcaagttcttcagtttttgtgaaatccagggaaaaaaattactcaagttatagccttagtgaatttcaaacttcattagatgtcaaaactatatttttaatagttctagtataacacatttaagtgcagcgatacatataagtctctggaacttaagaatttaagattttttttaaatagatttctctttttctttttttttttttttgctgagttatattgtcagataaatctcagtacttacagttctaggacaagacagaacctctagtgcattttcctttagtgtagggaacagtccagtacacccacagagaaccagagaattttatgttcccacaaatgaaaacaataccgaacttgcttaggagtttaaagtgtgaaacaagtggtcccatatgttcattatttccttggccttttattttgccaaacacaaaagaaatcaatagagagaaaggaaagatatgatagaaaaaaaagggaagaatcagaaagacatgagaaaaaaagaaaaaaaaatcagaaaacactttctcaaaaatcattcacaaacccaaattttaaaagttcttttttttttaatcttagataaatggaatattaattgattccagatgtctgggccacaatgaaaatgccctgtaaaatttgagggcaacagtcataagaaaatactcactgtaggtgtaatcatttttgtttgttccaggtcttttacagcaggtcagggtgggtattatgaggccgatgtgaatagaaaactgaagtcttaaaaacatgtgctgctttgtgggtggggtttgtgaaagcatctagttacatttggacacccaggcaggtatgctattatgagcctgggtaaactgccttttgtcca

SEQ ID NO: 31 - DNA, 6157 bp, Homo Sapiens
cccaagtagctgggattataggcctacatcaccaaacccgtcaaattttttgtatttttagtagagtcagggttttgccatgttggccagactggtctcacactcccggcctcaggtgatctgtctgccttgacctcccaaagtgctgggattacaggtgtcaaccactgtgcctggcctcaactggataactttttttttttttgagaccaagtgtcactctgtcgcccaggctggagtgcagtggcgcgatcttggctcactgcaacctccccctcctaggttcaaacgattctcctccctcagcctcccatcaactggacaacatttaaaacaataaatgcaactacttgtattggatttaaaagagcaacaaatgacagggtacactgtcaccagcaatcaatcagaagcaacaggtaaggtgaaatttcctatttgccacccctgaactggtgtacagacaaaggagagtcaaggacagtgaggaatccagaaaatactattatatgatgagtaactgatgtgaagtcaccggagtaactcataagttcacatgatgttacagtagaaagacttaagaactactccacacttcccatttggaggaactgtattttgcttggagaaaagacagtatcattcctattcttcactcactgtttcttttatacccaaatcatccagttctatttacttagtttatctgccttgttgcacaaagcattttaaagcaacttatagcagaaatatctacaataactagataaagaatacagtacagcctgcaaaccagggcaaaaagatatcagttacgtagttttcattatatgaaactgaaactaagaaggctctcctgatcaatgattttcaataatggccagattattccctgctctgttatttccccaccttgcagcagatgtgacattgtgacatttagagtctaggcctcaagaggccttacacactccgctctcaaaaccctgcccagcctccatgagaagtccggctagcttgcaggagcatgagagaccacacagaccacagttgaatcacagtagttgttcaagtttagacctcagatttatgagagaacccaggcaagataaagtgggggcctgacccaggtgaactgaactccccagcataccctagactcacaagcactgataaatggttgatgttttaccaaagttttgggaatagtttcgtctgttatgcagcaatagatcactcataaagaatttatgaaatgaagcaaaacatcctacaactgaattctaaaacaagtaagtggaacttaattaagtggaacaggtccattgcccttcccaaccatgggaatttcccctggagtctctcatccttaaggaatactttatctgtgtccttaccacattcctattaaaaaaaacttactggctctgtgctttctttacagccttgatctatttcaaaatgacagctacaaatctgatgaaccaatctgtagtaatatgttttaactttccctctccttccagctaccattttgcatttcagctatattgtcccaatgtttctaataatgttataagctaaatatctgatagtaggaatttctaaaaattccagtcaatgcctcttcacctctcctcctttctgtaaggcttgctattatactgtgaatgtcacttcatcagtgtaaactgtatttgttcatctgtaatataatagaattgaaataaaagatttctatcatttcttgtagttctctggatttgggttttgtacagtcacttacctgtcttggtgtgtgtattttctttccagttaataagtacaagaggcctcctacatagcagctggttaaaatgcagggatgcatatcacggtttgaacaaaactgcaatatgtacatgacatatttcatcccaatatggaggaaagctatgaatacttttaggaaaatggccatatgcaagcaagctgtgttctttacatgaaggaaaaataacacatcgaccagaattatattgacgattataatgtagggaacacaatctttttttggaagtttttataatattcttgaacttacagaaatctgctataaggaagtgatcagatatagatgaaagatttatgcagaatgatgttcatagcagcttcattagtaacagtgaaaaatcagaaactgaattttccaactgtcagttaaagcacaattcatatagtagaatatcaaagttaggctctcaaagactatttaatttcacattggaaaatatccacgtataaaattaaatgaaaatgaaggaaagaaaacatagacagtattatcctattattgtaataatatatagaaatgtaaataaatggaaacagagagggagaaggaaaaatactctaaaatgttaatgtgtctgggtagtaagatatgtctatgtaatttattttcagtgtttaccatgagcactatcacattcgcggtcaaaaaccgctcaggaacgctttggagccctagctttccgagcgcaggtagagcagcccgggcccgcccacgcccctggctttgcgcggtgcagtttgaaccgcttcggaaacagctggcccggcgcgcgcggcgggagggacgcgagtgctcggaagagccgccccacgtgctttcggggaaactgcccgggagcgagaaggactgggattgagaggaaaccgaaaagcgaaagttagagcctgcgggagcagtacgcaggcgcagcacgcaggcgcagcggggctttcccgcagcccgcttcctcccaacggtttctccctggcggcgggcgcactgctcgcacgctcgccctggggctgcagatcggcttgcgggacggggtcccagagaggccggtccacgcggcccgcacgcgcgagtgttagctctgcacacgacggaaggcggaggcgcgggtggctgccgtttcaccttagagggagggagggaaacgtgtcctgatttctgcacctaaggtgctggaaaccttacccttgcacttccaccgtttctttccttgtcctgaaaaggtctcttttacccgcttcacttcgctatctacacagtttgcacttgcactgactcagatcttgtcctgtctggtaagctgtgaccctcagccagcctgggtagctgcccttgaaccagaggttggggtctggcagtttctataggcgtcctcaggctcggtctgcaaggggcttgcctctttcttctggggtcttctcgcccccatgccttctcagttgtggtgattataccagaaggaacgtgggagaagtataatggagaatgcttagtcactggacaatgatttcgaaagttcggctggctgaggaaacaagagttttgtgtaatgtctgtgacttactcaatggttctaggaggcacgagactgagtttctttgggctctgctcgcctactcttaaggggctctaccttcttagggtgaactcggcacccacctagaacctccagtgtgtgaaagggcctacctacctcattgggccccaacctccagcctcttgtgagagtgacgaccagccccaaaatggctgcacacaaacaagaccctaaggtacagagtcctactatgcaaatagacgtttattttcccctgttagaacaacacaggaccagctatgtaatttgcagggagggcccgttgcaaaatgaaaatgtggggtcccttactcaaaattaatgaagaatttcaagaaggcaacaggagagcatgaagccaagcgtggagcccttctgagtgcctgccctgtggaagccagacctaggtggggaatttgggggcatttcttgtatagcaaccttgttcgatgttcacttaaatgaagaaacaaattttataacaccactcacctgtttaaaagcctctgctggcttcaatttgcaataagaatccagggcccgccaatttgggctcacctacccctcttactcatcttatctcaccccatacttcactaggctcccctcaatccccttagcctctttctgttcctcagataccccaagtttttacctgcctgagccctatgcatacatacactggtcttttgggatgctgttttcctgactgtgttcatggactgcctccttcccattctctaggtctcagttcagtcatcatctcctcaaagacaccctcattgattgcttcttccagtgactgtatcacacttgcaatcctcataacacttgttaaacctatccctgtttattatttgtctgttttcatctctcctcgccagcgtgtaagttcacaacaggagggagtttgttctgtgttaacagccttttccatccagtattccatgagacaattcagtctaatcccccagggtatctatgtgtgtaatgaattccctgctctcctgtatatctagaatgtcactgtatgccatccctgggagaactgagaaaatcgtcaagcaaatcactttctgtgtcttgtggttcagaaaccctggttaagcaaagcaatgcctgatacaggcattttcaaatatttcaaaaatattttttgaatgaataaatgaacgtcactgaccaacactgagatcaggaatcacaggttaattcagccattcagatctcagcactggctctaagacctatcgagccacaattgaggggggaagagaataatgagcatgcatagcgcaaaaaacttccctaaaggacttttaatgagagctctactccttcacaccccttccaacctctcccctctctctgccctctctggacggcagagttctttccgtttgcggcagtctatcagtctgtgagatgtctaagaagatgactgtcaagcctgacataagagtgttgtggaggactttttttttttttgagtcggagtcttgctctgtcgcccagactgtagtgcagtggtgccatctcggctcactgcaagctctgcctcccgggttcatgccattctttgtggaggacttttactaggggcagaagtagtaatgcccttgagtgtaatggagagtttaggggaaatttcaggaacacttggttcatctatgagtaggtagatgtctaggatgttaggcatgcatgagataatacctagcatcaaagggaagttagagtgagcttataaactgtaattctagacaatgtctattggaagttcagggtgaggtagggaggaagtcctctctgtgtgatcaaaagcaagtgtgttttggttaatcaggatgaagcataacattgggggctgtttcatgattttagagtttggagctgttaggaagagaatttcagcttagttttgcaggcagcccaaggagcaaaggaaaggaaggaactaatgactgttcttgatgtgtccaaacaccaaatcattaataaatatttattcagggccagattgtactagattccagggatataactgtgagcagggctgtcttggtccatgtacatacagagcttgcttagagtctattgaggaaaatagatgatatcatttacaccaaaggagataagcactgtgccggggatgtagaggatgctatggaggaagcgtggcatgacctgagccatgcgcacacatgcgtgtgtgtgtgtgtgtgtatgtatgtgtgtgtgtttggcaggaaggctttccagagcctgaagaatgcgtaaacattatccaggtgcagggatatatgggatggggttggagaattgagaggatgtggcaggggaaacagagagaacatgggccatcaaagaaactgaaagtagttcagtcagtcttgtgtgcagatgttttggtggataagaagctgttggggaggagtgaagagagatgagttgaagactaagaggggactaaataatacgtgactttggaaagatctgttgcgaattgtggtctttatccaaagctgggattcttaactagtttttgtgacatggacctctttggcagtctgatgaaacctgtaagtttttcagaaaataatgtttttagttgaataagataagatgcataagattcaaaagaaaaccaattacattgaaatactgatatcgggccaactttgtgatatattaaaaccaactttgtgacatagtaatataaatgattctttttttttcttttttttgagacagag

SEQ ID NO: 32 - DNA, 6157 bp, Homo Sapiens; identical to SEQ ID NO: 31

SEQ ID NO: 33 - DNA, 6000 bp, Homo Sapiens
cttctgttttatatttatgattcatatggtaaaattcattatttttcttatacacatttaaaaagatatattttcttctttgcctactacaaacaataaatctggcataaagaagtaatgatttttaaagattaaaacatcattaaatgtaatttaaaaggataaagtaacacttagctttttggataactgttaagtccatttttacatagtgatcctaaagattcaaaatcacaacaaaaacttgatataagcaagtcctaaaattcattaggaaaacggagagtctcccatgaccatcatgtaacttaggatttatatcagcacacaggtggcaatatgcagagcagacacaagtgaatcttgtcctgccagacctctggggaaggagtctggattttcaagtagggcatggaagagtgtgtatgcatacttgtagccgagcacatgtatgcaggcatgaggtcacgcctactccacaaatgtccttccaaaggagtgtgaggaaatgtctggcctataaagctagttatcctcatatataccagtagaaacggacccaagcccagccccttggcactcctgctgaagcaatttgatttttcagttcagttttattttacctgagtggaaaaatctgtggctgtctccctccctgcttggtaactaataaggatctacctaaagcagatatgctggaccgtcaggcaatgggagctgcaacgcctcttattagccaagcgaacccaggtaacttactcccctatcaacaaggtgtgtgtgtgtgtgtttagtagacaggaacttgctctgtcatccaggttggagcgcagtggcagtggagcgcagttcactgcagcctccaacccctggactagagcaatcctcccacctcagcctcccaaggagctcagactgcaagtgatatggtttggctctatgcccccacccaaatcttacctcgaattgtaatataattcccatgtgttaagggcgggaccagtggaggtaactgaatcatgggggcagtctcccccatgctgttctcgtgataatgagtgagcctcatgacatctgatggttttataagccactggcatttcccctgcttgcatctattctctctcctgctgccccgtgaagagatgccttctgccatgcagaactgtgagtcaattaaacctcttcactttataaattacctagtctcgggcagttctttatagcagcatgagaacagactaatacaataaacacgagccaagaagcctggctaatttttaaattttctgtagagacagcctctcgttatgtttctgaggctggtctcaaacacctgacctcaggcaatccttccacctcagcctcccaaagtgctgggattacaggcgtgagcttccgcaccctgccacagttggttcttaaggctggttgagctagtacatatgtagcacctggcacagaagaggtgaattaataagctcatgtttgggctggccaggtggctcacgcctgtaatcccagcactttcggaggccaaggtgggcggattgcctgagctccggagttcaagaccagcctgggcaacatggtgaaaccttgtctctactaaaatacaaaaaaaaattagcagggcatggtggtgtgcacctgtagtcccaactactcgtgaggctgaggcaggggaattgcttgaacccaggaggcggaggttgcagtgagctgagatcgcgccactgtactccagcctgggagacagagagagactctgtctctaaaaaaaaaaaacaatgaataaataagctcatgttcacaaatctggagtcagtctcatctactcacaaaacctgttaccaactcagggagtggcatggccatctcccagtcactgagctcaaatctcagatttagggttgattccttccactccatcccaagacctgctccttcctgtctccaacattctaccttcccagtccagcctctgctgcccacagattggaccacatcaatctcctgtgcaaaaatcctatgatctgtccattcctaggcagatttccaccccaccccatcttcatccatcaacaaagcaacccagtcaccaaatcatttactgtttttcaactgtgcccaacatttctgctttgctccagctactcgcccttggaaacagcctctccacaaatttttgcgtctctaaatcctatagcattcaaagctatgtacaaaagccccttctttcataaagttgtctgagacttactcacaattaagctttctttgacttgcgtctcactgaattctgtacctctattagagcatcggttccagttttccttgtaaagctctgtgatgcctccagagtccccggcgggggaaggtgggtggggagggggtagagtagtggggtattttgctttttaacatcttatggaccttggacagtgccctgcatatactatgtgctcgaaacagtttgttgaattgaaattatgtatatttcagacggaattagaaagtaaaaagcaaaccatattatgatctcacaagtgtgagtccagcatcctcattaagcaatggttgcacaatggactgtgctggaggctcaagtcctgtttctgttctatgaaaataactccttatctatacaaacaacattcaaagcacaatcaaccacacctctgcatacctaccacagaactcttcagtaccggccagaaatttttttaagactatattattttggggtggggggtctgcaaaaactaaacatcacttttaaactctaggaagacattaagcccttccatctttgaacatagaaacataattaagattccgaagtcatgtactcattcatctgattccatgaacatttactgacctgccaccttgtgccccaacaagggcctggggattcaaccaaaggagcagctacgcacagcacgttaggtgccaagactgtcgaggttatatacacagagtgcgaacgttaacctagacagctctcgaggatggcatacagcaaatgaaactttctgcgaaaagaagaaaacgtgactgatggaaaggggtggaaacgggagaaagtgacggtaaatgggaaggtgcagtgccttctagaggaaaattatatttcacaagtcctcttcactgccagagcacgactggcaaggacaatcgtgctgagcagtgccatctccgagaacaggtggcactgctcgcacttggaatactcaggacgcgttcttcctctgggatcactattcgcgggtcagcacagacggcccgtcctcgcccggcgtccaactgcacggcccgaggactctgtccctgcgcgtcccacccccggcacccggaacctcacggccactcactctgcgcgcaggatccggaagggctaggcgggggcgcggcggtgcagcctctcccgagcgcgctgggtcgcctctgctcggtctggggtctgccaggcgcgatccccccggtgcagccgagcccctccgcagactctgcgcaggaaagcgaaactacccggcaggagaaaaggcagcgctggcgcccggcccccttccgcccccaccaatcaccgggcggctccgcgctcagccaattagacgcggctgttccgtgggcgccaccgcctccctctgcgggccgctgctccgcccacgcgctggggtatttccgccggcttccggcgggggccgccggctgggtgagctgcagcccagtcccgtgttgccacgctgggaactggcgttctgtttacatatcttagagaacgatcagaaggacgtgctgtgtttgcagaagcccaaacttggaggtctctgtagtagtttcatcgccgagaatccaggcagaggacagatttggcgacgtcgtcattctagaagctccctttagcaactgacctccgtgttgctaaacccagggaacgcttttctgtttttctcactttacttgacagctcggaagcatggggcagagttgacgcctttgttcttgaaacacgtttcttccttggtcatgatgataacacatccttcttgctttttcctgcctctggcattctttctacattgcctccacctccactatcaaaccattatatgttaaggttgtcagggtccagacattcgtcagcttctttacctgggcttctcctaaacgctgtgctgtgatgacctcacccacagcttcagtttccttctagatggaggagtcttaaatgcttatcccgtccacacctctcctctgggcttcacacctacaactcccacttgcctctccacttgtatgtgcagtgagctctacaaactatgttcagaaccaaacatctttctcctcaaacctgctctttttctagaaatggcacatgacagatacctaggattcatagttgacattgccttctccctcacctcgcaacacctgatcctcaaatcttaattgattcttcctcctaaatatttcccaagtctcatttactctgctccatctcttctgctgcctccttctgcagtagattcccgaatggctgcctcacttcagcccttatctaccttttaatccattctccatacaagagtttgagtgtttttttttttaattgaaaagcagatcatgtcatttgccaacctgaaaatccttccatggcttttctttgctcttataaaattcagtttcttaatacatactataaagccctggttgcccgatctctttgtccaaccccataatgtgccactctgctttgcttacttcagcatttagttcttcaaataaaccacactctccaaactcagggacttctcaccctgagtttggaaaaccccttgagccaacatctgcttcacccaactcttcgctggctaactcatcttttagatcttagtttaaaaatctcagcttaaatgtcacttctccaggtaggcattgctgaagccagacaaactaaatctttttggactatatgctcataaaatcaattagttccttcaagtagacgggatttgagtcaagccttgaataattaggcactttggggtaggagaaggatctgaataatttcccatggatatgcctatatgtgtgtgtatgagttttttttctttgcacatctatttgttcttcttgtcacaaatgcaccctcacaaagcaagttagcagtgaaattagacttctctgccaagagatgccacggcaccaaaagtgtcccttctgctcttactcacccaagaaccaagacaatgttttactgttctctgaaaaaagctgtattaatccatttttaacgctgctaataaagacctgagactgggcaatttacaaaataaagaggtttaatggacttacagttccacatggctggggaggcctcacaatcatggcgggaggcaaggaggaacaagtcacatctttcattgatggcggcaggcaaagagcttgtgcagggaaactcccatttttaaaatgatcggatcctcgagactcattcactatcacaaaaacagcgcaggaaagtctcgcccccataatttaatcacctcccaccagtttcctcccatgacaggtgggaattgtgggagttatcattcaagatgagatttgggtggggacacagccaaactatatcaaaagttgactctaggaagggtagattacatgttaaaaattttttttctggtactataaaacttgcacagatattagcttcaatattgatgaaggaatggaataatcctaacatctgcaaataggattatttggcactccaaatcccaatttggatcatcaagatctgtggatgcttccttccctacccccctttattttagcatccacagcaatacctaccataagccttcatcacttgagaattggaatgctatgctaatctctaggtatactacctttttcttgtctctttctccttcactatatttgccaaattcaattccttaaaatactgcattgatatagtcattccctgct

SEQ ID NO: 34 - DNA, 6113 bp, Homo Sapiens
ttacttcacttgctctgtagctccatttataagagtccttcagttcttaaatatgatttacatagtgtaactatcataatatcaagggtattcatgatagttgccatttattgagcactcactctatgctaggatctggtattgttcatgtatcttatccatttgatctgcttaaaagcatgtagttatctttattttttattttcagatgaggaatctgaatctttcaaatattaagtaacttagtatgtgctggaatttgtatatgaaaacccacattggtttgaatctaaagctcatccaaagcactaagctatgctgtccccatgatctaggttatgtgcctagatcatgtaaatgttcaccctataaatttccaactggaaaaagactaagcaatttccaatataaacagtccactttcccaaaagtgaaacatttctgatgactgatctgcacaatgtgttttcatctcaataagaagagtaagaaaatggaaagtattgcatatgttaaatagcttgatttaacctcattgtatacatatatcaaaacatcatgtcatatactacaaatatgaagttacttgtcaatcaaaaaaaaaaagaagaaaagagaagaacaggcctagaacagaaatgaagcctatgggagcataaaggtgcaacagtgtagaccaactgcgtgagctccaaacaaagtctccaaaagaatcttttgaaatctttgggcaagtctctcaatctctctgaatcacaattgcctcatccaccagaacagataacagtgcaggcccctacttcactttggaatgggcatgacacttttctagccttatttcccatacttggtcataccctcacatcaggtctttattccatgtaaaagatttgctgggaaggcctttgaggggcctcttcatctttccacagagctttccattaaacagaggcaaaattaaaccatgtcctttttttccatggcactctgaacccttctcatcatgtgatctattagaattacttatctatgtatctggcccacaccactgagctcctggtgaacctatactgctccccttcataaaatataaagcaggtggctcacacaaaatacactctcaacaaatgtggaatagaaggcatgattcatgattatttcattctactaaatgcatgatattatttggactacgcactgtgatataccattaaaaataagtgatttttaaaaaaaaatttccagaattaggacagatgcactgtgactcacgttattattattattattattattattattattattattattattttgagtcggagtcttgctctatcacccatgatggagtacagtggcatgaccttggctcactgcaacgtctgcctcccgggttcaagggagtctcctgcctcagcccacccgagtagctgggactacaggcgcgcgccatcacgcccagctaatttcctttgtatttttagtaaagatggggttttgccatcttggccaggctgctctcgaactcctgacctcaggtgatccacccgcctcggcttcccaaagtgctgggattacaggcatgagccactgcgcctggcctgacctacattcttaaaagggctgtgttactgaaacaatcaggaaagaatcatatctccaggtgaaggaaaatgaacaatgctttttctcttcctcaagtcaagaaaaatccagttctttagttgacagtacatccaagttagtcaaattaagtagcttcctgtctccgcttcattttatctacttgtcatgattaaatatcctactaggttgtaagtgggccctcaacgctgacctttttatcttgggatttgagaggcacagtctagagcactactcttcacctaaatgccagtatgccaccagtagaaattatcctttaggctaaatattgttcttcccagaaaccctcttttcaaggatcagtttaaacctaaattcatcagagaggaaaacagcagatttcagagtcagatgaagaattcatatccacctggctttgaacattatcggctgtgagatggtgtaggtaaaattttaagtgcataatttggcaataataaatcatcaataaatattaatgttgatgaggcccctgggccacataaagaaatagggagtgaggggatttgaaattctggccacttcacagaaatgggtgggaaggggctcttgattgagatagaagcccatcctacatgaagcaattcctcattgagttctctcgtcctttatccttgttggaaacatcaggcaaagtcactcttggtcttaaagtacttttacatctaaatacggaactcttctatttaatccctgtctgttgtagatgttaagtatacaaagaggttgtcagagtttgaaacatctggacttctgtcaggtactagctccggaactccagtcctgctcgccctcaaaaacggcttgcagctagaggtttaagttccacttcctctcagcgaatccttacgcacgagggaggcggggcgtgtgtcctccgcgcgtggttttcgggtagcaccttctggggcgccgcctgcctccacccacggccgggccttgacgtcatgggctgcggccccctcccggctgagcctataaagcggcaggtgcgcgccgccctacagacgttcgcacacctgggtgccagcgccccagaggtcccgggacagcccgaggcgccgcgcccgccgccccgagctccccaagccttcgagagcggcgcacactcccggtctccactcgctcttccaacacccgctcgttttggcggcagctcgtgtcccagagaccgagttgccccagagaccgagacgccgccgctgcgaaggaccaatgagagccccgctgctaccgccggcgccggtggtgctgtcgctcttgatactcggctcaggtgaggattcaccggcgctgaactgctgggctctcctcccatggcaggttttgcctcttgagtttggctcttgcttctctaaaaatcgccctttagttcccccgaccctgcgccgcaggaggtgatcactgtagctccctccctaggaggaaaagagaagggcagatgtctcaaacgtccaggacaaggtgtcccagagaatcgctgtactttttctttagttcagctgagaagacgggagagatcatttgaacctaacccttcgtttcacagattaaaagattaaaaagaccaagatctagagaggtgaagtgatttccgcagatattggacccagcagtgtttgctgcctcctgcctaattctccatctctgtctagtgatttcttctttaccttcctagagggacttagagtatcccggcgagaggttaaaagcaccactctgatgctgttttattgagacctaagaaaaagcaagataaagcagtggcttaactctgggccccaaatcttacttagtactcagtttattgtctatgtagtaataataataatgataatgaaaaatgacaataataatcgatataattaaccactgtttatattattttaaaagattatcttttaaaaatatcttttaaaaatatgaacacatcttttaaaaatatgaacacatcttttaaaaatatcttttaaaaatatgaacacatctgaagaaaatctgatatttgtatctaaaacctaccgaaataggccaggatggcattctagcaaaaaaagaaatgcatttggaatgtgaagtgatgggaatttttagacattacccatcaagtaattgtattagattaatttgccaatttggcgggatttttttgatgtggaaattaatgtggattatctgtggaaaagaaaaacttcagaaaagcacttctgtaattgggacagctgaatttgcttgctggcaaaaatgtaaagtttctttcatagaaatgactcaatcacaaacaatagcacatgtgcaataactgctttgatgtcaaaagataaacttttctacctaacacagctgactcgaaaggcaccctactttaccttttcttttcttcctttattccctcccctgcaggccattatgctgctggattggacctcaatgacacctactctgggaagcgtgaaccattttctggggaccacagtgctgatggatttgaggttacctcaagaagtgagatgtcttcagggagtgagatttcccctgtgagtgaaatgccttctagtagtgaaccgtcctcgggagccgactatgactactcagaagagtatgataacgaaccacaaatacctggctatattgtcgatgattcagtcagaggtgagtaggggataaagcaaaaatatggcctgtgagatgtgggtttatatgagcaaagctgcttcagaagtaaagctgctccccagattttctagtggctttattgtatatctgttggatagcccctaggtaaactgtgacaaaaagaaccataatgtgggcacatcctatatggccagagtgatcataaatggtgtatgtctcatttttaaacctaatcttcacaatgactttaagtaggaattgttatcctcattttacagatgtgataactgaagccgaaaaaggttttgctctaggttctacaggtgacaagcagatgagctagaattagagctccagtctgtttgattctatgcagaagagacactaagctctttcccactatgctacatgacccccattctgagagacaaatttagacattaaccattcctatctactttgtatcttagcttttgtatccccttccccaacaccacccttccccagataactgcattttaacacaaataaggggacaaggaagtaatgggacaggaggcattagactttagcgtttaagtactaggtgatgagaagctgatggaataataataataatgccatctggaaatattaaagaagggtgaatatacttagattttgtattgctaaaatcactctttaaccccaaatcccatttgttagttatataacccatggtttctttcactttcctgttatctcatattttaaaaaggccctttgcttggagtgaaagtaccaaagtaagagagaaatattgcatactttggagtctgaaggaagaagaagttaacagtaaataagatctaaatatcctaagagcatccactacagaggcagggcaagatggtttcagagctgttgaaggccttttctgtcctgacttgagtttccctggcttctccccctcttgtctggttctcagaactggtgaagggacatcaagtggtaccagagggacagtgacttgggtgagtgggaagtgagaaaacctttagcgaacactccacttaattcccttccttctcaaagtgtgcttttctgtgaggtgggtaaggggttcatttgtgcttatttttgaaggcatgagattagacccatcaaggtgtctagaaactgttctcttaaacatgtttcaagttgttaacacttcagaaggccaagtaaatgattagtagtacaaatgatgactagtgctcaaaattgcaatgcattgtgaaatagagtgaaaatgttggctgaacaccttcgaaaggctaagttaaatgtccatgatgttagtgcttatcgcaacacttcagcatagtgacttttttatttgcctctgtctatagtttgtaatctatctgacaaagtgaagttacaacgttcattcaaaatatttctcttaaaggacttttctgtcttgtgcttttttatcgtcagagaaaagtttcaatataaaaatcgcataaccacctcttaaacatttgctactaattttacttttgttaaatgttattataataaactgctaaaatactcagtatttattttccatttccttaatcacagatattctatctttgataccctagttgaccttcactatgtttctaatgttttgtattgaatgggtgctgcatgaccattatgactaatggtattttctctttactgaaatctgtttgctaaatattcacttggataaacctcttcagacattagtgtaacaaaatgcacagcactaacatgcaaagccatttgctatctttagtatgtgggta

SEQ ID NO: 35 - DNA, 6113 bp, Homo Sapiens; identical to SEQ ID NO: 34

SEQ ID NO: 36 - DNA, 6190 bp, Homo Sapiens
ctgttctcgcggtgtgggtcccctgggggtagggccaaggcaccaagatggatgaggacgagggtcctggctgccaagggtgaggggctgagggttggagaggcccttccagtggccccttccccgtagagcgcatcagccagacggtagagattctaaaacacacggtggacattgaggagaagggagtcaagctgaagctcaccatcgtggacacgccgggattcggggacgctgtcaacaacaccgagtggtgagtgaggcctgctgagaaaggccttgcctaggcggccacagcactcgaggcctggcctcacctccctcctgcccacagctggaagcccatcaccgactatgtggaccagcagtttgagcagtacttccgtgatgagagcggcctcaaccgaaagaacatccaagacaaccgagtgcactgctgcctatacttcatctcccccttcgggcatgggtgtgtggctgtcctggggccaggctcgggagtgcagcccctacaatatggccccctggctgtgcctatgcccacccttggctgctctcggcaggctgcggccagtggatgtgggtttcatgaaggcattgcatgagaaggtcaacatcgtgcctctcatcgccaaagctgactgtcttgtccccagtgagatccggaagctgaaggagcgggtgagcctgccgtcgcacaggggcctggccagggccctggggctgagagtaccagggggacttgtctggcctcaaatctgatggtccttgccccaccacagatccgggaggagattgacaagtttgggatccatgtataccagttccctgagtgtgactcggacgaggatgaggacttcaagcagcaggaccgggaactgaaggtgaacatgcagactggtggggcaggggggatggagctggtgaggggcagaaccagagggctttgtctccttcacattgagcctgctggaggagggccaggtcagcccagttgggtgcaagagtcatttgttctaggagtagaggacctgtacccccttcatccagggctagaaggtaaaggtcaccatgtctttgcctggctggggtgggtcatgtgggccccgtgtggtgcttggcaggtatggagcacttgcccagatccagaggtgcagcagtgggccaggcccccaaccccaaccctcttcccatgggtcaccagaggaaggggctgccccagtggcacaccctggctcccagatttctgagctccagggttggtggctttgggtgccccggcagctagagtgatgatggagaccatgccaggggcaggtggccaccagggcaggggcatcagcatggggagacataggctcagccctggggagggaaggggcagctggagggggtggttcttgatgagggaggagatgaggagggagcatgcctggttgggcatagcctggaaaggccctggaatgtgagccacatgggctctggctccagccaggggcagagaggccagaaaggggcaacgccaggatctctttgaggagagatagttgatggtgatgctggaggggtgccccgggagttacatgcccgtttcccatcagtaaccgtgcaattacgctcaccgggtgtgagcctttctccctccttcccccaggagagcgcgcccttcgccgttataggcagcaacacggtggtggaggccaaggggcagcgggtccggggccgactgtacccctgggggatcgtggagggtgagtagagtcttggggtaccaggtctggtgggggaaggctgtcctgggccggcgccagcccactacccacccccaccccgcagtggagaaccaggcgcattgcgacttcgtgaagctgcgcaacatgctcatccgcacgcatatgcacgacctcaaggacgtgacgtgcgacgtgcactacgagaactaccgcgcgcactgcatccagcagatgaccaggtgcgcgccccagccgcgagccagacctcgcccctctggccccgcccacgtctccataactgagggccggtcctgtcagcccacccagacttgaactttgcaccattccctaagccccccccctcccccagagcctggtctccctagaaccaagtccagggctgtgagggctccggagggcagggcctcagcagtggcggggatgggccaggcatcgccagcccacgctgagcctcccggtggcgccgccccgcccatcctcccccccgccccgcgcagcaaactgacccaggacagccgcatggagagccccatcccgatcctgccgctgcccaccccggacgccgagactgagaagcttatcaggatgaaggatgaggaagtatgtggggcggcgggggcggcggaggcgggcgtcagggatgctcctccgcggtgctgctcacccgccgggttgtctccgcccgcagctgaggcgcatgcaggagatgctgcagaggatgaagcagcagatgcaggaccagtgacgctcgccgcggacacaccgtccgtctccgggacgccctcgcacccctggacaccagaccggactgttcccgacccggagacgcggggccacagcccccagctgaccctaatttattctcagcaccaccccctcccaggtcattgtgtctgtttccgaggggcctggaccgtagcccccgcccagctggccctctctgaccttgggggatcaggagcgaagttgggcgggacttcagagatccgcctcccttgcccttcccccgcccccggacggtcacagcacccaaaccgcaggccctgctctggcaggcaggcaaagctaggcagaagaggattcccaggatcctgggtctgttccctgccccagtgctgcagaacggacttgggagccctcctttgcctgctcccgcgggtcacccagcgagtgctgagaccccattttctgtcgaggcgggccgagtcttcccttatccccagacgcctagcgggcagggttgggctgaatcaaatgggagccctccagacataaggaggccagaggctgcaaggagcggggtcgtgaccgcttacaccccttctccacagcccggcccgacctggagggcccccggggcactgggcggtgagccacctcctggcaactctcggtgccgtcccctgccctcgctcgaggcctcttctccccagcaccgctgtggtgtgccgggatcctgagcctaggcctcccgatgttcccacccgcatgatcccttcccgccacacgatgctccgttttcttccgttgtgaatgccgcgtcctgtcctggtgacaggagaacaatgttggtgaacgtcgcagcgggtgtccgagtgctccgtgtgcccctgagagcgggtgggagcggaagcctgagcggcctgcggcctccggcgatagtgtgctatctgccgctgcagcgcgcgtccgcgcggcctctgggctatttctggccaggccgcagcactgtggtcggtgcgggcgtggcaggggcggggcggccttatcgctcggctctcccgcctacgcctcccgctgcagagtaagccgggctgccgtcttctcgccatgggctccggtgagtctggagtccggtcgggcccccggctgctccctaggccgacccgggttgagaggagctctggtcgtttggctgcagctgggagagacttgggtcagacttagaggggacttccagccggcgtgcggggtggtcagggtggagaggctggcgggctaccgggacgccgggcatcaggggctggatggagccgggccggcagtctgggtactcagagatgtcgcccaggtgcccgccgaccgctcggcttactgcggcgcttcccttgcagggccgcgcggggcgctgagcttactgctcctgctgctggccccgccgagccgcccggccgcaggttgcccggcgccctgtagctgcgcggggacgctcgtggactgcgggcgccgcgggctgacttgggcctcgctgccgaccgccttccctgtcgacacaaccgagctggtgctgaccggcaacaacctgacggcgctgccgccggggctgctggacgcgctgcccgcgctgcgcaccgcacacctgggcgccaacccctggcgctgcgactgccgccttgtgccgctgcgcgcctggctggccggccgccccgagcgtgcgccctaccgcgacctgcgttgcgtggcgcccccagcgctgcgcggccgcctgctgccctatctggccgaggacgagctgcgcgccgcttgcgctcccggcccgctctgctggggggcgctggcggcgcagcttgcgctgctgggccttgggctgctgcacgcgttgctgctggtgctgctgctgtgccgcctgcggaggctgcgggcccgggcccgcgctcgcgccgcagcccggctgtcgctgaccgacccgctggtggccgagcgagccggaaccgacgagtcctgaggagagaaccggtgcgtcctgaggagagaaccggcgctgggcaacacgggcctgcaaactcgacaggaccctgcccgaggggccctcgcgccaacctggaccggtccccgcctcctccgctgcccaatctctcagacccaccccacctgcaggcccagaccacgtgggacagaactcctgcccaccctaccccgagggaggcgaacccgcacttccaggcttgggaggaccatggggcacaatgcggtccagaccctgctgcgtctcccttccaaactctggtgctgaataaacccttctgatctggtcttctctgcacgactgacctggaaattcccctcgccaaactcaggaaaaggccccaggaggcggttcaaggggacacaaacacatcctcacatgcccaccctaacctcaggggcagacaggagtcagtgggtgacctctccccttccagacacactcccaaaaggccacatgggaaggcatgagagagatgctaagtgataacgtgggggccagtgaggacgttgtggggacactgaggaccctgtgggggcagtgaggatgctgtggggatgctgtggggacagtaaggacactgggggcagtgaggacgctgtggacactgcggacgctgtggggacaatgacgctgtggacagtgaggacgctgtgggggcggtgaggacactgtggagtgaggacactgggggcagtgaggacgctgtggacagtgagggcgctgtgggggcggtgaggacgctgtaggggcggtgaggacgctgtgggggcggtgaaggcgctgtggggatggtgaggacgctatccggggcggtgaggacgctgtggacggtgagaacgctgtggggacactgaggatgctgtgaggacgctgtgggggcagtgaggacgctgtggaccgtgaggacgctgtggggatggcgaagactctgtgggggcggtgaggactctgtggacggtgaggacgctgttggggcagtgaggacgctgtggaccgtgaggactctgtgggggcggtgaggactctgtggacgcggtgaggacgctgtgggggcggtgaggacgctgtggacagtgaggaggctgtggagacaatggggacgctgtagacaggacgctgtggaggcggtgagggcgctgtgggggcggtgaggacgctgtggacactgacgacgctggaggtaacaatgaggacattggggacaatgagtacactgtgggggcggtgagaacgctgtggacactgaggacgctgtgggggcggtgagggcgctgtggacgcggtgaggacgctgtgggggcggtgaggacgctgtggggaccgtgaggacgctgtcggggcggtgaggacgctgtggacgcggtgaggacgctgtggggacggtgaggacgctgtggggaccgtgaggacgctgtcggggccgtgaggacgctgtggacgcggcgagggagctgtcagggcggtgaggacgctgtggacgcggtgaggacgctgtggacgcggcgagggagctgtcggggcggtgaggacgctgtggacgcggtgagggcgctgtggggacggtgaggacgctgtggacgctgtcggggcagtgaggacgctgcggacgttgaggacgctgtgggggcgatgaggacgctgtcggggcggtgaggacgctgtcggggcggtgaggacgctgtggacg

SEQ ID NO: 37 - DNA, 6231 bp, Homo Sapiens
tcctctttctgctcaccccaggcagacacaactgcctatgttcccccgatgagaggaaacaggctgagagaagaaaaatgactgctccaggattataccacagtggagagcgggtcacaggacatgatgcagggtccaggtttctgttttgatcaagtcttacatgcccattcagcttctaggcccccctcacctccctgccctcattcacaagtggccctgagacacgtgaacacctccctcctatgcatcacaaaccttctccaccgagctttggtgctttggcctctggcacacctaactagcattggcagaggagagtctacactctcttcctcattcagggaagatgctttaagaaatcctgcctctgtgcagcagaggagctggaggcagctccccaggcatccctccccaaataaaggcttatgtactggtgaagtgtctagataggttctcttgactggacaactcctcccaggatcagctagatagggggtggggaagggggatcaagagacgggtaggggatacttgtagcatctggagctaagggaaaaccaccccactggcctggtgtctgagttgccctgggttgctaggggcctgccctacacccacatcaagacccgaacctggggatctcctttggtggaattacaaccagagggccacattcaacgagataaccctctgcatgcctggagacccctgaattctgtccacctcagttcatacccaacctcccctatgcacatggaaggcacacctagacagcctccaacaatcagaactcacacccaaggcctggtctgacccaaattcacacccacacatccccatccaataagaatccatacccaatctttttttttttttttgagacagtttcactcttgctgcccaggctggagtgcaatggcacagtcacggctcactgaaacctctgcctcccgggtttaagtgattcttctgcctcagcctctcaagtagctgggattacaggcacccaccaccacacccagctaatttttgtatttttagtagagacggggtttcaccatgttggccagactggtgtcgaactcctgacctcaagcgatccacccggctcgacctcccaaagtgctagggttgcaggtgtgagccaccgcgccccgccaaatccatacccaatctaaagtcacagaccacatgtcacagacaagatttgctgtgttgagtgtgttcattccttctttctttttttttctttttttggagacggagtctcactctgttgcccaggctgtagtgcaatggcgtgatcttgattcactgcaacctctgcctcccaggttcaagcgattttcctacctcagcctcccaagtagctgggactataggcatgcaccaccactcccggctaatttttgtatttttagtagagacaggttttcactatgttggttaagctggtcttgaactcctgacctcaagtgatccacccgccttggcctcccaaattgctgggatcgcaggcatgagcgaccctgcctggcctaagttcattctgtcaacagcgtttttggtttttgctgggtgtagtggctcatgcctgtaatcacagcactttggaaggccaaggcaggaggatcacttgagtccagaagttcaagaccagcctcctgggcaacaaaacaagacctcccctctaaaaaaaaaaaaaaagaaagaaagaaagaaaagaaaaaagattatgtgattatgtcattccagttacttgggatttgaggtgggagaatcactggaacccaagaagtcaaggctgcaatgagccacgatcttgccactgtactccagcctgggtgacagagtaagatcctgtctgaaaaactaaacaaaacaaagaaaaaaaaaccataaagttttttttttttttttttttttttttttttttttttttaagatggagtctcgctcttgttgcccaggctggagtacaatggcatgatcttggctcaccgcaacctccgcttcccaggttcaagtgattcgcctgcctcagccttcccgagtagctgggattacaagcatgcaccaccatgcccagctaattttgtgtttttagtagagacggggtttctccatgttggtcaggctggtcctgaactcccgacctcaggtgatccgcctggctcggcctcccaaagtgctgggattacaggtgtgagccaccgtgaccagccaggttttcgggttttatctgtttgagacttggtctcactctgccgcccagcctggagcgcagtggtgcaatcttggctcactgcaacctctatcgcccgagttcaagcgattctcctgcctcaacctcccgagtatctgggagtacaggtgcgcgccaccacacccgtctaattttttgtatttatagtagaggcagagtttcatcatgttggccaggctggtctccaacttctgacctcaagtgatccacccacctcggcctccgaaagtgttgagattacaggtgtgagccaccgcctccggcctgtttgtttttttgagacaggatctcactgtgtcacccagcctggagtgcagtggcaccatcatagctcactgtaaccttgaactcctggcctcaagtgatcctcccaacttggcttcccaaagtgctacgattacaggcgtgaggcatcgtgtccggcctcaacaacgttttttgaagtgtctattctgtaccaggtgcctaaatgtgcttaaattaagaagggagtaaacgccaacaaaatcccatatttacaggtctatcactgacccccaaaaccctatttaaggcgggaacctggcaacatagcctggcagtgagctggccactcagtaaatgctccgatttgcagggtcctcgagccagaggcactttgaggagaccctgatgcagccgcctccctttctggagtgaaccgaaagcaacgcgacctgcctttcatcacgcagccggcctggcagtacccgtctccaacagggctggggattgcatttacattcacacctgcatacacttccgaccctgctccatccaaactcaaaacaccgtagaaccaaaacgggctcccagaaagccttgctgggaagaccgagggtcctgcggaaaggattctgcaggctgaaggctaggcgcctcgccactctaggactacaattcccgagaggccttgcgacggaagccatctttgttccccaccaggctaagcgattttccggagggggagtaagatcccttgcgtcaccggcgcgcgcagctgccgtcgcggagagatgatgtttaggtccgggactgtcagtcagtgcgcggccaggtacgggccgacgggcccgcggggccggcgccgccatggcggccgtgtttgatttggatttggagacggaggaaggcagcgagggcgagggcgagccagagctcagccccgcggtgagtgccctgccctggcgcgactggatcctggagccgatcctgtcacccagccgaggccggagcggcggctccgcacgcccagagcgggctccgactctttgcagacccagatccttctcagatcccggtctctattaagttctgatcccaccctcaccccgacctctcttccagaaccccagccttttctcccgattctccctttcctgccttcggtttcttcccaattcttacccatcccctactagctgccatccctgacacccttctctcctgggccacgcagtccaacctgaacgggagcggggaggtatcctggcaccttccttggctcttacccctcggtttctcacaggacgcatgtccccttgccgagttgagggcagctggcctagagtgagtgagggtcgtgttgggggaggggggaatggagtggggaaggggaactggggagcactggagccttgtcctcattaactccttgtgtccgtaggcctgtgggacactatgaagaggtggagctgactgagaccagcgtgaacgttggcccagagcgcatcgggccccactgctttgagctgctgcgtgtgctgggcaaggggggctatggcaaggtaggggcgggcgcaccctcctcctggcctcacagcctccatctggaggcagcaaagggttctcaaaacaaattagacttgtgaatcagcagggcctctaatgggattcagagccagaaacataaaggagggaaggccaaatcctctccaatcggacttgaaatcttcactgccccacccttggcagggcctaggcctcctgatcccaaagccagagcttcagggtggggcttcttgaagataggatgtggagagggaagttgatcctgtctcccctgccctacaggtgttccaggtgcgaaaggtgcaaggcaccaacttgggcaaaatatatgccatgaaagtcctaaggaaggtgagtcactcgttcagccaacgaatactgtgtggctgccattcccaacatgctgtaccaggctttgggaagacagcagggaacacagtggaggaggatccctgactttggcgtttgctggtttattgtctgttgtgatgtgtattgtcttgcagtaattctcaatgggggcaattttgactcccagcagacatttgacaacagtgtctggacactattttattttatttttttttaagacggagtcttgctctgtcacccaggctggagtgcagtgacgcgattttggctcactgccacctctgtctcccaggttcaagcgattctcgtgccttagactccggagtagctgggattacaggcgcttgccaccacacccagctaatttttgtacttttttgtagaggtggggtttcgcctggctggtctctaactcctaatctcaggtgatctgcccgccttggcctccaacgtgctgggagctgggattacaggcatgagccaccgtccctagcttttttttttttttggatggagtcttgctttgttccccagactggagtgcagtagtgcactctctgctcactgcaacctctgcctcccgggttcaggtaattctcttacctcagcctcctgagtagttgggactacaggcttgtgccaccacacctggctaatctttgtatttctatttgtttacctacttattttgagacggagtctcactctgtcactcaggctggagtgcagtggtgcgatctcggctcactggcaacctccacctcccagggtgaagtgattctcctgcctcagcctcctgagtagctgggattacaggcgtgaaccaccactcctggctaattttttttttttgtatttttagtagagatgggtttttgtcatgttggtcaggctggtcttgaactcctgacctcaggctatccgctcaccttggcctcccaaagtgctgggattacagccatgaaccaccgtgcctggcctagtttttgtactttttagtggaggcagggtttcaccatgttggtcaggctggtctcgaactcctgacctcaggtgattcgcctgcctcaacctcccaaagtgctgggattacaggtgtgatccactgcgcctggcatggacacatttttgattgtcaaggcaagaggggagtgttactggcacccggtgggtggagaccagggatgctgctgaacatcccacgatgcgcagggcagcctcccacaacaaagaatgacctggtcccaggtgtcagtagtgccgaggttgagaaaccctgtgttagaggataaacccatccctgaaaatgatggtggctgacagcagcagaattatggagaaatacaatgcagtgacagaggatgcagcagttaacaaacagatggatggtctgaggagctctggttgcccccattttttttttttttttttttttgagatagtgtctcgctctgtcacccaggctggagtgcagtggcgtgatctcagctcactgcaacctctgcccctgggttcaagcgattctcctgcctcagcctcctgagctgggattacaggcgtgtaccatcatacccagctaatttttctatttttagtagagatggggtttcaccatgttggccaggctggtctcaaattcctgacctcaggtaatccgcctgccttggcctcctagagtgctgggattacaggtgtgagccactgtgcccagcctggatgcctcagtttctaaccaattcctgtatctccaggccaaaattgtgcgcaatgccaaggacaca

SEQ ID NO: 38 - DNA, 6239 bp, Homo Sapiens
tacaaaacttagctgagcgtggtggcagtcacctgtaatcccagctactcgggaggctgaggcaggagaatcacttaaacccaggaagcagaggttgcagtgagctgagatcacaccattgcactccagcctatgggaaaagagcgagacttcgtctcaaaacaataaaataaaataaaagtcctctttattctattatcgttgctaacaatgaccccctcctctccaacagcaaagctccagaagaaccgtccacacttgccacctctactgctcctctcccctcccctgagcccatccccacctggcttttttgtctccaccacattgtcaggctcatggctgacacctactgctgccaaacccaagggtcaattccaccttccccgtacttgcatcctcagcagaatctgacaaggttgatcacatcttacacttttttcttcacttcacttccaggtttatctaccacctagtcgtcctgtctttccctccttgctgggtcagtctcatttttgccagatcaagggtctggggtgactcaagaacgagtccctggaccctccacttctccatctacaccttcaccagggatccatatcacccagtgcctcagctctaaatgccttcatgaggaccactcaaagtgcgtcttctgccctagtctctccttggactgtcagacttggatatccaaggatttgcccaggatctcccaaaaatgtctgccaggcacctcaatcctaacatatccaaaactgaacctcttcccttctccacttctcacctccctgttcatgggtgtgccctgagctcaggcctagaatgacttctccatctccaattactccctagccgagtacatccagtctctttgctttcagtaccatctacaggctgaggactcccaaatattcattcttcagcccagacctctcccctgaactcttgatctacattttctactttctatgcaacatctgcacctgattatctgagcggcatctccattctaacatgtcccaaacagaagtcctaatctctccccactctcacctccccaaatctagtctctagacatcctcatctcagtgcatggcaaacccatcctgtcagttgctcaggccaaaagccttggcataataaccctttacgaggttctctctcgcaaacccttcatttaatccaccagcatattctgtaggctctgccttcaagatcactgctcaccacctctactactaccacctggtcaaaccattattctctctcccttgagttttttccaacagcctcccaatggcctccccacttccacccttaccctgtcatggtccattcttaacactgaggccggcaatctcattaacaaatcagatgtgttgatcctcagttcagaagacccccatggctcccaactcaatcaaaacaatgcaaactcctaacctgcatagacaggcctattgaagtctcacagaacatggaccctaactacctctctgacttcatctcctcttcttgtcaaccgtgtaccagccacacaaggctttctttctgcaaataagtcccctgccataagcatttgcacttcttgctccctttattacgcttttcccccaggtgtgtagttcagtctttcatttcactgaggtttctttttttttttttttgagatagagtttgctcttgttgcccaggctggagtgcaatggcgcaatctcggctcacccgcaacctccacctcctgggttcaagcaattctcctgcctcagcctccagagtagctgggattacagacatgcaccaccacgcccagctgattttgtatttttagtagagacagggtttctctatgttggtagggctggtctggaactcccgacctcaggtgatccacccacctcggcctccgaaaatgctgggattacgggcatgagccaccgcgcccggccttcactgaagtttcttatcaaatatccccgcactctggcctgggcaatggagtgagaccctgtctcaaaaaaaaaaattaagattaccattttacaattaagcaaataattccatgatgaagccaggcccagactacaggctgcagcccttataaaaaaacagtgggtaagtaaaagttgataaacagcaacaaggaaatgcacacttgtgttaatcaaatatttaatttcacacatgctctaatgctttacttcccttacaattctaagtagcagtctaatgagatcacataggcctaacaacatttattcaacattcttctgacagaagctacaggcatttgctccaatttattctacctttctttctagggaaattgaataacaagcagaatggaataagattctaatccagaattctggagacaacgccaaggagactgcccttcaggtgactctaatctgcaaccagattgaagaaccagatgactttcacaggatccattcagttcaaaccagaagtcctactattttgaatagaaaagctgttaggctaatagcgcaggaggtttatacggtttattccttcctccctcagacctgtgcatgtctgcagagatgaagggaaggacgaactgagtaggttgctgaaaaacgtttaattcaagggacaaggaaggttacggaagaggaagagacattacgagagttaaggacagtggctacgtctacctcagccggatggttcttagaaatggagactctgaggcctaaccccaggtctaaaaaaacagattctgcattttaacgtccccagacgatttgtatgcaccggtctgcatccctagttctcaatgaaacctaagaatcatctggagagtttgttaataactagacacctgggtcctacccctcagagattctgatttaccgggctctcggtggagctatatgtttaacaagcactgcaagttatcccggtacaactgctccaaggtctacggtctgagaagtacggaccgggaaggcctctgcaaggaggttctcattcatcaattcacccactcatccagccaggacaagggccttcttaggctattctatctaaagcggcccccgttaaaccgcactcctgcttttcctctgtaacacccaccccagctgcaagttctccgtacgcttaccgtctgtctccccacccactagaacgtgaactccaacacagcagagaccttctgtgcttttcttacccaggtgatctcggaggacaaaatccaatctgaagcccacccacccctcccgcgcatgtcaacaccactcaacaaaccccttgtacctctagctgtaataagtaacaagcagtatcctacagggcgcctcggtgcccaggagcggatgcaaaggcgctgggcgggcacaaggcagcgccaaggacactcagggacggaggaaccgacaggggacttgacgctccgccactccgaccagccgccccttgtccccgccgtcctcgtccgccactgagatatcccccacggtctacccacccgtcggctcccacctgcgacccaaggacccaagtcttccaagagctcagccgttagaattcaaaggttcttctttttaaataggagttaaaccctctagctagaaagccgattggcctgcgctcgagcgaggctgccttgtgattggttgacaacaaacccgacgccttgagtcgcgtttaagggcgcacaccgcgcgcaggcgcacttgctccctaagaacccggaagtggtggagccaacggccagccagacctgtggcagtcccagccccagggtgctctccgcggtcggccatttatcggtgaagcaacagccccttgacgtcaagcttgacgcattggagataaagtccaaggaggtgaactaacctttgaacgtgccagtaagtaagatggcgagaaaagcaagagagagtgggaccgatcgatagcgcagcggtcggcttggcgccctttcagcgtgcgcagtgaacgtgcgctcggagcggtagattgggcaggattcgcgcctccatttttccaggagagagcgggataccaagagaaccggaccagctggtactgggacacggggagagtagctggtgcggtcggctggggcatttagagaaaaccacagaaacgactggggcgagactggaagagtcgagagttagcaaggtggcatgcgcctctactttgcgtttcctaagttgcccggcttggcctgcaccccttcctcttctcgaagggcctcgcttccattcccacccagtccttagttcgcctctgcatccagatggtcgcggcgcatatagtgagggggcatctgtgttctagcctttccaactgcgatgtatccggtcctggatcgggttcttgtcctcgtgtgctcacctgcaaattggggataattaggcttctgtttacctggcgagtgaacgttctgtgggagttgagaagttaggggtgggccacttaaaatatatatatatatacacacacacacacatatacatatatatacacacacatatgtgtgtgtgtgtgtgtgtatgtacacccgggatgtgctcagcagaagtgaagagaccggatagaacagtggtgtaggggaaccaaaaatggcttccctccatccttccaggtaccttattaggactaagagttaaattcacataagacgaattaacagattactgcagggtaaacaggatgtgcatgtaaagcattgagctagcatacggaaattattcgagtcatattaacccaacgttaacagtagaatctctcatcaacttttctttgccagactacccacttgtgattttcattctttattggtacttaagaatctcccatttttttcgggtaactgaacattgtccatgggagaaaaacgatatttaattacgtacaggagtcccacaaaatacgagactaaaagttgaagtcagatgattaaagcctacatggcatcctgagctactgaaaggaatgaatagagaattgggggcggggggcgggaagcagctctaacacaagttatgggacggtgaacggaggaaatgtatggtgaatcaagtttgttatgcagacagaataggtgatcttctgggtggtgtcagcctctaatctctcatgtgatccgagttaatcttccctggtttataaggattcgtgacaattgaggtatttttggagggtcagactttaggcaggtaaggaaagcacagggaaagcctcttcccgcctgctgttctccaggtgccctcagttcaaggtaatcagcccgccaaagcatcttgttttgggctggcatttcctgaactccttcagtggttaagctcagggatctggagttggcaattctggtgtgctttaaccttggacaagtaactcagccactttttacgttgagtaggtgtcctgacctccttgaacccatttcatcatctttatttgtgtcccaggattttctactcaagcatagacctactatgttcatgtactacttcatatacttgaatacattgaatgattttattcagtgaactgatgcttacaaagtacttagcatgacggtatctggcatgcaggaagtgcttaatgttattggttattattaacaccatcagtgtcatacagtgtgtaagaaatcaggctctgggccaggcgcagtggctcgcgcccgtaatcccagcactttgggaggcggaggcaggcagatcacctgaggtcaggagtttcgagaccagcctggccaatatggtgaaaccccgtctctactaaaaatacaaaaattagcctggtgtggtggcgggcgcctgtagtcttagctactcgggaggctgagacaggagaatagcttgaacccaggaggcggaggttgcagtgagccgagatcgcgccactgccctcaagcctgggcgacagagcgagactccgtctcaaaaagaaaaaagaaatcaggctctgaggtcacttttattctttattgctgtccccagacacctgtagccttttaatcttggtccaaacatacacatacataaaggcattgatttttggtaagcaaattatcatgttgaacagttggagttcttttttgaataagccagaaaccatttacagttttttgtctcttaagactgaaggaaaacttagacacttgtaagtcagtgcatgcacaatccttcccgattattactgttttttttttcatttttattgttttgaccttgattggcaatatttta

SEQ ID NO: 39 - DNA, 6168 bp, Homo Sapiens
cttgagccctggaggcggaggttgcagtgagctgagatcatgccactgtaactgagcctgagcgaaagagtgagactgtctcaaaaaaagaaaaaagaaaaagaaaaagaaaaagaaaatacagtagagaaatacgagcccattttggaaaatctcattttttgagaaagtaagattaaatggctcaggatttctactgacttagaaaatgcctttaaacagttttagaaaattaaaccaaattaatgcatataaagaatatcgataacacataaacgtgtaatttatatttatattaaatgtatttgtaccatataatctgcttatggtataccttctttttatatctccaaccccacttctgtctttataaaatttctcaaagaaagtagtacctaatttgcatatgttagaatggaaattatcctgtaaagatgcatctactaaatgccagatgtatttaaggagcatctacatttgtaatagacataagccatttctaatttaaatcacatgttattttgtttactttttgaaaagaatgtgacatggaaagggcatcaccatctaatgaaacctcttcattttacaaattagaaaaacaatgcccagaaagttgtaacttacagacatctcggagtcatgaagtggtagagctggaaccagggctcatgtctgctcaatgcccactctcatcgcatttccaccatctcacacacacacacacacacacacacacacacacacacaaacactagtgtctcatgcatcttattgctcacattcttttcaaaaagtaaatagaacaacatgtgacataatttaggaaggggacttaaaagtaaagtgtgtatgacagaaatagggccacttaatggaaacagcgatgccaacaaattacgttccttagcattttgcaagaaatagagctttaaggggatctagagaccaaattcaatttcccaagccaatcatttaacagggcggttgtacatttaggttaccctgagtgtacaatagcactggattcgagttttgctttttgattttcatttctgtcttttgacaagttttgtgatagtaaaggggaaagaatgtccatcgactttcaatagtcatttctactatgacacctctgctaaaacatcaccctaatttaggccccaagtagctcatgcccagattatacctacgagacaatcaggtcctctggcccacaggcgcccccccttcctatactgcacctcactgacagatttatcacctttaaaccattgtttgcatcatatcactcccagtcaagccctgtgatggtgtgtgtttaatagcttattgattctgttccaaatattctaatctggctttttcagttcttcataatctgtctgcctctcagaaattctactctttccagtaaagcatgctcattcgcatcgccaaccctttactaaatgctttttcccttgtctctgttccctctttcctctctactattgcaaactctacccaagcctcaaggcacgcattcgtgtcctccattcagcctttccccactattccagcccccgctgttgagctctttctcccttttctgattccgtgaatttttccacaggttaccctgctgggcttgcatatccaaattcagtgcaagttctagggcaggaatcatgttttattttaggaatctcatgagccctttccccacctccattgctacatacctcagcaccttgctgactacgacagattctcagggaatactttgactgttggatagtttagacacggtggaggaagagaatgtcagctacttgcaagcaatgctggcaaaagcatcagtactatttctagggttaagtctcaaccccattgctcttcttcatgaatgtacacattcactctaccactaaattgttactgactccttcctcttcagcgtttgttaaataagtttattttctctaaccttggtcctaagtctgatccacctccaagcaagttcactgtacctttttagccacctctcttactccaaggacacagtcaaatgaaagttttcatttaggctccccctctctttcctcaataagaggaattcccattctttttcatttgtggtgtccccttcccaggcttgaaggtaggagtgatatcgtggtgacacttcagctgtggagactctcctcctaccacataaatgctccaaacccagatgtgtctacagcccagctaagattagaaaatgttactggtttcccttcccttctctgccccgcaaaatgaccatgatgcagagagcaagctttgaagagttgggattttttcctacttagaagccttctcactaccttccctcggtggaggggaaggggaagcctgcttccagccacatctgaagttccagctctgctttgtgagttctgactcctaaggaggcaggagagaccctctggagggctctaggcatcctgctactcctcctcccgctggcactcttccctaacgccaggtgatcacaccttcagtcaaagagttcccgttcttctgcctcctgcaggatatgcttcttggtctatactaccacgtgagcttctttagtgggtttccctgctcgcccctgcccccaccccccgaccctcacttgcgagcacagcgcctcaccccggtggacagcccgccggcgccgccaggccctctgctgtgcgcacaagtcagcagctggcggcctgctcgcagcactggcagcgaggacctcggaatcgcttccgccctcgggccttctcacgcgtctagggactgcctccagcaggtgcagccccaggtgcccaattgccagatctttaacctcgcgctctcccagccttcaaagttctccaacccgcgcctgccagccccagcgcgccctcttgtccagatgccagctcggttcagggttcgccctccccgcgactccagccccagactttcctcctggtttccagtgcccagcacggccacttacccagggcaagggccaggagcagtggcagggagctggcgccgctgcaccgggcggcccggtccatcaaccccgctctgccgggccgggcagcccctagacaagtctccctccttcttcgcccccttcccgggcctcgggcgcctgagagggtgcctggaaactaatcccggaggcagaaggaaacgaaactacttcccaggctggcaccctggctacaaggcagggaaacacccagggcgggaggccggccggctccgtgaatgtcgccgggaggagggagcctcctatttatcccccctcctcctgcacacaccccgccaaagaggcgcaggacttggtcctgggagcctccacgctgctcccacccaaattgccccacacccatacccacacccagggacatattcgggctgccctcggaccagctcaccactccccctgctgggtctcacctgactgactgttcatttccctaccccctagggcgtaaacaaggtagggagggagatgtaaagaatccgcgtggaggggtgtcgggggttccggtcgggcctgcaggctgacctaaactcctggaagccaccgaggaagagtcagagacccaaacgtgttctggaattctaacttcctttatttcagaggattgctagtgtcatggagaaaccagactcaccattcattgtggttgacttcaggcatttgataatgcaggcaatttcaaaagagtcattgttgccttttaaagtcttgaagccatagcgaaacctcgtctctacaaaaaatacaaaagtaaattaatagccgggtatggtggtgtgcacctgcagtcccatccattccctgaggctgaggtggggaggatcgcttaagcttgggagatggagccttcaatgagcctagatcgagccacttcactccagccaaggcgcaagagtgagacactgtttcaaaacaacgacaacaacaacaacaacatcagcaacaaaaaaaaaaaaaaaaaaaaagaaaagaaatgaaaaaagtcttcaagctagtgtcttagtttctgggtgcattgtcttctaataattcataaaattggggctcaccaggacctactttagaaatttcatttgtatttctgtttatgaatttactcatgtattcagtatattttcatttacttgcattaagcaatttctggaacagaaagacatcctcacagcttttagagaaagcaagcagcatccaattttaccttatgtggttatatattgcctccaagataaccaaaagatacagctgcttttgtactggtctgtgttcctcatataagatttatgtggataattatgcccctcagtacagaaattttatttctatagcatccaaaagtcatgtaagccttattttacatatgaaatgtagtttgggtgtctgcctcttcctcctcatcctactgtttaagttaagtaaattgttgtgcacttgtctcccacgaataacatttcatttcaaaactaaattattttactgccccaggcaactgatatatccggtggaataaaaatcagctcttaattttcagaatcccattctagtcccacatgacagctcataaaacattggtagagagggcaggcatgaagtttaaagaaacccaaagttgtaagatggaaggttactgcaccccagctaaaaagagcagaaacactggaagccaatggattttgacatcatctccctccctctcaacacttccaccctgcatttttcttttctgatattctctccatctctcagcaccagtgccctaagttaaagtatctcttactccaagatggcatttagcctagccaacagctgtcctgttagccccaacagaatgctacaattttgttttcctttttcgtagatactaataaaaaaaaaaaaaagcgagacctaaacaaaaagtactaaatgtttgttgagcattggaaaattccaggacttggtgtaagtattcatcatttatgccattcaagtggtaaattaactttttcaggccactagaatatgaagtagtataatttaatatactaaataggacagataaattaataaccttccttgagggctttatttaccaccataaataaaataagtactcccaagaaaatccaaattttctgacactggatatccaatctcttcaatgttaagagacttttcctgtctttttttgtttgtttcttttttttcccctcactttctttctctctgttcttcctcctcttcttccctctccttctccttcttctttttctcccccagcccccaaccacctctctctctcaagtcatttgcttatggggcatggtaaagctggaatacaaccattacatttggaagagtggaaggtaagaattgattttcctgagtcctcaaacatgtaactgagttgcgtctcagtgctttcatttgcaagctgagctgttactaagagaaaaataaaccaaagttacaccagagtcacaaggtgaaacttgtattcctagttaaccccaaggtaggaattgcttgagtgctgttcttcctgtgccaggtttaggcaggtataaccagtcctcccaaatctggtatgaggcttaagtagattcctttggagggcctttaagcatcagcctttttctcttcccacacagaacagcctgcagctgggaccgtcctccccgtcttctggacaggacaaaataaacttgtagttacatatagggcacaacacataaacagacacacgccatgatggaaaggaaaattttggaatgcattccttctaggccaacatgtattctccaaatgaaggctttaaggcattcagtagtataggaaaatttcctaatgaccattaactttatttaataagagtgggtgaatgaaaatgatgaaaggcatttttaaaattgtaatttttatagtaatgataagcatcatgcattgtagattattagtggtacagttacatagagagaactttcaaatattttatttaaaactactgaattggtttctaagaatgtatcagtgaaaaatcactgctcaaaagttgtattcaggtaattgtattttataatctagttgttctgagggaggtagttattttttttcctgcctactttcttgtatcttcctcttcagtctag

SEQ ID NO: 40 - DNA, 6168 bp, Homo Sapiens; identical to SEQ ID NO: 39

SEQ ID NO: 41 - DNA, 6205 bp, Homo Sapiens
tcgctgggaagggtgtttgaggccgtgggcggtgcggagcgtgtctgtgtgcgcggaggctgagctggttgtgtgaagtggtagcgggtctgccagagagcgtttacctgcgtgaatgcacaaccacacactacgggtcacgtcccacactcattctttccctaggcgggccaggctgtctgcacgcggagacccagagaggccagcggaagggcagcgcgggaaggcggctctcttctcccgcgagcgcagatctggcggaggaggcggcgactgcccggcaggctgcgccggcgagccccccagctcctctcaccgacgtgccaggcgccccgaaggcgacaggcgtctcccgccgaaaatgaaggcgtccgagccaggaaggtgggggcgggtagttagcgggagacaaggagtccggagaaaaccgagaggcgggtaggctttgaacgcgccgcgccgcgggccgtgctgcgagcccggcacacgcctctcgccccagctcgcgctggggcttggcctctaggctcttcgcgatgacccgcgaaaacacccctcgcccccctcttctcaactcggaaccctggagggagaggccgcgcccggccagcagtcgctgcgagagcagcactcacctgggtctgtgcgcgccgcgatgcgccggggctcctgcgctgtcctgcgctccgctctcggcaccacctttcgtggctccaccgcccccagcccgcacccgagcgctgaggtggcaagggcaggtctgcgtgcgagccccctgcgggctggcagccaggtgcgcgagggccgcccttgccggcgctcccagcccgcgctgtctgctctcaggaacctggcctggcgcgcagtgtcagaggccccgcggcggcggcaggccgagcccacaggggcattaggccaactcccccctcccgccctgcgcacgcggaattctctattattattattaaagaatcccccagaacttgtttacgttaaaccctgtaaacttcctgccagggcctttgccatctctcgggaaatcggaacctgcgctttgaaaacggggccgcggggccaaataggcgggttttcagtgtgtgttgggggtgggggagggcaactgaactacgtgtgagttcagatccgagcgtggcgtgtgtacgcgtgagtgggagtgagtgcgaacttaagctcctgtgggccttaagcttccgtgtcaacgagtgcattagtgggtgcgcacatgcctgagcgccctctgcatatgagtgtgcacacacgcatgggtgtgtttacacgtctgtttgcgtaatttaccgggtttgcatgtgcatcaagacatgtatgtgtgtgctaatgtgtggacaagagcgcgagggtgtgcgcgcacgggtgagtgactgagcacgccgcttattcaggggcctgtgcggtctgggtcgcctctgggccagcgggttctcactcgcccccgtcaggcccgcggcgcccgagacaaagcggccgcgactcgtgctgcgctttcgttttccgcctgcgctctgccccggcggctgcccgcccgctcgcaagctgctgggcgagtccgaaaaatcccgggagcggcgcagttcttcccggggcggggagagtgggtaggcggtccctcgcgggaacttagccggccggccgcgaggaccggagtcgagccggctgtgcctgcgatggtcacgaccgggaggccgccgcacttgcgatttgctacagggctgtgcgcgtcggggaaggccccggcccagggagcgtttcccgccgcgccgcccgggcggggaaggcggggtccagcgcgcaccggggctgaaccgcgggcggagggcgcattaacacttgctcgccaggttggtggaggcggggcggattctgctggcggccgcggggcggcgagagtgggggctctttaagcgcccaccaacgcgggggcccgaggggggcagggacggagggagggaactccgggagggtcttaggccgacccgcgagacgcagccgagcggagatggagtgaaggctgcctcgcccggaatctcggagccgagcgccgcgggcggcggggactcagggctgctcccggctggggcgcacggccgtaagacctggaggtggtgcctccccccaaaaaataccggcgggggtagcttcctcacggccttcgcccgggctgccctcggcctcagctcggctcctttccttgtgggagggcgagaaagaaagagggaggagagaggtgggggaggcgggagttggagagagaggggctctgagccaaccgccggcggatccagcagctcctcggggagggcgggcgggagcgcgggggcgggcgcgccgcggctcgctcgggagaagtggccgccgatgacggcagaggtgcagccagccccgcgcgcgcagccccctccccttcgccctcctcccccccgtcgtcctcttcctcctcctcctcctcctcctcccggcccgtccgcggcgcagagcagcggcggcagcggcggcggcggcagcagccacccgatgtcttcggcgcccgagaagcagcagccaccgcacggcggcggcggcggcggcggcgggggaggcggcgcggccatggaccccgcgtcgtccggcccgtccaaggccaagaagaccaacgccggcatccggcgcccggagaagccgccctattcctacatcgcgctcatcgtcatggccatccagagttcacccaccaagcgcctgacgctgagcgagatctaccagttcctgcagagccgcttccccttcttccggggctcctaccagggctggaagaactccgtgcgccacaacctctcgctcaacgagtgcttcatcaagctacccaagggccttgggcggcccggcaagggccactactggaccatcgacccggccagcgagttcatgttcgaggagggctcctttcggcggcggccgcgcggcttccgaaggaaatgccaggcgctcaagcccatgtacagcatgatgaacgggctcggcttcaaccacctcccggacacctacggcttccagggctcggccggcggcctctcgtgcccgcccaacagcctggcgctggagggcggcctgggcatgatgaacggccacttgccgggcaacgtggacggcatggccctgcccagccactcggtgccccacctgccttccaacggcggccactcgtacatgggcggctgcggcggcgcggcggccggcgagtacccgcaccacgacagctcggtgcccgcctccccgctgctgcccaccggcgccggtggggtcatggagccgcacgccgtctactcgggctcggcggcggcctggccgccctcggcgtccgcggcgctcaacagcggcgcctcttatatcaagcagcagcccctgtccccctgtaaccccgcggccaaccccctgtccggcagcctctccacgcactccctggagcagccgtatctgcaccagaacagccacaacgccccagccgagctgcaaggtgagtggggaggccgagggcgccctggtccccgggaagtcgagtctgagtggcagcgggacccagctggggcgagcccctccacttctgtggtcggaaccccaaggctgaggggaggcaccagctccccaaggtgtctcttggccccacctctcccccttcgaagagtgactaccgctcttgaccctagtttgggccaatctgtttctctttctgttcgaactccagctgccagctgctccaggcctgaccaggtaggctggtcctgagccagatgtcccagaccccagtgccctaagtccttttgtgtcccttaagtcccctcacagcttggaaagatcctgggatggacccaaggctcccagcgctggccagatggctgtccctccctggtggtggccctcaggctgcctggagggctgcctctgcctggggctgggcggaacggaaggtgttaggcccaaagccgctgggccagcgctcagaggctcagccccggcctttcaggggaccagacctggcagacccacagctgagtccaggggcattttgtggtgactgaggcaggagggtgccgtggccaggccccggagggtcagagctgcagaccgggccatgggggctccttgttttttaggatccaagttttcaggtccccacacccccaacacccctgataccccaataccccgaacatgcagaagcatctgccaagggagatgcagcagcctcgcctcctgattctgccccaggccccccgcagcctgcaggcccagctctggaaaaagctggagtgagcttgccagggccagtccagggtcagctgtcagcagccccaggaggcaggagccaggcctggaggccttaggcagcctctctgcgggggactccccggctccggggcctgttctctggagaagcttcttctcacccctgctgctggcccggcgctggccctgcactggcctctccttcaaccccgccggcagtcgtagcctctgaggttgggggtggtggtggctgccctggcggtgacggccatgggcgttaggggccctccacttggtctccctcaccacttcccctatggctctggaagccctgggcccctgcacggtgtccgaggctggacaggcacgcagcaggcaggcaggcaggcaggcaggcaggccgtggcaagtgttctggagtcttttccttgggtgcgcagctggaaggccgggactcggggaggagagcggggaggcggccgtgctctggagccaggctgacaggccctgtgcgccccacgggagcactgctcctctgcctgaactctgagccaccgtggctaactcttctgctcccccaacccctcctgtcgcctcgccttgcaggcatcccgcggtatcactcgcagtcgcccagcatgtgtgaccgaaaggagtttgtcttctctttcaacgccatggcgtcctcttccatgcactcggccggcgggggctcctactaccaccagcaggtcacctaccaagacatcaagccttgcgtgatgtgaggctgccgccgcaggccctcctggtgcaggcaggcgggtcacagggaccctggaccggcacaagaaactgctttcttctcgaggtataaccgtcggcagaagaaaagggttccacctctccccaaccggagtttttggcaaggagtccccaatgcaaagacacagcgctgcggttggcacctccttcctcactccttcaaaattgttaagaaatgttagtggtgggtctgatctgactgcagccatcggtaaataaaagtttttgatcctgttgaacccgcctgagacggtgctgtgcaggggaaagcccccgcacccacacaggaattctgctgaggtcccccctccttccggccaatggcagaagtgggggaaaatttttagaagaaaagcaaacatgtgagaccaatcattatcaaatacttttattttttggttgagtatttatctttttattttttattttttttttgaaagaatgtcttggaatgcgcaagtctccctttagagccgtcttttgcagggagcgggaagtgacaagagctcagatctccctcccgatctccctccccacctccgaagtctcctccgtggaccacaggtggatctttgtgcgaacaacttgcatttcggaagccactgtccgtctttaaacagaaagtcaaaggagccacgaagcaagcggccgtccgggcgtccgcctccgtccccttccatgttcctcctcttccttcgcttcagcctcttctgttatgttttgtcttgaattttatttagactttttcagtgggtatttttctgtctcccaacctctactgtaaactttctggtccgagaacgagccgaacacagcgcgacgcagggactaggacggcccggtgaccgcgcggattcaggattgcggggacgcagaaaggttaaggcacttttaaaaactatagcaaggctcctgtttatttattctactttctttccctaataatcaaaacaccgcgtaggctcctccgtttatcagtattaatggtgtaactttgttggcaatatttgccgtgtagaattttttttagatatccattgtaaatttgaaacaaagaccgatctgtgtaaaaacaaatttccatatgttttatataaatata

SEQ ID NO: 42 - DNA, 6181 bp, Homo Sapiens
ccaaccgctaccccatacagtaagcctgggccattagcatcctctgctacagcagctgtggactggagctagcgaagtggggatgggaagtaagtggtcccaatggatgcagagcagggccaagaggaagagcaaagctggtgaaaaaaggggaataaagttcaacctggatgatacatcaggaagctaccaggcaagaagggaacaagaggacatgctggtcacggcttgttctctacgtatgccatctaccacaccaagaccgatggctcatagccaagcactgtcctgtctcccctttccacagggcttgttaacacagcacactgtcaagggtgagaatgaggcaatcaggtccccactcccactccaaaccaccccaattcacatccctcctcttacagggccctaagccccaccaaagagcacagcatccttcacaccagggaaggagcctggctggaggaggtggaagaaacagttctccaagagaagtagaaactacaggccaggaagggacagagagatcagaagacacatctgcgtcaataaggacaggagaaaaataagtacaggagaaaggggtgtcaggagaagatgggttgaagctggacacagggaacagtcccaaacccattcctgccacccacggcttcctgccactgctcttccggagaatgccacaggcaaagctggaaagtgaccaaaaaaaaaaaaacaaagatacgtattcctaccgggcgcggtggctcacacctgtgataccagcactttgggaggctgaggcgggtggatcacctgaagtcaggagttcgagaccagcctggtcaacatggtgaaaccctgtctctactaaaaatacaaaaattagctgggcgtggtggcgggcacctgtaatcccagctcaggaggctgaggcaggagaatcgctcgaacccaggaggcggaggttgcagtgagccgagatcgagccattgcactccagcctaggtgacaagagcaaaactccgtctcaaaaaaaaaaaaatacgtattccccccagctcaccttggaattacccttagatttacttcagagaattaaaatatagatagataattatcctgattaacaacattaacacttgaagtgtgttagatgctgtgcttaactcttacatctccccttagtgctcattccagaagagctttgtcactctgccagccaatcctgagaaggaattttatcacttcatttccagccagctctcgggcatagagagaatgaggaaaggattccaccatagcctcacacccccaaaacacacaaacacacactaggatgtccctcatctgtagagatgatgttctgtgggagcctacagtatccagagccagggaaggaccaacgggtgtgggcgttcggaagaaaagaaagacgtatgactcttgaaatttacatagggagaaaggagattgcctactggaagtccaggtgattgggtgtaggggaaaagctgtgtgtggcttcgcagcccaactgggaggaggggacaggggcgggaagtggcaggaaatggcgaaagcctcaggaatgtttccagcagggaaggctgggcaaacggggccaggaggaatgcccagacaagaactctggttagggggaggggaagagacagagaagtagcgactgaactgtcccttaaaaaaaaaaaaatcaaacaacaaaaagagcactattatctacccccactccaaactaccgttcttctggtagtagaaaacttttgctcatgtcacacccacatgccacacaccaacaaatccatggtcttatccacttatgtctaggaaggcctagagctacttctgggatgaggttggtcctgggaagggaaagccaggaagtgaggctgggagtctgagggcaagtctctctctccctctcgtgccaaaccccacgttcagccctttcaaatagttctacccttggaggaggttaagaaagaggaaaacggggacgggcgcagtggctaacgcctgtaatcctaacacttaaggaggctgataagggtggagcacctgaggtcaggagttcgaggctagcctagccaacatggggaaaccccgtctctactaaaaatacaaaaattagccgggcgtggtggtgggcgcctgtaatcccagctactcaggaggctgaggcaggagaatcacttgaactcaggaggcggaggttgcagtgagccgagatcgcaccattgcactccagcctggacgataagagcgaaactccgtcttaaaaaaaaaaaaaaaaaaaaaaaagatagaaaggaaaacggaaaacggctgcctttaatctcactccttacagccagagatgggaactttgacttcccacctgggggagcacgagagtgctcggaaaactgatcccaaggcccaaaaagagaaaggacaggaaaatataagcaggtggagtttcagggattgacgacaaggcttttcagctgatgacccaggtcccacaaagataaagctcctaagggggcgtggtcccctaaggacgcgaacttcagacttctgggcggggaggctttctggacagtcagacgtggattacggagggggcgtggcttcggaggggcggagcttcaacaaattcgaatcgttctttgaagagcagggttttgcccttttgggagataggccttttgacaggagttagccgaggatcgttgctaggaggcggagtttcggagaatggaaggagtaacgaagggtttctcgtagtagggcttggaacgtgtcggggggtggggacttccagaaaaactgggcgacagggtggggtcggagacaaaaaataaaaatcaagtcggggttcgggggagccccctgaagttgggaggtgggacttccggggagaggggtctcaggggcgggacttataaatgaagaccggaagtggggtcccgggagaggggttccggggtgaaagagtgagtcacctaaggagaaaaaagtcaagactcaccagggcctcatggagtctccgcaccgcaccgcgggccgatttggtgccggatcacgccactgccagcttaggttaccgctccaactttctccccgggccctgcctccctggagaaactttattacactcacttccggcctcactaacccctgaccctctacctcagggtccctccttcacgcttcccactttcccgagttagccaatggcagcgcgagatcgcgcacaaaggcagtggtggccaataagacgcctacttttgacccacgctcgttcttgagaagcgtgagaactgccctccaataaggatccgaagagaagtaaatctaagccaatcggaggcttgaaagtagaggtgtcccgcctcgagccaaacggaccaataggaagtgcgggcggcgtgtttgaaagcgaggccaaagtgggtgggagcgcgtgctgttgggagttgcttggaggttggcggcgcggggctgaaggctagcaaaccgagcgatcatgtcgcacaaacaaatttactattcggacaaatacgacgacgaggagtttgagtatcggttagtgctggcgcgggagcaatagcgagggtcgtgagctttggccgctgagggcacaaggaattagtaacaggaactgaggcgatagaattggcgcatgcgtacgaggtgcgaacgggcaatggtgtgatattgtggaaggcgtaaggcgcatgcgcggaggtgggaggcgctcgtaaaacaaagtggttgcgaatttggagtcgcctctcagtagagaggagagaggggtgggcgtggttagggtactgaccaccctcacccatgaggctttctggatcattctctgaactttatcgggcaaacttaacttgccttgtagagactgtttcacagtaatcttgtcgaatccagtgggagaacgtagcaaaagcggagctggaagtttcctggcgtccctaacaggagagtagcgctgagagagttgaatattgcttattaactcgtgaaaaagacaaggggcgtggttgtctggcttgtgtaaggaaggggatcgcttgggactgcaatggaataaaactggctaggagcattgagaaaatacttaatatgggtctaatagatgccctttaaatatcaaagggaacagttacggaatacttaacaggtttcaggtgttctgctaaagtgcaaggataacacatggtctctgctgttcacaaatttaaaaatctgtgggtggtaccgacagacaccagaaaggtgacacacgctatgcaaggagccattacagggtgtgatgggagcacacaagacttgctaaggagagggaactggcgacccgaaggctgcggcttcctagctgtgagcgggggttgaggtggggctagaaagtcagtcccctacttttgctaactccaggacgctcccccatcccacgcttcgagaacgccccccgccccgccaccgccttggaggctgacctcttactttcggtcggtcttcttccctgggcttggtttgggggcgggggagtgtcctaagggccaattcagcgtgatgtctctttcaccaccattgaaaacgaaaccagtagtaaactacgcgtgttttcatttatatgtcggagataaaaacacagggacagaaagaggggaacaacagacattggggcctgcttgagggaggagggtgggaggaggtagaggttcaggaaaaaaaaaaactgtcgggtactatgcttagtacctgggtgatgaaataacctgtacaccgaacccccgagtcaggattttacctatataacaaacctgcacatgtacccttgaacatgaaacttaaaatactgagaggaaaaacggaagagggaatgttggggaaagcttcctagagggcagagcctgagatgagactctaagaaaaaggtatgtgggaggaagcacctcttgactgaaattgtttagaagacactggatagccatctgccaaggatggtgatgatggaatcctggcactggatgtggcattcgggcttgataaattttaagtgcataatctagattgggaataagggaagacacaggattccacaaatgttggcattatgctaatctgtattaattgtaataattaagaccacttcctggtttgtatcttgtctcctcagttggagaacataaaatgaaaacttgcttttcttgtgtctcttcacccagcctagttcagggctttgggtcttccagagaactcgatgtgcattgacaaatacataatcatctttatgccaagacggctccagaccctcctttaattaactttcttttcctcagctgttttcctctacatctgaactaaactaacttaaaactgtatgtgcttataagagatttgtggagctgggaaggaatcaccatttcatcccctggaagatgaaactcttggcagtggcactttggtttaagaggggttttttggtgtatgtattgaagccaaatttcgtgccagggtggtgttagaatgtgagctattttcattatatttggactagaattttttcttttaggagaatggtggggaatcactgttactagcacagagggagaacttagtacattttcattgagcatgacgaagactatgtggattagtttgattcacatcagggtaataatttttttgctatgaagggagacttatccttggttagaaaagcacggaatttacccagaaagtctcaaggtacatccctccagagttaggaaaataagattcaggatagatttaattttttttttaagagacaaggtcttgctttgttgcccagactggagtgcagtggctattcacaggcacaaccattgtgcattgcagccctttcttttttcttattttttttctctttttttgagacggaatctcactctatcgcccagatctcagctcactgcaacctccgcctcctggattcaagggattctctcctgcctcaacctcccaaatagctgggattacaggtgcatgccaccacacccggctaatttttgtatttttagtagagacggggtttcacgttgttggtcaggctggtctccaactcctgacctcaagtgatccacccacctcagcctcccaaagtgctgggattacaggcatgagccaccgcccctgg

SEQ ID NO: 43 - DNA, 6181 bp, Homo Sapiens; identical to SEQ ID NO: 42

SEQ ID NO: 44 - DNA, 6000 bp, Homo Sapiens
tcaaataagtaatgctcttgctcttgatctctgtgctatctcccaacaaggaagggaagcaccatgtaggggggtggggggccgggggaggcactccagctccagaatattttaacctctcctaaatattcaatccctactggctccactgcttatccctcaaggcctgaggtgggaaaggttgtaatctcagggaaaagagatatcctcccaaacccaaattcttgatggcttctagaggcaggaaaacacataatgccaagcagagaaatgagcaagaaagagggatgggagtagaaaatcccacctagccagagagagatgtaacttggaggccccggactacaactccaccatgagcaaacaagaaaagctggtcctgcggcaagcagggcctcaaaagtctttcctcctgggccacaggaaacagaagaatagcaggaagtgggaagcagaggcacacaggttattccctccctgaacctctcaactcaagtgtaggaagagcagccctcctttcctaatcctaatccaagagctgctccacactctccccacctgctcacctgtcatgaggggtgaccagtttgggtgggttcctgaggtattgtttgaagcgcaactcgaaggcctggccaatggtgctgatgacatcctgggcaagcccttcgggacactccagaatgtggcaggctgagggcacagcagaggctgtcagtgagctgagcccactgggaggaggcacagacaggggccctcatcttcctctgcaggaacccccactgagatctacttagagtgggtacagatgaccaaaggtcctactcacctcctcaaacagccagacccacccagtgctccccaccatgcctcacctctctgattcacagggtctttggcaacataggcgacatactcggctgtgtcctggggaggaaggtcaaaaaattttacagttctactttactcctgacccctaaaacccagtccttttcagatatccccacaatcctagcacccccacttctctaatcaatgtcttcccaatccctagccccttgctcttctcccaccgcctttgctctgttccccaactcaccggatccccgccggatgcaaatgagatagattgcatgtggtggttggcgatgatctgagaattagggcaggggatgaagaaggaagggaatgccatgtgtcaggcagcctcagggcccagaaccctggtgccccagtctcattctctgggttccttatcccatatcctcatttcctccttccctactggtctcctgctctcaagccctcttcctagattttggcctcctaactagatctccccttagcacccccatcagtgtttctggtccgtctgcccaccttcaccaacctgtttgcagtctgcggccatgaggttgaggctgctggtggagacggtgagagtgattggcattccagcaaatttcaggttactcctccccaggatagagctgagcgggcggctacagggctaaggtagggcccagggtctcagaaggtgagggttcccagcacaggcaaaccacacttttgcctcctggccctctccccacatgccccacacttgcctccccactgcccctccacatttcccagcagcatccctatccccaaggaccccaagtacctttctcctccttgtcgcccccttagcacccggcacagcctcacacaccagactgatggcctccctggggaaagaggggtactcagacccagcgcctgcctgcctgcctcccactcaactggggctgccacagggctgggggaggggaaagccaggccagactcccagggcactccaggctctttgtcatggtggattgaattaagggcctttaatatttgatgacactgagaggccacttcctggctgattgggttagggcctcaatgggtatagccccacccccttccagctaccaaatgtcccattcccttcccaaaggcagcagcaaccttccatctaccccccttttctactccagctccacctgccagctgcttctgccaccttccccacaactcccaaggctggataggtaaggaggatccgggccaaaggggcctcctttcagtaagaggcggaatcactacctcagctttctctcaatcccctttactacgcaaagatcagcccccagcagcagcacccaagtgacccactcccctcctctgtttcccatggcctcactaatcccaggactcccacaatccactccctccccactaacctggtgacctgagtccgggtgttgaagtccagggcacgcattgactggaggacctccacacaacccatgtactaaggggagggagaagaggacagcaggtcagcggctcccccaccccagccccttcacaaagggccctaggactttacccatatggtccctaagggaagtaaagaggaagaagttctgcccacttcccgtggctacatcccacaaccaaggtgaaagacaacagggaatgaggagaaaaagaaaaggcaggctagaaggacctcacacactggggagagagtttggaggggaccgacaggcattggctgggatggagtgacaactccagaaagcgggaggagaatggaggaaagatcaagaagtcattcattccaacacttattaagagcttctgccatgctgggcattgtgctaagcatgccagggtgggggtgggggagtgaaaagaaggaagggggcccaggcaaagctggaagggaaggggctacagaatcggggaagggatgagaaaggtttaggaaataggacactgaaacggggttgttggggaacagcaggaaaaaagagattccggccaagctggagtgagcattagaactggagggggtctgcgggggaatggagaggaggatgttcactcacccgaaccaagtaggaaaccccgggtcccatgactttgtcgttgggatgcagccagccccgcgtgggcttattgacaaagctcccgtggcgggtccactcctcgcccccaagctggcccccttccacccgagtcctgcgcccgccgcctccactcagcttgttcatgtcctggaggaggggtagggggcctgagtctggcatggctgcccctacgatcccctccccatcatcagctgcccttcctggctcccccttagaccctgggcgccccccagccgggttggccagcctcaggttgctcatccgggggaagaaggagcacagggtagtgggactatcgtccccaggcagaggaggcaggatgggccccagggatgaagctgatggggaaggcagctcctccgggggggtggacccagaagccccttcctccagcgatgacagagactcattccggagtggattgtacttgggcttggggggcaggagatccatagttgaggtgaaagaggggctgctgcccagcctggcccccctgccagtttgggcaagggggccaggcagggggtatccccaggcccttagcctggttggacctctgtggcccaggagtcacagaagtcctggggagggagagggacaagtggcttccgctccccagctcagacccagacagtttcaggccccatccccgcccaacgtggagcctcttctctggctgagaagagaacaggctggacccagcgcttctggctcctccccaggggcggggagctaaggggagagaccaatcgtgaggacagtgctgactcacaggctcagaggggctgagcccccaccccgccccaacctcgaactggagcagggggtagggctatccaagcccctctcccctgccctatacaaacaactagtaatctggggagaagtaaagtgggggtgggagggaaggatggaagagtgggacggaaaggaaggagataggaggtctgggtcactcaaaaccggacacacgcaggccaaagggggcaggaagccaggcaggagtacaggggaatgagggaggaaacagaggcagctgggggtggaaaagggaggagatctcagagctcagcatttcccttcctgtcctggttggacactcgaattcccccaccctctctatgcccgaaagctggctggccccagcccaggccacccccaaccgctaccccatacagtaagcctgggccattagcatcctctgctacagcagctgtggactggagctagcgaagtggggatgggaagtaagtggtcccaatggatgcagagcagggccaagaggaagagcaaagctggtgaaaaaaggggaataaagttcaacctggatgatacatcaggaagctaccaggcaagaagggaacaagaggacatgctggtcacggcttgttctctacgtatgccatctaccacaccaagaccgatggctcatagccaagcactgtcctgtctcccctttccacagggcttgttaacacagcacactgtcaagggtgagaatgaggcaatcaggtccccactcccactccaaaccaccccaattcacatccctcctcttacagggccctaagccccaccaaagagcacagcatccttcacaccagggaaggagcctggctggaggaggtggaagaaacagttctccaagagaagtagaaactacaggccaggaagggacagagagatcagaagacacatctgcgtcaataaggacaggagaaaaataagtacaggagaaaggggtgtcaggagaagatgggttgaagctggacacagggaacagtcccaaacccattcctgccacccacggcttcctgccactgctcttccggagaatgccacaggcaaagctggaaagtgaccaaaaaaaaaaaaacaaagatacgtattcctaccgggcgcggtggctcacacctgtgataccagcactttgggaggctgaggcgggtggatcacctgaagtcaggagttcgagaccagcctggtcaacatggtgaaaccctgtctctactaaaaatacaaaaattagctgggcgtggtggcgggcacctgtaatcccagctcaggaggctgaggcaggagaatcgctcgaacccaggaggcggaggttgcagtgagccgagatcgagccattgcactccagcctaggtgacaagagcaaaactccgtctcaaaaaaaaaaaaatacgtattccccccagctcaccttggaattacccttagatttacttcagagaattaaaatatagatagataattatcctgattaacaacattaacacttgaagtgtgttagatgctgtgcttaactcttacatctccccttagtgctcattccagaagagctttgtcactctgccagccaatcctgagaaggaattttatcacttcatttccagccagctctcgggcatagagagaatgaggaaaggattccaccatagcctcacacccccaaaacacacaaacacacactaggatgtccctcatctgtagagatgatgttctgtgggagcctacagtatccagagccagggaaggaccaacgggtgtgggcgttcggaagaaaagaaagacgtatgactcttgaaatttacatagggagaaaggagattgcctactggaagtccaggtgattgggtgtaggggaaaagctgtgtgtggcttcgcagcccaactgggaggaggggacaggggcgggaagtggcaggaaatggcgaaagcctcaggaatgtttccagcagggaaggctgggcaaacggggccaggaggaatgcccagacaagaactctggttagggggaggggaagagacagagaagtagcgactgaactgtcccttaaaaaaaaaaaaatcaaacaacaaaaagagcactattatctacccccactccaaactaccgttcttctggtagtagaaaacttttgctcatgtcacacccacatgccacacaccaacaaatccatggtcttatccacttatgtctaggaaggcctagagctacttctgggatgaggttggtcctgggaag

SEQ ID NO: 45 - DNA, 6200 bp, Homo Sapiens
cttcctgcctgttcattgtcccctcacccccgtccacccccaggcttggggcacttacgttaagatgtcgggtgtcccactgctattctccatcaccttctggccaggggcagctaaggagagaacaggtaggttgaatgcgaacagggatgaccttctcatccctaaaccctcccacagacggtcatctccccagctcagtcctctcccccttgcgccagttacctgtgggctggacattggagcggctcatgaggacaagtgcagatggggtgacaggctctttccggaggactcgctggggcagggtgctcaggccagatggagcctgagaaggagcagggggtagctctgagggtgcctttgtctgatgaccggggtggaatgtgctgcaagcagtatttcagccccttgctaaagagccacccacccacctacccccaattcaaagagaaacactgatgtgacagttttgcttcccagcctctgctcatagtcccatattaaaatgggttattaataaacaacctagggctgggcgcagtggctcccgcagtcaggagttcaagaccagcctggccaacatggtgaaacgccatctctactaaaaatataaaaaattagctgggtgcggctgggcgtggtggctcatgcttgtaatcccagcactttggaaggccgaggcaggcggatcacaaggtcaggagtttgagaccagcctggccaacacagtgaaaccccatctctactaaaaatacaaaaattagctggccgtggtggcacgctcctgtaatcccagctactcaggaggctgaggcaggagaatcgcttgaacctgggaggcacaggttgcagtgagccgagatcgtaccattgcactccagcctgggcaacagagctagactccatctcaaaaaaaaaaaaaaaaattagccaggtgtggtggcaggcgcctgtaatcccagctactcgggaggctgaggcaggagaatcgcttgaacctgggcggcagaggttgcagtgagctgagatcgcaccattgcactccagcctgggcaacacagtgaggctccgtctcaaaaaataaataaataaataaataaataaataaataaataaaaaataaataacctaagtaggcctaagataaggggcaaaggactcacaccaacacctaacatttcacttctttggccctggcccacacttttcaggcatgaagctgttcaacctgtataagtcctgtccataacaacacagtcattcatccagcccctcacttacaccacagtagagagctgcgtcaatgaacacccacaattcaaggggtttagcacagaggtattctcaaagtctcctaaaaagcttagtttattaaggcttagataagatgcttgaggccttgaatgttatagcaataaccaggatttacacttttgcaagaacaggctttaaggacactaagagctaccctgatggccctggaccacttctcactttcaacttcttcatttttttttttttttgagatggagtctcgctctattacccaggctggagtgcaatggtgccatctcggctcactgcaacctccacctcccaggttcaggcaattctcctgcctcggcctcctgagtaggtgggattacaggcacatgcctggctaatttttgtatttttagtagagacggggttttaccatgttggccaggctggtctcgaactcctgacctcaggtgatccacctgcctcagcctcccagtgctgggattacaggcgtgagccacctacctggcctcactttcaactctcaaaataataggtacattttcttttaggagtgactaaggtaaaagtgacaatggtttctcattcagactccattcctgacagcctcactcagtgctccatgagggagggagctgatgtacaagggaacagacagactctccaggaagcaagagctccaaaaacagggagcaaagcctgtgcagggccccttccttcttctgcagccaagagaagaaagcccctaggccccaaatagtgatattggtaccaatctacaaataagcaagttgaataaaatacagtccagaaatagacccacatatatgtgggaatttatatatataataaaggtggcatttcaaatcagagaggaggcccttcaatgaaatctgtctggaccattgggaaataagtcaatttagatccatttagattcttacctcaatttagtcattaattccaaattgtaatttagacttgccctgggccttttaaactgtaactttatatccttttagagtctatttctatttgctgtctagttttttttttttcaggatatggattgggaatcatggcctgaaggccaggccctgcctgctcagtcccagatatcatttgtatgtgacgagccctgcagaggtcctcaccagctgggagtcactggctggtcagattcacgttggcagcacctgacaggatgtggctacaaatgaccagagcgggttctgtcgtcaaacttgggacccgtactttggagcataacggggaagaaagtgcttaaaggattgctcattgcaggatctcaagtttcccagcaggaactcgccatgcggggtcatgggggcgcagggacggagggaagggccttaccgtctgtcggccgtagggccaggggtaggagttctccttctgggccatccttagagagaaagggggaggagagctgggcggagaagggaaacagccgtgagaagcagagaaaaagagagagagagggaggggttggaccgatcgagccggaagcgctagcccgagctggtaaaagggagcaggtcagcacactagccccaatctgggcgctggtctcaccgcccccgccctgctatcgtccctacctccttccagccctgcggcgtgcgcgcaggccagcccaacggaccctctgatctacctgatcatctgcccactcccggcgcaaggcctgcgacaggaggccagctcacctggggtccaaggcactgctactctcccggccgcccgcaaacaactgaatctgccacgccgcgccctggccaaggacttttcaaatctcccgccccggccccattgggcaagctcgtcgcccatgcctagttcccattggctcgatgtcctgtgacgtaagtcatgggaacccaatggaagaggcggaatgagaagggctcacgcttggcttccagtttaggaaagtttccccaaattcccccagtgaattatcttgctttttcttttctttttttttttccttttttgagacaggtctctctctgtcgctcaggctggagtataatggtgctatctgggcttgctgcaacctctgcctcccgggttcaagcgattctcgtgcctcagccacccgagtagctgggattacaagcgcccgccaccacgcctggctaatttttgtatttttattagagacgggttttcgctgtgttggccaatctggtctcgaactcctgtcctcaggtgatccacccgcctcggcttcccaaaatgctgggattacaggcgtgagccaccgtgcccggccttcttctttttataaaaaaaattaaatctttaatgtaactggagtttatccttatgcatgtatgagctggggtctaacttctctgcccgatggagcgccagttatgtcaacaccatttgttaaacaaactgccccaacagaatttaaatgctgcccttgatatataatgttagcatatttacttgtgtctatttctagactttgtattccgttgtttgctcatttgcctgtgtgtttattcttgtgtcattactatgtcgttcttaaaagttctgacattcctgggaggagtttttccaccaatagacctttcgttgcaagatctctgttagctgccgtgttgtttgggcccactttcatttttcctccttcctgccacacttccttcttttctgctcttcctaaccctcagatttcattactgggttaaataaatacatttttgggccttctatgaaataaccagtggatatttattaagtatgtactgtccagcactcttctcctttcttctaacactctatttttcctttaggggaccacctgtctctccagtctatgcagtcggtttctgtagtagtttctgttgctgacaaccccaaatccctaggttgatgaagacctatttaaatctcacttttttttttttttttgagatgaagattcgctgtgttgcccaggctggagtgcaatggcacaatctcagctcaccacaacctcctcctccagggtgcaactgattctcctgtctcagcctcccgagtacctaggattataggtgcatgtgaccacgcccggctaatttttgtatttttagtagagacggggtttcatcacattgctcaggctggcctcaggtgatccgcccgccttggtctcccaaagtgcttggattacaggcgtgagccactgcgcccagctttattcccacttctgaaagcacttagagttttgaggatttgagaaggaaactgacttcattgcaggtccagaaatgagccccaattaacttatactaatcaataccttttattccagattatggttattggatcaggcataagcctgtgatttaagtgggccagctagtgggaatcagtttcttgctcagaatgctgggcagctcaaggaaacacttaacgtttactggtttatcataaagtgtattacaaatgatatagatgaaaagatgtatagggcaaggtatggaggaagagatttctggaagtgagcagggaagcatgcagccctcattgctgcttctagtgctactgaaggaagcagcttgacattgaagcctaacattgcagaaggcagaagagaggcctggaaagaacttcaggacttgatgacattgttgagcctctacatgcctacgttagcacttttcttacatgaacaatagagaagattattattcagctaatatcctttctgaatgcattctaaatgctatttgctgtttaagcatattgtgtagaaaaaacaaaccatggctaggcttggcggctcacgcctgtaatcccagcactttgggaggctaaggcggctgtatcacttgagcccaggagtttaagatcagcctgggcaacctgtgaaaccccgtctctacaaataaaaaaaaaaaaaattagccagtatggtagtgtgtgcctctagtccaagctacttgataggctgaggcaggaggatcagcagaggccggaggtcaaggctgtggtgagccatgattgcaccactgcactccagccccgacattagagtgacaccctgtctcaataaaaacaaaaaatgggcagggcgcagtggctcatgtctgtaatcctagcacttcaggagcccaaggagggtggattgcctgagctcaggagttcaagaccaccctgggcaacatggtgaaaccccgttactactaaaatacaaaaaattagccagttctggccaggcgcggtggctcatgcttgtaatcccagcactttggcaggctgaagtgggtggatcacgaggtcaggagttcgagaccagcctggccaacacagtgaaacccgtctctactaaaaatacaaaaattagctggatgtggtggcaggcgcctgtaatcccaactacttgggaggctgaggaaagagaatcgcttgaacctgggaggcggaggttgcagggagctgagatcgcatcactgcactctagcctgggtgacagagctagactccgtctcgaaaaaaaaaaaaaaattagccagttgcggtggcgggtgcctatagtcccagctactcaggaggctgagtgaggcacaagaattgcttgaacctgggagtgttgcagtgagccgagatcacgccactgcactccagcctgagcaacacagcaagagtctgtctaaaaaaaacaaaaacaaaaaaagacccaatttttcctctgccctcacaccacagcaatcaacacaggagacttctgcgaccacatgtgtggagattttactgcaccaccaagcaatcagttctgcaatcaagcaatctgttctgcagcagacatcagctgggtgtcttccgattagattctgacactatctacccagagagagcatcagatcccataggttgagggctcagtc

SEQ ID NO: 46 - DNA, 6222 bp, Homo Sapiens
ctctctgccctgcgttgcggaggaggctttcgttaaagagactgcacgctgcggagcagggtgggtccgggtcagggctgtgccctggactgtgcctgggaggcagggacccgggctcagactcggggctaggctcaggctccgtgtgccctcccgagccactcaccgaaggcttcgatgcacccgcggagcagctcctccaccgtgcagcccttgtccaggtccagggtgcctgccatggccgccggcgcggggtgggctgggcccaggctgcgctccgggagcctcccaccgggctcggaccgaacccctgtcccgggagaggcagagcgggagtctgcggagtcgcgggcgggggagcggccccgcgggcagaaacggggcggggcgggcacgccccctgctggacaggggcggagttgtcccccgcggccactcccggggttaaacggtctggcccgggatggtgcaacccgccagttgggaaacggacccgcagagaggcttccggcccaccctcggagtcgcgggaaggccgaggggcttcacgaggatggggacgaaccaagatcccaggactggctggcgcccagccccccgcagggcgccttctcctcgcgccctctccccagaggcacctgcagcaccccgcagctcggctctgcgcccctcccgcttccctccctccacagcctcccttcccccgcagggttattttgggaacccagagcctgaggggacctcggaggaatttctccctggtatgggaggtggggggagagaacccaggcgtcctgctcgcctcgccccctcccgggagcccaggaaggcgaggcggggctgcggcagcccccagggggcctgccctaggggaggcggactggatgggagaggaacattcctggggcggggggagcccgctgcggccaggaggcgtcagcgggaagcctcagcctgggaactgagcgctcccaggccacctccgcaaaggtcccaggggtcccggctcagcttgtccacaggccctcttcctccctatccccggctcctgaccctggccccggccccgcacaggcgaactgtgagcgcgcacggagcagggtgtccagaggggggcgctcgcgccaagggtggccggtgggtgcatgacaccattagcaactccggtcactggcggggtcatacgcaccctggcaggggcaaacactccacacccaagttagtcgtcggaggccggggacctaagtggaggtgcaggcgtccgcacttacacgcaccgggccacaggcaccggcctcccatcctccgtctctcacacacaatggcacccacaccctgtgcacacctgcacgaagaaaccctcaggcacacatacccagctcgtccaccccagaatgcaaacccgcggacgaggtcgcctcctggacgtgctgttcacttgagccaggccagccttgagtcccgcggccacacaggcgctgacatcctcacacgtgtgcacacacgcaaggcagtgcctctccacgcatgtacactcccacacacatgcacacacccccatgggtgcgcacgcccattccgtcgcccccctcccatttgcggtgcagggcccgccctgcggccccagctccctgactcccctcactcccagattttggcagagccttgccccacggaaaggtaccccggccctacacatactcactcccccaggctggaggacaggggagctcctgtacggagttctcaggcggacttttcctaagagccacccagagccgtccccgcctggctctaccgcttcctcgtgtgaccttgagaatcacttggcctctgggagcctcaattttctcatctgccaaatgggggtacgcgggggagggccccgctggaaggtggctgggaaaagctgggtgcaccgtggaggtcctccgccctccggggatccagcgcgccttagctctcgtggccgctgccccctctcccagacccgggccgcagactccccacccgctcgccgcccccagcccgcccgcgccgccctgggcggggggggagtcgctgggggccgcgccctccttcgcctggcgccccgcccgcgctcgcccactcactcttgggacctgccgcaaggagcccgcaccggcctggccgaccccacctccgtgcgctcccgcccgccggcctcgctgcggctgcggctcccgcccgctctccacgccgcggccccgctccccgccgccccgcccccgcccccgcgccaggctgccccctcccccctccgcccctgcgcggagctccgcaccgccggctgcgccacccccaccgggggctccctctcgccccgcacgcggcggtccctgcggcagcttaacccctcccctgccgcgccgcccgggaggccagggccgcgggcggggggctgcgccactagctgccccgagggcgggcgaccggaggccccgccgcccgggacgcggaggggggaccgaaacgaagagcccctcccccaaccgcggacgccccagtgccccccgccctgcctgggtgtcgggcggaggaagccgggaggggcaggaagcggactgcggtggggaaggggcgccccgcccagcccccagctcgggttcctgttttcgagacaaaccgttcccatggggctaacccggcccgggaccgggcgtcttcctgcaggcagcgggtggcacaggcctagtggaggtcgggggcgtggggacagctggtccttgagatagtctgggggatgggctaggacaagatgggaatattttggggagagggacctgtggggagcgaggaatgaaatcgtggctatctggagacgcggccttgatgtctgggaatgggggcggggggcccagttcacacaggaggaacggggccccggaagcctggctccccacagggtcgaatggaaaggggcagccgcatgtggcggtgggttctccgcagctcggagactggagacctggatgcctggccaacagggaggaacttgggaggggcagccgcaggcggttggggtccccactagccgggcctaggagagcgggtaacggtttccgaccatttggcttcagacacactcactgtgaaaccaccgaccccaaacctcccttccgaggcgtgcccctcccagccttggggcgggggatccaggaccgcccccgcacctcagtcttggtaatgtaagacttagaaacaggacctttctgttcctcagtttccccataatgagggcctagactaggcggtctgcgagtgttccctgccgtaacactcccccgactttggatccagtgtagccacctgctaagagacccttaaacgccgcagtagggcggggctaagggcggagccaagaaggcgccgagcatcctctgcttcctccccctcctgggtcctgccctcgacagcgcggatcctccgtggtccgggaagcctcagcccaagtcccggctcccagccccggtgggccccacccaggcagacgccccgcccccggccagcgaggctggccgctgacctagtatggacacggcactgggaagagaggcgtggagggtgacgccaggaaaggggctggagaggcctaggccccgcccccacgggtcgccccctccacctcccatcaccgtcccgccgtgggacgcacctgccgagggtggaggataagggggtgactgcgcggctgctgttgagcccgccaagagctaaaaatatttcccaacaaagaggagtaaggaggctcccaaggagaatgaatttattagggagtgggtgcagttggtcagaccccataaataggaggggaccgggagcccgaggacggaagggggcccgtgtccttagtcacgctggacactgggacattgagagtggggaaaatgagggttccaggaggggcttagagatctaactccagtaccccaccctctgcatgaggtgctggggctggcccaagagagtgtgacagactcaagggctggtttggggtctggtctggaggctcagatggcctcatccggggctggcaggcgctggcgggaaggctccacaccccagatctcccgggcatactgggcaatggtgcggtcactggagaacttgccagaggtggctatgttccggatcaccatccgcgtccactctcttgggttctgcaggtcaaagggaagctctggttcactctgctggcaggatctccaccttctgcctcatcccaaccagggccaccaaagccctgccaacccctggcccaggacccctcaccttgtacaaggcgctgactttctcctggcatttaatgtagtcttcataatctgcgaagactttaaacctggaggggaaaggataggcatgtgctattcctttagggggctaggataagttctatgaggtcaagggccaagcctgccctgtcccagtggacagccggggacctagagggtcatgctgcttccaaaggcgcctggctccaactaccaggacccgcgtccggcttccccaccacacacctgagcctcgatctgccctgcggccccacctgagtgattcccgggccaaccagctcaccggtcatggtgcatgagcatattgacaatgtccttgaacaggtcgggctgtttgggggagaagaagccactgctcagctgctcaatgacctgccgaagctcaggaatgcgatcgtagtactcctgggcattgtacctgccaggacagagctgtggtcagctccccggaaaggggttcctggctcctcttccagagaaaagctgagaagtcccatgccccagggtcaaaacccaggtccagcctgctgctccccagggctgccacatcgcccctgcagggcctccctgcaactccccttctctgctcagcttttcatccctcctttgtgaatgaagaaactgaggcccggaggatacagaaagctaagtgttagagccaaggcccccaaacaagctcttttctcccacacgccactgctgtctcttaaccagtttgtttgctccaaaatggcttttctcctccagtagcccaagtccatatccggccttgccctggggcagcaagagcagctaacaggtacaacccttcaactgggccaggcatggtggctcacgcctgtaatcccagcactttgggaggccgaggtgggcggatcatctgaggaggtcaggagttcaagaccaacctggccaacatggtgaaacccagtctctacaaaaatacaaaaagtagccgggcatggtgtcgtgtgcctgtaatcccagctcctcgggaggctgaggtggaagaatcacttgaacccgggaggcggaggttgcagtgaaccgagatcatgccattgcactccagcctgggcaacagagcaagactccatctcaaaaaaaaaaaaaaagataacccttcagctgaccctcagcgcccccaccacggctcaaagcgctccacaggccagtctcaaaacctaaccgttccaaccagaaaccagcactccccacaaaatctctaatccctcgtgcgactctctagtcccttgtgcgactctcaggcaactctccctgcattatggtgtcagcccccacagtggtcccccacctgccccctccagcactgtctccatcctgcagccagagggttcttccaggcctcgttctgagcatgcgggaccatgctcacaacatctcacagctccctcctgcccatgggacagccagctttctagtgaagcctcacaggagacacttctttcagtgtttaatgccaactctgggaagctgttgtgggagtgtaaactgggagaaactttctggaaagcagtttggcaatctgtatcaagagccttaagaactcatactttttaactcagaaatatcacccttctgataattatcttaaggaaatcatcagatgtggacgtagacattaaaaggttgctcatcacagtaatatttaacaaaccggaaattaaccttagtgtccagccacatggaattgattaaataagttgtgacatgctcataggatggaatgttatacaaacatttaaaatatttttgaagactaataacatggaaaatctctctccaatgctaagatatcaggattcaagcagggcgcggtggctcacgcctgtaaacccagcactttgggaggccgaggcgggtggattacttgaggtcaggagttcaa

SEQ ID NO: 47 - DNA, 6143 bp, Homo Sapiens
caggcagccacttcctggatgggctcatttcagctttccactggcagtgggaagggtacacaaatactgacctaaaagcaggaggctaaggcacaaaatataactcaagaatttactacagacccagtgtggtggttcatgcctgtaatcccagcactttgggaggccgaggcaggcagatcgctggagctcaaactcctgagctgtggattacagtgtccttggggcactgttaggttaatctgtagctatgtggcaatatgaagtactttcgagtgataagtaaatagctcaagggggtgggaactacgaggtgactgctgtgtcattttaatgtctctctgggcctgataatttaaaaggactccgcattcctcagatgatgattattattattttctcactatgaggcctcagactttaaaatccctcaaactggcccaggcacagtggctcatgcctgtaatcccagcatttttggaggccaaggcgggcagatcacctgaggtcaggagttcaagaccagcctggccaacatggtgcaaccccatctctaccaaaaatacaaaaattagctgggtgtgagggtgcacgcctatagtcccagctacttgagagactggggcaggagaatcacttgaacccaggaggcagaggttgcagtgagcagagattgcaccactgcactccagcctgggtgacagagctgagcaacagagaaagactccgtctcaaaaaaaagaaataaagaaattttaacaattaaaaataaagaaaagcataatactgtaataatactccaatgaaaggagtagctggaagcagtaagcgcctcaaatcaggatcacctggagcacttgaaacctcaccacccccacccacacacccagtgtttccagttttactgaatcagtccagagtggatgctggagaatctgcatctcttagaatctcccaagtgatgccgatgctgctgctctgagtgctatgctttgagaacagctgccctaaagcacactaatagttgttacacatgcatcatctccaactgcaggtactttaagaatttcccttgagaaactctagccttccagaacagggagcgccttctccatgcatttccgacagcacctgaactggaagcagctcagtacagcagctccaaagaggctggggagccagtctgcccagctttggagcctgctctgacacttgattgttgtgtgagtccaggcaacttaaccactctcagcttaagtgtcctcggagtaaaacagaggtctactagctccttcccttccatcagggaaaccggaaatgaacacctactcaagtcatcaatgggagcgcatcacttcctatttccctgccacctacattttgaaaatgcagggggagaaaaatataaggaggcaggagtcacatctgtaatcccagactttgggtggccgaagcgggaggaacacttgagcccaggagttcaagaccagcctgagcaacaacatagagagccctatctctacaaaaaaaatttttttttattatccgggcatggtgacacacacctggagccccagctactcgggaggctgaggcaggaggattgcttcggcccaggagttggaggctgcagcaagctatgaatgtgtcactgccctccagcctgggtcacagcttgcacaaagcaagatcctgtctcaaaaaaaaaaaaaaaaagttccttgccctgcctgaagttgaggagaccatttgtctacctcaagttattatttgcagaaaccacacccatattccttcctcctccacgtgcccctctccttaagagaaaggccgccaaacaaccaagagaagttcctacacccactgagtgtaccacaatcgaaacaagagtaagcgactcatcctcttggaatcccctaggtcaagcttgtccaacctgaggcccatgggctgccaaattcgtaagctttcttaaaacatcagatttttttttgcgatttttttttagctcatcagctatcattagtgttagtgtatgattagtgttagtgtattttatgtatggcccaagacaattcttccagtgtggcccagggaacccaaaaaattggagacccccaccctaggttgtcccataataaaaggcaatatcaacatgtgggaaagatgaggcggcagaggtcaagaaacagaagatctaataatcatccaagtgagattgaagcccttcaaaggttcaggcttatgtagttagcagacggaattcccccacacacacccgccactcccccaagacggagtctcactctgtcacccaggctggagtacagtggggcgatctcagctcactgcaacctccgcctactgggttcaagcaattcccctgcctcagcctcctgagtagctgggattacaggcgtgctccaccacacccggctaatttttgtatttttagtagagacggggtttcaccatgtcagccaggctggtctcgaactcctgacctcgtgatccacccacctctgcctcccaaagtgcagggatacaggcgtgagccaccgcgccaggccaagatggaaattttagttactactgtcacccgagtctttctccgtttgtttccttgcacaaaatgggtagggctgtgggccctcccagctcaggagccctggggtggttttaagaaggtagaactcctggtaggaaccacctgcatcaagaccatggatcacctctctgaaggttagcgattccagggaccccacctccgagctgtcctcctacgtggaagtgaaagtattggaaacaggggaaagaagctggtcaaagacagactccagtcgtggcggtgcatgtcccagttaaaagcaaatcctggaaaatcttgttcaagaacagggtccccattcataaatgaaaaataataatagtgttattttacccacatgaaacttgccataactaggtaccacgacccacatggacacacagtgagattcccacaaagaggcaaaaggagagccctggtcactgagacaaaagatacagagacaccgggacacagagaggtacaacgggacgtggagttggatcgagctgtctcgtaaggaatatcggaaggggtggggacactactgggagatggcataggtccaggacactaattaggctttggctgagatcagataaaggaaactgttcgtaagctgcttacttaaaaagaaaggaaaaggtgcgtttgagttcaggagactgcgagtcccagagcaggaggcgggagccagcgaagggtgggcgtgtaaggggtgcagtcgcttctcccgctgggcaagagactccccctttcggcagcctgggttccccgcctccccacctcctgctcctcctcccccgagccctaagggcccgcagggcctccagtagcaaagccactggccccgcgtccccgcgtccccctgcgccgcgccccggggcgcaggcagggaccacgcggccggcgtgggggcggcgccacccgcagcagaaagccccggcgtggaccgcgtggcgtaggaaagcgctcccctcgcccccagccgcagagggcttgggcagcatcgggcgcggccccgggagagtgcgtccgcggcgccagcggctgcagggtgacctgtttcgggcggggacactcaccagaagaacacgcgtgagcagaggttcgcgtcctgcagcgggttgggcttcacctcctggtacacgggcagcatcttgccgggcggggcgggcgcgggccggggtcgcgctgatcaggcggcggtggccgcgggctccgctcctggacctcaagcagggatgctggggctccggccgccacgcctgtccgctcggctggagcctgtgaagcagccgcttccgggagccgggcgccggcggcacgccccgtccccgcctctcaggcccgccgcctcgggggcgcccgctacgcgccgccgcctggagcccgggagctgcgcaccgcgtgcgagcgcggccgggaccgacgggtgacgcggcgggaggagacgcggcgggaggaggcgaagctggcgacgccaaagggagcccagagctacgcccaggggtgaggcgagggccgcctgcgccgctggatggagagggtagcagagcgcgcggcaaggaggccgggtccggaggtgcccacgtgcacgaacccgagtgaaactttccgaaattcactatccgagtctaggcgccgacacagaaggtggagcagggaggcgtcggctgtgcccgcccctgcgccgcagaaacgccccctcggctacgggtttgggaagactgggagacagctgcctcgtgctctagcagcccgccccctgggcgcctttcccttctcaggaccaaacgacggtgccatgggaggctcttcaacctgtgagccaaacatttgaccttggacgacagcaaagtttagccacagattatccttgtagagctgcaagacctcaagaaagccgggtaactcgagagtatgacccagatgaattcgggagatggatgaatgctgtcgtcgatgggggcgggctttaggcatctcacatgttgcatgctacggtggacctctgagctttttgctgcccccttagattgggaaaggaatataagaggaaagagagactgcctgatgatttctgtcgtcaagccctaaagcctaacagataacagtggcaaacgacacgtgggttccagaataccagtgatgttcatgtgcatttctgagtgcgtagcctcactagtgtgtgtgtgtgtgtgtgtgtgtggcagtctcacacacagtgtcacgattatggctcattgcaccctcgacctcccagggctcaagcaatcctcccaactcagtttaagtagctaggactacaggcacccgccaccacacccggctcatattttgtaatttttgtagagatgcaaaaatcaaaatcaaaggctccaagttcaaatactgataatttttgaagccaaatgattgtcatggaggtttattttcttcatatttcatgcatgtttgagaatttggttttctttgtaataagatcattttattgttccttgataatttctcactttgttgcccaggctggtctcaaactcctaggctcaagtgatcctcccaccgtggcctcccaaagtgctaggattacaggcatgtaccaccacgcccgaccaattatctcacttttaattctatcagtgccccattcaaggttatccttactttatagatgaggaaggtgaagctgaaaggcagaacttgtccagtcttagagccaagaaaggataaaacatgatttgcaataagcctatgtctaagcatggcctgtctccctggtggatggccagtgtgcatgagaagtgcccagaatatgctggttgaatggctgtaggaatgaatgaacaaaatcttgttccaagcttgtgtactcccacctctaagtcttcagtcatttctgtggctaccttaacaaggtcagcagctgctcttcatatccaccctgaatgaaaaaaaatgaaaggctccaagttcatggtgcttggaacaagatcattttattgttccttgataatttcccatgtatatttgctaaaatagtatagttaatagcttttaaagaaagccttacacaaacacatatttaaaagtcaagcacaggctagccagcatagtgaggctctgtctctaccaaaagttttaaaaattagcccaggtgtggtggcgtacccttgtagtcccagctactcgagaggctgagacaggaggatggctttagcccaggagttccaggctacaaggagttaagaaggtgcccactgggctgggcacaatggctcacgcctataatcctagcactctgggaggctgaggcaggtgaatcacctgacgtcaggagttcgagaccagcctggccaacatggtgaaaccccatctctactaaaaatacaaaaaattatctgggtgtggtggtggatgcctgtaatcccagctactcaggaacctcaggcagaagaatcacttgaacccaggaggcggaggttgcagtgagccgagatcatcccactgcactccagcttggcaacaagagtgaaactccgtctcaaaaaaaaaa

SEQ ID NO: 48 - DNA, 6104 bp, Homo Sapiens
aaatccttcaaaagcataactggtaatgtaaaggctgaatctcagcccatattcctcttgcaggccctcagaactgtcctcaggtccctagagctggacagactctttatggtcattttccaaagcccccttctacagtgtggaggtccagaatcagaagagcaacgtgcctggccaccactgcagagacaggctagaagccagccccttgtggcccatgcagtgcgccccaggtgggcgcccttcccttcctggaagcactaacaactctctacacctggggctacatagccactgctgggattactcagctttctgccccagctgctgcctttgtcaccattaagacctccaccaaaggcagagtaggggaaaggttttaaaaaaataaagtcattcattgtagaagtctccttctctcaggccttccacaatacttctccctagaccttggagaagaggcaactgcaactagaggctctatctactgacagagctcttcctgctaggggtggaggggaggtggctacagatccaaggaaaattccattttctttcttggttggtgacactgaccattcaagactcctaatcctgccctgttttctaattctggtaaagtttcctagtgtcaccagtaagagaaaccgctttgtttcataagtggattcttgaaggttgatgcttttaccagaactagaagggatcagggtaaagtatagggtagtaaaagggaagaaagggtgacaaaagcaatctgggaagtatggagcccagagagactcagaggactaggccatgagagaacagggagaagagaaagtactaaaagccaaagtgcagcctcagagttctaagaagatggggattatctgcaccatagactaggaaacctggctttcttgctgtacagtctcttaactggttgccttgtgaaaaatcctcaaatcgttctgccttttctggtgaaatgggagtagacaaggatttataaaatgctctattataggcaggtcgaaggtgttttaacaatccatagaatgaatggcctctgagtctgtaaaggcatattttttaaaaaaatacagtagccaaatgttttcctgtaaatgaaaaaaccaaaaccccgagagaaacaaattaacttgaaggtgttttccaagcctaaaagtaaccaaagccccataggtttgctgaaggagaccgtcaaaactctaaactggtttaggtgaaatcctctccaggcataggtatctcagtggaggtcagtttcaggctgagctttttatgaaatccgcctagaaaagtaagagatgaaatggagcaagggaactggaacttccacaactttctttgcagtggaaggtgactctcttgacttctagtatggattccttccagtcccgtcctcttccccttacaatactcaatttaatgtactgaactcctccttctgaatctagtgcaaagtacagtggtggaccctcaggggatacctggatggggagaggcagggcgtgcatacagggccaagaatccttcgttcctgggattataagcacgggaagtccagcatcgcaagcttcctgccgctactgggtatggtggtgcaaggcacagtcccatcagtgtcgatgtgaatggagttgtgaagtgcacaacttgtccagcccctacgccgaggccaggcctttgttcatgcagttgcctagttctggtcctttggctacaaactcaaagctgcctggccaagagccctttcactcactgtccctctttcttcaacttctgttatccaagaccctctatagaatcatagtgagggggagaggagtgcagcttcccatacggaaggcgatatgtttccctgacccacggatctggaaacttccgtggggcaggggcaaccgaggggtgccacctctgcgggctccctgcaagctcctcggccgttctgggcagggccgggaggggccaccaggtggcgcagccggagcccagcgccccagcaggtgcgggcagcgcggaaagtccgcgagtgggagtcccgatgccgggcgtggagatgtgggggaggaagtcggcgggcgggcgccggctccgcgaagagcttcggccctagcagatctcaccggacgagctctggcctcgcggccgcccctctaccacccctcagccccagctccctccccgaaaccccgggcgcagcgcgccgggcgttctggacacgtccgcccgtcgcgctggtgtcccgggactccggccgaccccggcccccctccgccctcaacttccctcggggtgttggggcgacgggcaggggcctctttcccaagaaaggacacaggcgctcccgagggccacggccgcctctactcaccgcggagcctctctcgccttgcccagggtgcccatggccgcggcccgcgctcccggtgccggctcacctagcgcggccgggcgcggcgcatcgcccccgccaccaccgccgccgcctgccggctctctcccccccgggcctcgtagccccggcgcccgccagccctcgagcccggcgagcccgaccgaggtgcaccgcaggcacaaactttgtgcgagcgcgccccctctgcctcgcgcgcgcgctcacacccgcctggcaaccacctgacacgctgatgctggcggctgcaggaaacgtgcggcgccccgccgctcttccccgaaacctgccccctttccgcgggtgccccggcctgcgcctcgcgcggttctctcacccctgcccgccttcgacctctcttggccaaagggttaagtctcaggggagttggagaggagcgggctcccggctaccacgcccgcgccttgcagggcacctgtgcccgtcgacctccacctcagctcgggaaacgggctgcgcctagcggctcccatgggaccccctttcccgcagccgacccgcagcttccacgcctcttcctgcggccgctgctcggagcactgcagtgaggacgccttctcccctccagggcctctcctgtatatatcagagcgcggagtccggcaggggaaaggaacggaaagacagttgtgaagttgccttaacctgtgccctggggtctctaggtagccgtctgcaggactgggccgtagacatgtgccctgtgccctgcgccctgcaccttggacgagggctgcctgtgtggaggtgcgctccacaggcgtgatccatatctggcccagacgcggccgcctggcgtcggtgggtgtaggagatgtggggacaactttcatacaacgtcagtgcgcacagaagacctggccaagaggggcggcccatccgctgcttgtccaggtgatagtgctgataatctcaatagctaatgattgagtgcggttgtgctaagtgctttctatacattacctcatttaatccactctccctgatacaaagagatcactgttgtaaagatgagaaaatgaaggtttagagaatgctatgccttagatcatacaactaataaacagcagagagacctctgacttggactgaggtctgtctgactccctgtaatcactgctggactgccctaataacacactcattatcacggccacagaccataactctagccacagtcatagttgtcttcctggccatagtgttctggactttaaagccttcctctgtttcatttatatatttccttatatttatatgctaccttgtccttaaaacagaattcgagatagcttacaagagcacataacctacaaaaagaagtgtgtgaaatgaaaaatgaggcacacaagatggagccaaaaatgaacatcatttgaaataaatgcatctcatagagtcaaatacccttgctacaggtgggaccaaaatttgtctcctgcatttctagcagtcaagtttaaagagaggccttgtctaaagttcaattcctatcacatgcaagaccaaaaacaaaattgctcaagagaagatccccctttcttgatactgagaccagcaagaaatttctccagagaatcctcatgaacactgggtgatataaagaaccaagtcctcagtcacagccacagatgcagaaggggcaggtgaatgtcaggagaatattaaatgatgacactctttctcactcactgggtctaaggctcaaacatttttagagttatctattatacacccttcctcatgtaagccctacaacctaaacaaccaagttggcggatgtctgaggatggtaaagatttgtatctatatatgaatctatctgactatctcccaacagtcctaagtttgcagtcttagactttgttcacagagatcttctcttattaccaggtgaacaattacttttcactgacccctctactacagaatgagctctttaccctacttaaatctataatatttacactttcaattgccacataatattctgtgtccctgtcttacctccacagctaaactgtaaattgtccgaggtcaagaatcaggtcttatgcttctttagcttccacagctgccaacttgaggcagtacctgtgggacattactaatgaactgctgtggatttgattttgaaaagcaaaatgtgctgacctcaaagaagaaaataagatccttcctgattatttccggagaaagggtttcagtttttctttgaagtccgctgtctatggcaggagtgataagcttactggcactgtccccggtggctttcgtgggatccccatcacaggttatccgaggccttcggtatttctctattgcttcacccttgaaaatagagccccttccatgccattcattgcactgagtctttggacagcaaaatctttgtgtgtggcaggggaataatccagccttatactgcatatgcataggtatgtatgccaaatggatgcctttatgtaaatgcatcattatatttatatgtaaatatacatatatgcataatactaagtgcacatgtaggcagttacacacatctgcacacctacagtccacatatatacaaatggttgaaaccaaggttattaattcattcaatacatgagtcttgctgagttttctaaagaaagaggcctacatatgcccagcgagtgtttttctcttggactttctgagtactctgcacttcacttgcatctgattctgcttctgggccccctcgagctcttttttgaggttttctggctactcctacctgagcaataagtcttttccaaacatctaaaaaatgagaagtttgtctatgtctcttttaatcatcggccatgtgattagtctgcctggtgttatatgaggcacctctgacctcaagaacaaactttttttttttttcacaaaatacatcatttaatataacattcttataaggtagctaatgaggataatattcgtgcttttaaaaaaatcattatactttaagttctgggatacatgtgcagaacgtgcaggtttgtaatataggtatacaagtgccacggtggtttgctgcacccatcaacccgtcatctacattaggtatttctcctaatgctatccctcccctagctcccacccccagacaggccccagtgtgtgatgttcccctccctgtatccatgtgttctcatcgttcaactcccacttatgagtgagaacatgcggtgtttggttttccattcctgtgttagttggctgagaatgatggtttccagcttcatccatatccctgcaaaggacatgaactcatccttttttatggctgcatagtattccgtggtgtatatgtgccacgttttctttatccagtctatcattgatgggcattcgggttggttccaagtctttactattgtgaacagtgctgcagtaaacatacatgtgcatgtgtctttatagtagaatgatttataatccgttgggtatatacccagtaatgggattgctgcgccaaatggtatttctggttctagatccttgaggagttgccacactgtcttccacaatggttgaactaatttaccctcccaccaacagtgtaaaagtgttcccatttctccacattctctccagcatctgttgtttcctgactttttaatgattgccattctaactggca

SEQ ID NO: 49 - DNA, 6104 bp, Homo Sapiens; identical to SEQ ID NO: 48

SEQ ID NO: 50 - DNA, 6167 bp, Homo Sapiens
ttctggctgccaggatttgtctgagtctcttctgtcctaagagaatcaggaagagcctggtgcccacattttgacccttcctggttgggaagagtgaaaggagtgctggagttggtttggctgggtaccctactgagaagctggggctggacattttatttcagggagcttggaatgagagtgggaaaagtcggggttgggggactccatgccaaagaagggtatggaacaccaagggccagcctctagggaagatgaacccaagctctaagtcaacagcacttgggctttcagtgtgtgggctacagggctgggagcagaagaggtcaggactgagcaaagggcccaggccagggaggtggcttgcagctgccagatggaatagggggcatggctgtgccagtctgacttcatgaggccttaggatcctaggctagagctccctggacactgaggctgcagcagaggcagtcagactggtctggatacagccagatgagactgcacaatgttaggatgggcttggtgtttggtgccagagcgccttgcatatcccgctattagagcatcttcacggggtgaggagctcacccttatctatgtctgtcttcctcaggggctcacagcctgtgacagtcagcttctaggttgaggacataaaatatggaattaacatatgataggctaacaagtccagcttagtgtgcatttcctgtgcatctactatgtgcacggtccctgattctgccccagccacttaggggttcccagccaagagttggtttctattccttcaaaaaccatccctggcccttcagggaggaagctgtctgcttggacattggtaaaatggcttcctgctgaaaccaattcttcatcagacaccagctagtctagttaaacagatggcttcgtagacgcctctcaactcaggcactctgtacatgcccagcagattgagccaaagcttctcgtaggctcaagcctggtcacagaatggcctggagttagacctatcatgctaggctctgtggcttatgccatggggcacccaagtcaaagagaaacatggagcagctgctggcaccatcgattttactcaaagattgagaaaagaaacagcgatgaatttttgtacacatgtgtagccggaaggagcaggatctagttttccacaggagtcaaagttggtctagaggcaaatggaacctatataaacatatgtgatttaagtatgagtctttaacagaaatttgcgccagaccatcatctgctacttttaacccggttctgttctcttgtgccaggagggctgctctcgtgaacaaacctgaggatctctgactagtagtgttctggggaaacagctctgaacatgagtgcatctcatcaattagttttgcactgatgttcctcccatgatctactgctaggatgattcaatacctgggccaagagttggatgatttgaaatcaatgtagggtctcattttcaggaattcttaggcattggatgaattctaggtctgattctgccactgatttaccccgttgttgggtaactccctttctttgcctctcagtttcttggtctgtaaaatgggaaggctgtatctctgaggttctgttcgactttaacatctggtgacctaaatagctctgtccaggtgggtataattcagattcaactgtgattcgtctagatctaactaaaatgtattgggcgcttactttcatatacattatttaatgtagggctctcaaaaccccagaaaggtaggtgttattatcttcattttgtagattacaaaatggaaactcagagaagttcagcaagttaactgaagtcacacagccaggaagtcatacagctgagattcagtctcaggcctgtctgccttcacgtccagggggctgagaacagataatatgagcccatgccaacttggcttcccccacccctcacttcctgcctacccaggagctcagctctgtgatctagtgtagtgggttgagggatggaggggggatctggctggggctggggcttgggctgcaggccccgggtaggtatgggtatatgggtagacactggctggagaggggcaagttctgaagggctgagagcaaattctctagtctggcctgggactggctcttccacatgagttccccaggctccatttgagctgaagcttaaggagctgcctgctctttgctcttctttccatctgggagcccctgctcaccacatggcttgtcatccccagggacccaccctcaaaaattcctgtccacacttcccagtcctcagaaactatctcctaacacccattggctgaaggtagggaaggaagagatgtgctagagagactgagctcggatctctgtcctgacaattgggaggaagacttcaagcgatgcttttatttcaaccaattcaatcaccaccagtctgtgtcttcatgcagcagtggcttttgagatctcggttgtcttttcagaacattgggacggcctcaacaacttgcatgacgctgggcaagtgaatttctctctctgggcctcagtgtccccatctaggcaatcaccagccgttaggccctatggatggaaggttcctgcctgcagtggcattttaggatccactatcatctgctttatcttcctagtggcaagggactggaccagatgcttttggaaagcgcaccaagcttaaaggtggctctctctgcaggtgcccctcctcccttcacgccagaggctcacccccaccccgcccgggctccctgttagagccaggcctggctcttcagccttgcagctcaggaaaccagagcgcagcgctatagccgcgactgcggcggcggcggcggcgcagggggcgggggaggagagaagcgcccacttcgtcccgctgcctccgcagcagccctggccctagccccggcgcatcagagcggtccttgggaatctttgggcttgttgctccggcggccgccagctgggagcccaccaccgctcgatggtaccgaaccgacccgtgtagccccataaccccagcccaactccgaggagctagcgcagaccgctctccgccctcagctgcggcgaggcaagggctggcagcgctcggacgcctccgtcttgcccttcccatgcctaagcgcggggaattacacgttcccggtgtagaacagacgatcggggctattagggctgggcggtgggagtgggggttgggagcaccatttttggctggacgtgtgtccagactcatcgtctctggtccttaggaccccatcttcctctgcatctccaggtgtcggcccctctgtacccgcctcccacggggctcgtccggcgaagggcagccgcagcccacatctactccccgccctcaatccctgccccctctgcccgccgcagtcactcgcctggctgggagcaagcctcccctctcgctgagggtgcagagagcgcctagggcgccaagagtagaggggccaaagttcaagcgccatcagccagccgaaggccctgagcccccagggccgcggccgggacgcagggaggtcaggacgcgacgctcgcctcacctgtttctccagcggctccttggccgacagcgccggcttgggggagggcgcgcggtcgcagacgcagccctccagcaggtaaagccccgagggccgcgagctcgagtcgctctcgaagtagaagagcaggttctgcagcagcgcgaaccacttggtttgccattttgtgttgtccgaactccgcttgctcaggtagcctttgcgcgtgccgtccttgcgcgccagcagtcccagggacgcgacgtggccatcattcagccggatccccttctgcatggtgctcagaggccagcgagaccccacgcgcttacatcttctccgcgcagcagccccccgtccgtgcgcgctgcgcgctgcctctctctggcgctcgctcgctcgctccctctagctctcccctccccccaaatatctacactccaggatctggcgccgagccgcggcttcttgaatccagatataccattccccgctggaacctcttctccgctccgcagagccccagtacccggaagatgccgcccgaccctcctccggtgccgggcaaactgagggactggcgatctgcgcgctggcgaggggcaggcggagtcatgtgacgccgatccctcgaagagcccgtttcagcagcgcggacagggacacacgcacgcagccccgccgaggcgcagagccgcgcgcaggctgcaacttggtgcctcctccccctccccagacacacacacacgcacacgcacacgcacacactcaaaccctgccctccctcccctcatctccccttctctccctcggatgttaaaaagcaaatcagatcaattttcgtttaacccaatgaaaccccgaaggctcgccatcccgggagtttgcgtctttgcgccccaccgcggcgcactgtagacctggggttaagtgccagttgtcattttctcctccaaaggctcgccccccccccccactttatttctaatacgaggtggaaggaggaaggtgggtggcgaaatagagctgcaaaagcgtccagtcctagtctttgcatagtcagccgggtcacattgaattccagcatccggctgcactcccggcggcttccccagctacctgaggacagtacagggggtgagatggggtggtggttggtgaacgttggttactttattttatattattttattttgagagttgccataattaccggcgccaccccccgtgcaccctgaggtctggttggcgagccgctgctgggagttttctgcaaataccccccaaagcctgaaggcgggcttcaaacgcaggcgccggggaccatgggagccttcaaatagctgcgctggcgcaatgataccttaatgatagattttccgttcttatttttagctctcattcgcctacacagttacacggcatttatccgagaacgtcacagcgcccgcatgctgcaccgggagggcgcgcgggccgccgggcgagccgggagctggggcggggagcgcgcatcgctgtctgccgcagagggcagcgagctcgccccgacccggagcaagccgcgcctggcccgggcgctttgcagcggggatgggtgcccgcgcagccctgtgaaggaaagacaccatctttccgcacggaaactgcgtatacccctcccccgacacacacacacacacacacacacacacacacacacacacacaccccacactcacacacagcacacaccacacacgcacagatacacaccacacaccacacacccacacaccacacacaccacacacacacaccacacacaccacacacacacaccgcacacaccacacacaaaccatacaccacacacaccacacacgcacacacacacgccacacacaccgcatacacaaacaccacacaccacacacacacaccatacaccacacaccaacacaccacacacacaccacacacccaaacaccacacacaccaaacacacaccacacaccctacacacacaccactccccacacccccccacaccccaccacacacacgccacacacaccacacacagacaccacacacatgccacacaccacacacacaccacacacacaccacacaccacacacacaccacacacatgccacacaccacacacataccacatgccacatacacaccccccacactcccccacaccccccgccacacacacacacaacccacaccatacaaacaccacacactacacacaacacccccacactccccacaccacacaccacacaccacacacactacacacaccacacccacataccacacacacccctacacacccctacacaccacacacacccacacccacacatacaccacacaccagaccacacaccacacataccacacacaccatgcacaccacaccacacacaccacaccacacacacaccacataacacacccctcccacagaccaaacctgggctgcacacacacacgcatcacacctcacacaacacatgcagcacaccacacacacatacacacacacatacacacacacaccctagtttggagccctagggaagggc

SEQ ID NO: 51 - DNA, 6236 bp, Homo Sapiens
ggtctccgcctggctgacccccgccccatcccaatccaccccccaataggcttcaccacggcagcatacctgcgcatccacgcggtgaaggaccacgggctccaggccccgcgggctgaccgcatcctgtgcaagctgtgcagcgtgcactgcaagacccctgcccagctggccggccacatgcagacccatctggggggggccgccccccctgtcccgggagacgccccccagccacagcccacctgctgagggggacccccgcacccaccaggcaaggcgtggggcatggctggggggcgggatggggggtgtgggggacaacggggctcaaagggcccaataggggatctcaggaaggcgagggatgcccatgtaccactcaggctagggagacttctgggcacagggaggatccttgagaactgctctgtctgggtgaggatgcaggctgaggcctctggggtccagataggaagtgagcaacggctgtgtcccaggggaagcaggctgggaaggtgtggggtgagggcaaggctcttgccattcagatcgcgctgtgatccgtggtgtttctcctgtgcaggtactggtgaggtttgtccaatggcggcggcagcggcagcggcggcagcggcagcagcggcagcagtagcagcccctcccacagctgtgggctccctctcgggggcggagggggtgcctgtgagctctcagccacttccctcccaaccctggtgagctccaagttggttgcgggggagaggggagaatggagtagagtcccttggtacaagctcctctcccccctcttttcccaccaactcctatttccctaccaaccaaggagcctccagaaggaaaggaggaagaaatgttttcttaggggaattcgctaggttttaacgatttgtttctcctgctcctcttctgtcagacctgaccccacacaaacctgtcccctcggttgtgttgaagtcccctggacagtgggcaggggtggcagaggacacgagcagccactgcccgtaccccctctcctctctgtaagcccatgccctgtcttcccagggacttgtgagcctcttccctcgacggtcctcttctctccttccagtcctctccccctgctgtctgcagcccctccccggggagttggtgctttcttttccttttttttttttttccagggggagggaggagaggaaggagggggatcagagctgtcccaaagagggaaagcggtgaggtttgaggaggggcagaagcagggccggcaaaggttgtaccttcataaggtggtatggggggttggggtcaggccctgaacatcgtcctacttgagaatctgtcaggggaaaaagtcaaggggagcaggaggaagagccaggagggccagaggcagagaagagatggagtcttaggggccagggtgagcgaggggtccagggcctagaggtgcttcctgggggcgggggaatgcagccagtgtccccctcccctcttccaccccagctccagccctggtcttgtcttttcatccctcttccccacgacagaagaagttgtggccctggccatgtcatcgtgttcctgtgtcccctgcatgtaccccaccctccaccccttccttttgcgcggaccccattacaataaattttaaataaaatcctgtttctggctctggattgaatgaattgccctcactaagaactgccgccaaccccaagggtttcttctcggcctggtgtccgtcaatccagccttgctctgccctgtgaggctgtgaggttctggctccgccctccccaggggcagccttactggcggcagcacagatacagggcggggccaaggctgtggctgtggagagcaagttccaggtctctggggaattcccaactcggacaggcccagaatagcccctggaggtttgaagaggccccgtcagaaacccaaacagagctgccagacgggaatgccgccctcccccgtccacactcatggccgctgctcagcccccagccgcatccctccccacgcgcgtcacggccctgaggccatggtgggtggatgcggctgcggaaaggctggggagtccgagccctaggactgggagcagcgaggtagagaatgaaagctgcacctgtccctcatcctgggcatgggccactctgtgtttacacgggctcctctgcccagctcctcctgccccttggaattccctttcctgtccccgctccgtcctttccagggccccttttttgagccttccagcgccagtttctgccgctcctttctgcaggctccattctctccaaaccccaccctgctcctcctctgcagcctccccgcgtcttgccccatcttccttgccctcctgctcgtagagacgcctccacccggtcctgcctgtctcactggtcccgtctcctcgcagaaccctctccgtttcccccaaatccccgtctcttccaggaatcccggtgaccgttggcgggaggggccggggacttaagaaggaggcgtctctcctggaggcgcgcgtgagaaggggcagggagggggcgcgagtggtccccgggccggttgcctgggtaacgcgtggctcccttgggctggcgggaggggccggaggctcgcgaggggcgggggcggcgacggcggcggagcgtaggggaggggaccggagaggaggggatgagcacacgggagaggagaagagggagacccgccgcctccctccctccctagctgacttgctccctcccgggctgcggctgctgcaaaagccagcagcggcagcgggagctgtccggaggccggcgtcgaggtgagacccgggcagactgaggctgcgggtaggagtggaccgaccgacggctgacgccgggcggactgcacgggaatgcgggtgtctggagggctggtggtggtgctgggcgggctgaaccatcgggaggaggcgccagcccaccgaaggcgagggaagccccgggagaggggctgacaggggatcgaaggagataaccaggtcccccagaaaggggcgggagcgtcctcgccctaaacgcgcagcaagaaaacccgcaccgcctgggagcccagggaggaggggaggatgcagagggagtggaatgcgaatgtcgggtcctctgcccagtcggcctgtcggagtgctatttgcacagctcgttgattttggggtgctgggatctgagagtctggatcttgttggatggacccagggagagaccctggagaaggtcctgtttacaaaagggttaatcttccccagggctctccaagcagaagactttgagtagagcactcctcccgcagggatgtcccaccctaaggcaaaggaaaccccaacttttcttcctctccctagaggcagtgcaaggctggccctgagacaggaatgtggcccaattgggcctgcagtgctgagcgccctcttccctcctcaccccaagcctatctcctcctcttccagggtttgccgctgtctctgctattccatcctccccataggggctctctcccctctcccatctcaagatggcagccagcagctctgagatctctgagatgaagggggttgaggagagtcccaaggttccaggcgaagggcctggccattctgaagctgaaactggccctccccaggtcctagcaggggtaccagaccagccagaggccccgcagccaggtccaaacaccactgcggcccctgtggactcagggcccaaggctgggctggctccagaaaccacagagaccccggctggggcctcagaaacagcccaggccacagacctcagcttaagcccaggaggggaatcaaaggccaactgcagccccgaagacccatgccaagaaacagtgtccaaaccagaagtgagcaaagaggccactgcagaccaggggtccaggctggagtctgcagccccacctgaaccagccccagagcctgctccccaaccagacccccggccagattcccagcctacccccaagccagcccttcaaccagagctccctacccaggaggaccccacccctgagattctgtctgagagtgtaggggaaaagcaagagaatggggcagtggtgcccctgcaggctggtgatggggaagagggcccagcccctgagcctcactcaccaccctcaaaaaaatcccccccagccaatggggcccccccccgagtgctgcagcagctggttgaggaggatcgaatgagaagggcacacagtgggcatccaggatctccccgaggtagcctgagccgccaccccagctcccagttggcaggtcctggggtggaggggggtgaaggcacccagaaacctcgggactacatcatccttgccatcctgtcctgcttctgccccatgtggcctgtcaacatcgtggccttcgcttatgctgtcatggtgagccccatgggaccctagcccaggcctgctgtggctcccagcttcccgccagcgctgcaatagagcctctggagtaatcatgccttccttcccctctcctctctgcatggatcccacctccccaattccagggcctttgtttgcctctccctaggacctaaccctctgagccaccactgccctgcccctttgggtgggagggatatggaaacacgtgtcacacagcctcgctgacctgtgccctcctccccctgccccttcactcctccttcctcccttacccgccatctatggggctggcctctctctcttctggatgacttttccacctgatcccttctgggctggcttctcctgaccccggctatgtgcctccacccctcgccctaaccccagtcccggaacagcctgcagcagggggacgtggacggggcccagcgtctgggccgggtagccaagctcttaagcatcgtggcgctggtggggggagtcctcatcatcatcgcctcctgcgtcatcaacttaggcggtgagtgggggcttgggacaggcaggggaggaatggaagggttggcaagggcagctttactaacccctgcccctgctctctcctgtctgtcctccttacctctcctttgtctctccttgtctccccctccccccgtctgtccttccctctcctctcccacagtgtataagtgaggggctctgccccgcatcccaagacttttcttcctgttgggagctgccttgggcccatccctcccctggggggagcccaactgatggccctggcccccacccctaaggaccaagggagcctgagcggccttgtttacagcttctgtcctgctcctgcatcttgccaggctcctctgccaactgtaggcctgcctcatccctgcactggttccaacctccctgcactaatgcctgcatcccctccggcctcttggccccctatccctgcacttctggaaacctccctgcactctggaaacctccctgaacacctccccaactctgcgctctcagcctccctgcatctctcctggcctccctgcacttcttccagccccccaaattctctggacctccaccctggccgcctcctcccaactttcattgtcttggcatctctcaaccctcagtcctctcttccttcccttctttatcatctcccctttcctctccacgtcccgcccccttcctcttcctgcctcctcatctcccttaagcatcctcttctccaacctcccgtcaccgtttactctgcaaaattgacagcacttagacgaggcttgggggcagggagcagtgttgggagagggctccccaaccccaggctcggactgttctctgctgggaccacccagggtcggacacccaagggtgcctggcaggtcgcagagttggcaagccgggcctcgtatggggactcgggtgagggtggcgagtactggttccgaacgcacgcaggggagaagggagggacgcggcgctgacccttccaggtcagctggagttgacccgcccacctgggcttttcaaccccagtccgcgagtttctttcttgaaggtgtgggggctagattcattcacgtgcttcgtaatgaaataatccaaaaaataggaccaaagcgcccactggcaggagcgagggcggggcgccgcgctctataattattttctaagatgatgggggaggtttgttgcacgcgacagcccgctgaggaggcggggaccgagctacaacgcggttcggatttggcgggggtttttttccttaa

SEQ ID NO: 52 - DNA, 6250 bp, Homo Sapiens
agaaagccagatgtcaaaatactgagtaaaatggtgctgtcaataatgaaatcagcactgcaatatggagaatccccatgccaataacctcaaggtaaatttgaaaatacatgtttcagatacaaactttctcatccctcatctgtgacctatattttttcctcccacccactacatcctcttttattaaaagtaacacaaagggaaaacgattttgaaatcaaagtgagacttatacaccccagctgcaacttcaacaagatatcatcatgactaagctcatatgactcataactttcctaaattatgcaattcataacagttcaattgaaatcatttttggtgacccatagaggactctaaaaaccaggcttcattttattaggtattttttgcctttcagaaaaatgttgtcatatgcctaatcgatattgagtactgcaatatagtagtatttgtaggacaataaacataaaaaataaataataaagcatgtttttcaactatgaaactatttgctagtcttgaccaactcaatctaatggtaaggttaagtaacaaattatattgtaagctgtcaaacaaactgaaaaaaaaagtcattcttcaaaagaaaaatacccacaaggcctatgttcatcattgacaactgacagcatcttcctgagactcattttcctcctcctttatttgaaaactagacttgatctctaagattcatttggtgataacacttgctataacgtactctagcactctcctctatgctgttttagaagtgtcctaaatgaatgtctatttccctatgctataaccatttgaagatggatatcgtctgatctttgtatttccaatgccacgtataatacttgtgtgtccttcaaatatttcgtttaaaaaaaaaaaaagaggccgggcctggtggctcaagcctttaatcccagcactttgggaggccgaggtgtgctgatcacctgaggtcaggagttcgagaccagcctgaataacatggagaaaccccatctctactaaaaatacaaaaaattagccggacgtggtggcacatgcctgtaatcccagctacttgggaggctgaggcaggagaattgcttgaacccgggaggcggaggttgtggtgagctgagatgacgccattgcactccagcctgggcaacaagagcaaaacactgcctcaaaaaaaaaaaaaaagaaagaaaaagaaaagaaaagaaaaaagaaaagtctatgcattcttctggcacaggtggtctgcattttgcaaataaaaaacaaacacatgggccaggagcggtggttcatgcctgtaatcccagcacttagggaggcccaggtgggcggatcacgaggtcaagagttctagaccagcctggccaacatggtgaaaccccgtctctactaggaatacaaaaattagctgggcgtggtggcacatgcctgtaatcccagctactcaggaggctaaggcaggtgaactgcttgaaccccgggaggcggaggttgcagtgagctgagatcgcgccactgcactccagcctgggcaacagagcaagactctgtcttggaaaaaaaaaatggtctaaaaaaccttacgatctgcaaatgttatgaattgatctagaaagtaatgtttctctttaaactgtatgcttccttgggactcatgcttatttttacctacgaacaacagattaataacataagtgaaacagttgtgtcagggtggtgcaaatataattttaatatctcaaaatacatatttattctttttactaacatttatccttaaaatgaagacccttaccctatccctccatcctaaccacaatcctacctcaaaatgtccttcaatttgtactgacttaccacttctcagcacttcctaacaagatcccttgcctttcattagtcacttgtaatccatttcaatcggaaagaatcataagacagctgttcaagtgataacactctcaacacctttagtatccataccaatccattacaatttctgtccactaaatataaagaaaaaaaatactacacatggtatcatggtgaaatttgggaaccagtacaaccatgcaagcctacaatttcacacactgggaaaacattatttcacactttattactaattaaagtatcttacacgtcaatttttgaaagataaaaggattttaaaatacactaaaagttcacgcaaacttacttccaccaaagttcagatcccttaatgcatctccatccttaaaatccaatctctctggaaaatctaatgaaataggaaccctctactttctagcctctaaattcatcaaactcgtcactcttgataatttctttgtttaaaagtgcaaggaaagcattcatagtggcagcatcacgagttggcttaccaggtttccgcctccccccatctcccaagcacctccaataagctacaattgaaataaccaagaacgtgcttaggatgttcgcaaaaacacaactcttaagactccaactccagtctccgcctcccaacgagattactgcataagtacctcctacagcagaaattctagttccctccttcgaggaccaggaagaattctggagctttgggcccttcctttctggctctggtaggaacacacaacactagatttgttccctactaaggcaagaaccctgaccacatctccctctccaaacaagatccagccaccctactccttaccgctttcccaacaccctccccgaacacaaagctagggagcaaacccctctcaggcgctcagtcactacatggagcccgtccagtagccctttcccactcagagacaggcccatctcctttattctttccccaaactccgagagccacacccccttctacactgaaaacttagggacgcgccaccatcgccaataccccgcccccaaacacctgatagacccagctcccctgctcttccctcaaacgagcgctccaggcgccggcctaagccaactcccctgggtctttaccgagtctctggtgggggccgaagcccgggtcatccggaggtcgcggcgccagcacgaaaggaaccacgctggtcaggaataggagagactgcctcatgttcccggccccgctaccgactccacctctctgggcagccttcgcctgacggggtttcggaaaactgctcacatcgggggaggacgggatccgcccggcctagcccctcaatcctcttttccctcccgcgccgcctactgggaagattctaccgccaggctcgacgcccccagaagtgcaggtggcgttaccaaaggccggctcagccagcttccggccgccgctgtcccccgcaccacccacagccggaagccggctgccgcgcggcatcccgggaggctccgcttgccccgccccacgccggtgcgccgcgggcctctggtccgctgccgtgttcggccccgcccgtcacgtctagctggggctcgcccggcgccttcctggacgcagacgtatgagtcccaactccacccagtccggcctggcctctgtccccgggtgaccgcggaatgggggggcgggagctagcgagcaggccctcaagcgcgtctggccgcctcctttgtcttgatgcccacgtctggttaggacccctgctgtccattttattaaaggagctgtagaaagcggcctggggcccagcgacctgcccagggcggacgaggaggcgcgactggcccgatgccgcaggctctctgcccagtgtgctcaggtgggagggcggggacatgaatcgagccacagagtgccctgggcacggaccccccgccccccccggccccgggccccgagccccgagccccgagcccggccaccgaagcccgtgccactcgccagctcctgcgagacgagcctttcgagcgcagctcaggcatttggttcagggtcctactgccggagtcgtctgaggcctccatccgtctgtcgtcacgaaaaaggttttggggggactaataagcacttcctgaatgcacatttgctccacgcccctgctgtagggagagggtctgcagacacttcaacaaatagaatcctaggaccttacctgtgagtacaagagctggaatcttcccaccaacttcttaaaattcaatcctatacttggtccatttagcttagactggaaatttcccaaggcagtttgttttgcaatcttttgcatgattttagctctgtatagtttagtgaatgtttatggtactgaataaaacagtctaaaaacgttgggtacatgttgctgttttatttagttcaaccaaagtttataaaagtaggacataatacgttttccacttaagagtgagacagcctttattatgaaacggtaaattgttaggaatactagtcctattcaagtttcaaggcttattcctaataaaatactcaaactgtggttaaaatttatgttaatggtggtttgccgcagtaaaatatcagcgtctttttcaacaatacattgttggctaaaattaaccggacctggtctgtacatctgaagtataaaatatctttattaaacatacccattagtggcatacctagtcaaaaagtaagcagaatttcacatgcaaattgtatacaatctgtaaaaattgtattccataagaatgtgacagttgagtacggtttttggggggcttttttggtgtaccataataatgtcatctggtttcttttctgaacatccagtcaccataatgtccggcttgtaactttagtagatcgtagattgtattattttggtatccccaacagctcttgtacagtgccttgctcatagaaggtacttagctgtttagtaaatgccgtttaaaaaaaaaatcccgatccattttcttttcttttttttgggggggggtggtgggggaaagagtttcgctcttattgcccaggctggagtgcaatggcgtgatcttggcccactacaaccgactgaacacctcctaggtttaagcgattctcctgtctcagcctcccaagtaactgggattacaggcgcccgccaccacgcccagctaatttttgtatttttagtagagatggcatttcaccacgttggccaggctggtctcaaactcctgaccttaggtgatccacccgcctcggcctcccaaagtgccaggattataagcgtgagccaccgcgcctggcctgaataaccagaagtcctagatttccagggacattccaaatttcaagtaatcttttcaattcacaaatcaggacccaaattattccaatttgcagttcatctttcatttatcaattgtgcatacttttaagataaaagagcaccacgtgggggagataaagagccaaaggaatatggtaagaggggcactggatagattaattagtttatctttttttttttttttttttttttttgagacggagtcttgctctgttgccaggctggagtgcagtggcatgatcttggctcactgcagcttctgcctcccaggttcaagggattctcctgcctcagcctcccaagtaggtgggactacagttgtgcgccaccatgcccagctaatttttgtattttcagtagagacagggtttcaccatgttggccagactggtctggatctcctgacctcgtgatctgcccgccttggcctccaaagtgctgggattacaggcatgagccaccgcgcccggctcttttatcttttgagacggtctggctctgcagccaaggatggagtaccgtgacacaatcacagctcactgcagtctcgacctcctgggctcaagcaatcctccagcctcaccctcctcagtagctgggaccacaggcatgcaccaccacacctggctaatctttacattttttttatagaagtggagtctcgctatgttcctcaggctgatctcaaactcctggcctcccagagtgctgggattacaggtatgagccactgcactcagcaccaaaataattttttaaaactatataccccctggccagacgtggtggctcacacctgtaatcccagcactttgggaggccgaggcaggcggatcacgaggtcaggagatcaagaccatcctggctaacacggtgaaaccccgtctctactaaaaatacaaaaaattagccagcgcagtggcacgtgcctgtagtccaagctacttgggaggctgaggcaggagaatcacttgaaccctggaggtgggggt

SEQ ID NO: 53 - DNA, 6152 bp, Homo Sapiens
tcagccagaagggtcctgagcctcaggccatagctcttcaatgagtcctctctccccgctaatgctgcctaattcccacctccccacagcttgggccaagaagttcatgcagtccagcccaaatctcagagaatggttaccaacacccattggtgtcattttccatgttggggaaattgtgaagcacacaactagggagcacacaaaagagtttatgggaccccttccttagagtgggcttctctcctgaggtgactgatacagtttggctgtgtccccacccaaatctcatcttgaattttagctcccataatctccacctgtcgtgggagggacctggtgggaggtaactgaatcatgggggtggattttcctgtgctgttcttgtgatagtaagtctcatgagatctgatggttttacaaaggacaattcctctgcacacactgtcttgcctgccaccatgtaagacgtgcctttactcctccttcaccttccaccatgattgtgaggcctccccagtcacatggaactgtgagtccattaaacctctttttctttataaattacccactctcaggtatttcctcatagcagtatgaaaatggactaatacagtgacccaagcaaatcctggtaccttttggcattggtgtcagatgagtcatatgtcgacaatgggggcagggtgtctacggtcagcctttgccggtagcctttcaccatcaccggcgtgagccaggaaaatgtggcgaaggagagtagcccggcatcatccaccgggttgggtgctaacctgcagacaaacaagacactcagcgttccaggcactggggtcattgccccaactctctctctggattgaacttgtaactacagcaacaaccacagctgcactcagaatctgtgacttgcattcattatgtttattagccctttgagcagtgatgtgctggggccagctggtgagagccaattgttaaattttcaggaattttgcaagttagttgttaaacacagtcaatattcaaaattaaattacctaagttttaataaattgtcttaaagacaaaggtaataatactcaaaacccatcacttcctttttttgttcttcttccttcatttcttcttcccctcctcttccttcttttttcccctcccattcctccttctcttcctttttttcctccttctcctcttcttcctcctcctcctgcccagaattgcagggcattaatacccccaggggcaaaacttcactaaggtagtatagaagtccacctcacatcctctgggtggaaaactggacactttctagaaggacctagtaggatccaggcccctctgctcacagcagtgacgctgaggccacacctcactttgccttttcctccttccctacatcactctccctaaatctttcttcttgctgcttggaatcacttctcaaataagctatttgcctccaggttcttgactgaggccctgcttttgggagaattcaagctaaaatcatgtgaataaggtactacgagctcagcacatagtaaaaattccctaaaaggtgactttcatgatacagtcatgcattacttcatatattcctcacaacaactcagtaagatgggtggcagggtcatattatatgcctatttcatagacaaaaacatcaaggcacagagagtttagagtatttgcccaaggtcttactgctggaaagtggtgagatgggaattcaaacccactgcttgttgactccagtgtcctgtcattcccttcagcacctccccacattgcctctccacaaagcgattataaactggttgaaaaagtggacagttagagatctcctggggctaggaataatagcccacgtcctcaccttccaacctccacctctcaccttggagggcttaaatgtgtgtgtccttggcccagacagagatgctgggagaagataacgcagtgtccgcttattatagagttgccacttggccttctgctgctcagagaacaaaccacagggcctcgttccatgtagaaaaggcagcatttcataatgttatggttagcataatgctaataatatatataataatacaatatgctgcaaggttgagcatgtgagctcagaaatcagactacctgagtttctatcctggatttcaaaaatgaccccgttttctctccccatctgttcccaattccttggaatgtgacctggcagctcattccatcaaaaagtcgagtctgtttcctcacactttgaatataagctggcttgtgatctgctttggccaatagaatacagtgaaaaaagtggtgtgccagttgcaaacctgaatctcaagaagccctgcatgctgtcactcattcccttggaagcctgccacattactgtgtgaccgagcctgggctagcctgctggaggttgagcacacgcggggtccagttgccccattgccccagccaacagccggcccacctccagcagcacagccaccttgctgtacaggagtaagcctggtcaagaccaaatgaaccacccagctgagctcagcccaagttgctttattttatgggtcacccatcaaactgtaagctaaatgagtggcaattgttttaagctgctaagtgttgagacagtctgttacaaagcaaaagctacctggtaaaccttaggcaagtcacttaacctctctgtgcctgtttcctcacctatcagataaagatagtaacagtacctccagggagtttgtgaggagtgaatgagaagatatttgtaaagcacttggacaggtctggatcatggaaagctctccttaaacctgagctactgcctccttttcaccaaaggacaggaggaggcaaggaagtgagtgactgataaatgaatgaacgtgtgcatgggtggacggacaaaaggacgagcagatagagcagcagatgggttgcaggagcagtgcccactctcctgatggacattcctggaggtcctgccctggccctcccttctgtccttcttctgacttaccttgcacagggtcgcactgggatcatggtcttcaggctggggtcatatctttctgcaaaggatctccgccggcctcgctggtccagatctgagataaggtagggtccttcacccaccatcctgatggcagcctggagccctgggcttttggcctggggacactttcactctatggcagagaaatggcaaaggttattgagaggtgaggatgtctgattgggatcaggcagcctctactttacccagatcagttcctttgctttgacccctgagaactgttttcaccaatgagctttccacatttgtaggggagtgtggccagaagacctgctacgtcccttaatgctacgctgaggctttcttattagtaggaccatttaattcctcttttctcatgttgggttggccaagagcagaaaaccctatggtgtggttttggttgggagccggtccaatgaccaaggctgagtcccagcccagggaaagagccccaagaaaatgggttttcttagtattactcagagttaagtttggctgacacacacacacatgcacatgcacacatgcacacacatgcacacacacatccacacagatgcacacatgcacacacatccacaaacatgcacacacaccgccatgcgcatacacccacacacacccacgcacacacatgcacacaccccttcttctttcagattctctcagatccccaggagtttttgcatccacatcccctccatcctgatacccactggtcagagaacttcaacaacaccacccctcaggaccagccacatctggacaggcccacattccccacacttctgtgactgctgccccaaatgaaaaccaacaacccaggtggagaggacactttttgcaatgtctgttcagtccccaagccagccaccccatcctccagccacctaaatccaatccatagagcatgatccctgaaggtttcccatgcctagtcttagtcctttcctgaggcctccctctattcctgccctagggtcccatgacagccacttccccataccctatagataaattctccttttttacctaaggtatgttgagttggtctctgccacttgcaaacaaaggccttattattatatataaacggggtcacattcccatgagttctttctggaagttttcatagctagaagcagtagataaaccaactcccatcaagttgttagtggctgataaaaccatggcatggcagagctggaagtgtcctcagatgcaatcttttacacatttctcattatacagaagaggaaacaaaggcccagagagaggaaggacttactcaagagtatatagagaatgagtagcatctatctcatctggggcactctggatacaggaaactgatgttccctccctcctccaataaccctacaataacccttgcttatattatataacaagaggcactcctctggaataatatacgtactttttacaacagaatttgaaaatcataatgtcttcatctcaaaaagataaatcccccaacgtggaaactgaagactcgtagtcagatggagaagcccacatgttttagagctagtagttgatgaaaagctctttaatcattgttaatgaatttaaagtttttgttgttattgtggttgttgtggagacggagtctcactctgtcgcccaggtgggaatgcagtggtgcgatcttggctaactgcaacctctgcctcccgggttcaagcaattatccagcctcagcctactgagtagccgggactagaggtgcacgccactgcgtctggctaatttttgtatttttagtagagacagggttttgccatattggccaggttgatatcgaactcctgacctcaggtaatccacctgtctcagcctcccaaagtgctgggattacaggcgtgagtcaccaaaaaaaaaaaaaaaattgagacaggatctcactctgtcgccaggctggagtgcagtggcaccatctcagctcatcataacctctgcctcctgggctcaagtgatcctccctcctcagcttcccaagtagcagggactacaggcgtgcaccaccatgtccagctaatttttgtatttctagtagagacgaggtcttgccatgttgcccaggctggtctcaaactcctgggctcaagcaatctgcctgcttcagcctcccaaaagtgctgggattacaggcatgagctactgtgcccagtgcagttaatgaatattaatgacataaatatcatagacccagctgtagattcctaattcaatgagagtattagcagctaccagagactccctaaacctctggccaaactgcatactctactctccaccttctatttgtaccattgaatactgcactccagccatgtggaatatcttactactccctggacaaactgtttattcctcctgctttttagtttttgtatttactactggcacaacctggaaccatctagtatccctttcttcacttgaccaatttctgctcagccttcaaggctcagttcaaacatttccttttctaagaaaactttcctacatacttttttatttccccaaacaaactgtgggcttcttgtttgtcttgtttgcagctatatttccaatacctagcatagtccctggtacatcggaaatgtttaatacgtatttgttgaatgaatgaataatagtaagtatgagaaacaactaagatgcaaatcctttccccagaaagtgaaaaataagcacacaataacacacagtaaaatataaattattttgaaattaagtatgggatgatataaaaataacaaataaagtataaattataacattgtgttagccctagaaaaaatactttttaaaaagggttaaagctaagaagtcagtcaaggaaataaaatgaaacactaaatagtagattaaccaaaaaaaaaaaaaaaaaaaggtaggcaaggagggacagaagaataaaacacaaaaggaataaatagaagacaaatattaatagcaagccaatagacttaaacacaaccatatcaacaattacattaaatataaatggagtaaatatttcaattaaaaaacaaagattgtcagactgaat

SEQ ID NO: 54 - DNA, 6224 bp, Homo Sapiens
aaatagcatttataagactgcatgatggttttaaatgtggagggtcaagggaaaggaggtgtcaaaggtgattcttgggtttctggttaaagcaactcgatggatagtggtgccatttaccaggttaagaaggactagaaagttgttagcttgcctttgttgctattattgtttttgttatttaatgcattttggtttttttgcatttgtttggaaggttagcaagaaggatggaaggcaacatcaacaaatcaactgggggcacagtatgtttgagatactctagaagatccaggtcctgggttgtcttggctcccaggtaagtgacatgcataaatgaggtacttttgaaccctgctcttccctaccatggttgtgtatataaagcctcaaataggttagttcccttaaataatctttaaagtattttctgaatccatgctactctatctttacctcttatgctaacataatgttaatgttgtcatcaaacacagttcatagggatgttggtgtactgggctgaagagtgtctcccaagaattcatgcccatccagaacctgtgaatatgacgtttagaaatcaggcatttgcaaatgtaacctggttaatttgaggtcatattgaataaggaacaggtcctaaatccaatatgaatgatgtccgtataagaaaagggaaatttggacacagggacagagacagagaggaagatgccatgtgaatacagaggcagagattggagttatgctgccacaaaccagggaatgcctggggctaccagaagctggaaaaggcaagcaaggatcctcccttagaggttttggagggtgcatggccctgacaacatcttgattttggacctctagcctccagaaccatgagagaataaatttctgtggttttaagccacccagtttttggtaacttgttataactgccctaggaaactaatatagttgggaaatttaagggaattaacatgtttgagcctgaatcattatatagggcacatagcataggttcagtaaatatccatttccctcttactcataacagtcaccaccattttcctggtggtttaaattatgattaatccgtacatctactcatctagataagtcttactattccgaggactgttctataagtgaggaaactgaggcttaggaaagttaaataattttcccagaatcacaaagctaaacatagaagagtcagagttcaaacacctgcctcccatacctacagcatttcagcaggtcctgacagagtggagaggcactgccagactagattttcaatgcttagatatcaattgattcaatgcttagatatcaattttcaattaaactcacatttattaataaaataacaagctgcagagacctagtacaatctctacccactcacagaagaacactaggtttttagtctaaggccagcgttaccaaggaacttgccattggcttatattgcttccatttagcagtgcatctgccttgcacatatgtattccaagtcaaggtattatcagattggacatttatggctttaatttacttaaatgcattttccttatgtattcccccacttcattttgatgatactgactcattctcgccacctaacaagactataaaaataaatagtgtgagtgcagaggaaactgtctccaaacttcatatgctaagatgcccatcctttaaattataaagcaaaaaataaacccatgctttaaatttacctttctccctaactaacctggttatctttctccccaagattgagttgttgtgctgttgaatataacagatacacaaatctaaggtggcacagctgttattataaggtgtcaatttcatagaattctagtgtaggagggacttctaaaaagcatcttgtccatctatatcaggtaagagaaagagtgtctacagcctccaagccccagaagagaagcggttgcactagaagatttttgtgagttacctaagaccctgtggctatgtcttggtagaactccgtagaatgccaggtttcctgattttcctaaaagtgtgttcagtctttcaagctgtcatcaactattaacaatgacactttcctctggctttgtgccaacttttctttttgtttattattctggccataaaaagaccaccataaatagcctcagcgtttcaggttcccttaattgatatctaatgttgacaaattaactcagcccgagttgaaagctccatatacacacacatggtttcaagaagggcgatcgcgcttatcctccaaactgagcagtgatgatccctggacttctcaagtttaccctctaggaggctgacatggcacacaattttgacaagagtttggaaccaagatcctcttccacgccctgctcacaagggtgcccacaagcagaagttctctctctgtctctccattacaacccaccaggcgcgcgcgcacacacacacgcgcgcacacacacacacacacaaataacaaaggaaaacacagcctcataaaggctcagctattgcatcctccagtccacacctgccaaaagacaaaaaccatgcgggaatcctgctctggcaatatgtccaacacttctcgggaaaagcagcgccgtggcacccccagggcgtgcgctgctgtatacacacaaagaactggtgctgggcttgcgagcagttcggggtaccagcacgctctcagggctggaatccggggttctcctccacgccctcccgcccagcaaaatggaaccatcctttatttggttggtagagagcccaggctggatagtagcgcatgggttgagggtgggcggtcccctatccctaccctccaggcagcaggtccctagcctttgcatctcctaggagatgcaggatcgcgctgtcacagtggtcctcttcgcatcctctcccggcaaagagagatgctccggttaccagcggcgcgcatccccgcaggcgcctctcctctcgccgatacccacccaggcagtcccgacaggcgcgcctgcctacctggtggccggctgtcagcgaagcggcggtgcctcagccccttctcagctgctacagcgctcccagcgccatgttcccggtctccccgggcgcacgctggggaactactactggctgggtaggggcaaggggggcgggggccagcgggagggggtgagaggcagagccacagctttctactctccacccaaacctcccccagctactgagcatgcccagctgcccggcttcgcccctcggaggactgtccatgagcgtacgcagctgctccgggttttcgtggcagccggcgggaggcaggctgtagcggcggccgggggtggaggtgagggggagggtcggggggcgtgtctacactcagggtgcaggagccaggagccgggagctggagcaggcgaccaatccaatcacgtttactcccagtcgtccccggcgggggcagctcctgcacgccctctcccccaacactcgggatttgcagaaatgttgttcaggaccattgcaggattgagttttgcttaagaggctagcagaggtggggaggaggaggggctgagaagcagaacagtgggctggcctctttgccaccacctggaccggtgattctcaaactttcatgtgcctgtgaattaaaatgcagattcagattcaattggctgggtcctgagattctgcaagcctaacaacctcgcaggtgatgctgctgctgctggccctcccaccactccgagtagcaaacatctagagaaccccttatctgtgacctctcagtggccatccttcaatccgccagcctagcaatggtctctggtgtccacagagactcctccagcctggggttgctgagccttacctggaaggagtgtttgtggggctaggctgtgaccacccagcttctccttggctgctgtctgatttcgaatttaaggcccaggggaagaaggattcctggaccttttcatgctcactttgctagctggctagtaagccagttgctggatgagctgccccggtcaagtctgaaccagtctgccttggctgtccccttgcctttcctgagctgggacaaaaactcagactgggcatcaaagtgtttattgtacatctaatagcaagcttgggcttgcctagttaagaaagccgacagattatgacaaacatagagcgcatttttgtaccaagagatgtcaggcctttgtgttcagtgatgtttgggctgaagtttgcaacgatatttgtggttcaacttaaacttcccagttgcctactgccctcccagactcttgaagtctccagcattatcaagactctagtgaatgaaagacattcacgaagtagtcctgagttttcacccttggaaatgaagaagccacgctcttgtctgtcttcagctgccacaagagtacccttatgagctagtagtggatatggaatctgatcccataactagatagcaggttacaaaataaggatttgtatctctccgttccttattatactcaatgaccttagacagttttctagctaatagtatagtagttatcatttccccttgcttgttttccattcacttagtacctttaatattgtactggccatatcaaaacagaaaccacaggataaatggatgattacttttctccctcagtagtcccatgtccttgtgtatcatactcatctcttccttctcaaagctgcacacagccctaacaacctacccactgccaccatcgtcacccccacaactatatgcataaatattttctacttttgactttcttatatgtgtgctcacatagatgcaaaagccagaacatatttttactgagatatcgtttatttgtcattggttagtatcagttaaaatttttatttgaaatattgaactttaatcacttaaaatagccttcctgttatacataaagtttgtgtttgtacatttgtttctgctagttaaatatgatgatgattgttagctgcctcaaatttattttggaagcgtgcaaggtaaaaattatagatgaataataatgctatttctgtaaatactgcattgcatgaattcctaagggttttctttatatgtaatgccatttcttgagggtttagcctgcagtatttgactaaggaccaacatctgtgggtgggagggatacaggaagcaggagcaggcagaggtagaagctaagctgtgatgcaagccaattgcagcctttgtcagccccttatggagctcactagctagggtgatccttcagaatgaccatgagttggtctgagatagtcagtcctttacatccacatcaatcattgagcatgggctgttcctaggaggggcacgaacttaagacaggcagctctggcaattcttacaggtaacaacagctaaaggcctctgtcagctgtagtccctgtggctgcagtaacaaatccttcacttaaggggaatttaggcaaaacattcctttgtccaccacattgatgtatttattgaatacagcacttttgaacacacaaagtagaactctactgatttgtcagacagattttaaaactttatttttgaataagtaatagactttctctctggctcaaagatttaaaagttggaaaataacctgtaatcagccattgagagtatactatctatttaggtatctggctgtatgcattttttatatgactagtttaattatgatttattgagcaggcatgtatttattgtctaccatttaagacataattttctctgtcaaaatctgtatttgtaatttgtaatggggtaggaataagtgtttgatagtaaatagaagtgtgtttttcaataaaacagagctactgactagtcaagatttcatgagaaactaatgtcaaccaaccttgttgacaccaaaaactgtgacaagatgaacctgaggggtggagaacttggtagattggctgacagggatgtgtaagacagcatgctggaacccaggttcagactacccagctcattctctttaccttctccaggctatgcatctacaaatggctggaattcttgaaagatgaaccgcaaccataagggaaccagcatagattctagaaatgaagcaggacatttgctcagatagtggaggtagggaaagaataggaggtggaaaagaatgttccaaggaacataaacaaaagcatataaagaa

SEQ ID NO: 55 - DNA, 6103 bp, Homo Sapiens
ggtacaacctgttccccaatacaaggctatcaaagcaacgttttgattttttttttctctctctctagtgatgatgttcactgtgagaacaaccaatgggtagctgagtacggtggcttgggatctggggcaaaatgagctcaacagggatacatgaataagctgttaaagccaagtggaaatgagaagtagagggaatttggagaggcagatgaagaaggcattagggagtactgagagaacatggagtgaatgctgtcagactgtggcttcaggaaagggaacatttgcctgcatttgcccagctgcagcattatagcatccctttctgtacactggatttactctaccaggcagaaaaaatgggagagaccacaggaatactggcagtggtggggatgggcaatgaactaggagtgcttgggaaaagtaattttctgtctcaaatagctgacagtagcacctgctataattccagagaggtttgcaggaaagcttttatttgctacacaagaaaggctgggcaagtagattcctagctgggaagtagattcctagcacctacagaaggtagatactgggtcagtttttacttaagatggcagtgctttacattggaaagctaaaggaatttggattcaaaggattctggtttttttttttttgcttacaatttttggaaccataattcagcactactagattaaggcatgttccatcaaactaaaaatcaaaagctttcctatggggaaagtctcaatgttatagctgaaagaggtgacagccgcattactgccatcaaaaataatttattaaccttgtctgtgcaaagtactctggtaggcaccaaaccccaggggcttcctgtttcaatgcatcctctgctctctgcagtctcttcagtgtaacgtttggctctccccctgtgaataaaatggataccttgaaaacttcatctttgtggagactatcacaggacaagagaatgcgggctccatcatccacgccaatcagacagtgctgggggaatgtattagaaagttgcctttctcaacctcatattcttaacgcttgtaaataaaaacccctcctcttcggttttcactttagaccaggaaatctggggagagttggcaagcaaggttttgcactgtcggcatatgtcatgctaacactggctctttgccccttgcctcggcaggtaccacacagcgctggagaaataggtacacaggtgcctccccagccaagggaagaaagcagtaacggaatttgggagtccaaccccaaatcctttcatatttacctctcacaaacacttgccttgtaacgtgtgtacctgtgcgtacatttacaggtaaagacaatattttaaggcaagttcacataaatggcttggagatatctgacaggtctgattatacaaaggtcttctgctccacctgcatctctcaggaactcaggcaaaggtggccttccatccagccgcaccgccatccggcaggggagggcacaggcaccctcccacccgcatccgcccccgccccctcgcccagcagcgtcagtctctgaccccactggatccgtacaggagacgactcacaatcggtcggaagctgcttttgcccccccaccccaccgcaaacgggggtttgcttggatcatttatctatcttgtgtgcattaagaaaccagcattagctgctagtgggaggcgctactctgcccgaatcccagcccgccgcggcgattctgcacacacacacgcaccagcctggcagccagagcccgtctggagacgccctcagcccggggtctgcgttccccgggacccccgacgcagtctcccgcttccgtcccccacgctcaaccgggcagggcgccggggcgtgatttccgatcctctgcctgcttgttgggtccctcggaggcgggtcagaccgcacccgccgcgggcgcccggtgcgcccccagcccctggctcgcggcggcgacagcggcgctgttcgctggagtttgactctccggcggcggcggcagcggcgcgcagcagcgaacggctggagcaaggcgagccgggccgctagccctccgcgctgcgctgggattggtctctccagaagagtgctggccgagggttggctgcgggccggctgaagaacaggtgcacctcaccgcccgggctcgcggagcagccgccgaagatcgcggcggccaggcaggccctctgtgtcggaatgcgggtggcgggcacccggcaccccgcgaccggccgccggggccactgaaggcggcgcgaggcccaggcgcggcgcgagcgggcgccccagggagcgggctgggcgcggtgccccgaggatgtcggcgctcctggagcgcacgcaggcggcgggcagcagcagcagcagcgggcgcggggacccggcgcgcaggaggcggcttggagggctgcagacgcgccccgccgctctctgaccgaccggaggcgccgggggcccgtctcgcccctcttccgagctccttaccgccccctccccggccccgtcccctcccccgctcctctcctccccgcccgccgcccgcctctcggggggaggggcgtgggggcagggagcggatttgcatgcggccgccgcggccgctgcctgcgcccgagcccgccgccgccgccggagcccgcgcccgcgcccgcgcccggcccgcgcggccccatgcctctgccgcggccctcgggggggcgaaggtgaagaccggctcctaggatgagtgaaggggcggccgctgcctcgccacctggtgccgcttcggcagccgccgcctcggccgaggagggcaccgcggcggctgcggcggcggcagcggcgggcgggggcccggacggcggcggcgaaggggcggccgagcccccccgggagttacgctgtagcgactgcatcgtgtggaaccggcagcagacgtggctgtgcgtggtacctctgttcatcggcttcatcggcctggggctcagcctcatgcttctcaaatggatcgtggtgggctccgtcaaggagtacgtgcccaccgacctagtggactccaaggggatgggccaggaccccttcttcctctccaagcccagctctttccccaaggccatggagaccaccaccactaccacttccaccacgtcccccgccaccccctccgccgggggtgccgcctcctccaggacgcccaaccggattagcactcgcctgaccaccatcacgcgggcgcccactcgcttccccgggcaccgggtgcccatccgggccagcccgcgctccaccacagcacggaacactgcggcccctgcgacggtcccgtccaccacggccccgttcttcagtagcagcacgctgggctcccgacccccggtgccaggaactccaagtacccaggcaatgccctcctggcctactgcggcatacgctacctcctcctaccttcacgattctactccctcctggaccctgtctccctttcaggatgctgcctcctcttcttcctcttcttcctcctccgctaccaccaccacaccagaaactagcaccagccccaaatttcgtaagtaaacactgtgtctcaactatgatttactactgagtttcccttctgccctcctgctgtctttttccctcgccgcctgttttctagcaagccccctcccccatcccaggtttggggcagagtgagagctgattaaaactggccaccagcggggaagaaggtgccagcctgctctggttctgggggggtgggggcgtgtaggaacgggagggagattgtcaggctccactggccccactttagcgggtcccaagtgagaacagatctcccaactcccttcaaagggttaacgcgagtgcgatccctcctcactgcagacctgctggcgagctgccggatcccgctccagtagagggccagggagggagagagggccttcccgaaggcactgagccccttctccgcccgccggtaggaaggaaagaaagcaaagcacatgcaaattgaccgacgataaaccacaaaaggaagttatgtccttgtgtggggtgacgagttgatggagataatggtagaatgttgctgaggacgcttccagcagccctgacctgggcaggaaccagaaagggttaattagaagccactgggagacttggggaaaggaggcgatccaaggcaaagggctaaactgacctcctagcctgcctgtggccattccaaggtgtagacatagattctgtgaccgccgagagtgagttaactaggaggaaatatgaagggagccctgcagagctgccacctctagggtcctgacgaaggaggagtttttttcagccctgccaagcctttgcttttgttccgttcccaaaggtggggtgtgaaccttatctcctctccctctgtgcctgaaaaatatagacgagttgagagttttctgcactcaagggtgagaacatccaaccgtttggaaacatgtcaccgttagaatgtagcatcttcaacctgggctcagtatgagccagtatacccaaagcatgatagctttctgtttatttgtatagaaagtgcgtattttctcaacatttttataaatgttgtaggtgactaattgacctcccaccccaacccccaccttgttcttattcaaaggaaatctcaggtgtcttttaagctgatctgatcaggatatgggaacagtttgtgcaacctgtgaaggttatttaggacaaaccccaggctgctagttcaagttctgtgcaaggctattttgcaaaaaactgtctggttatgctgtctttatattgtatttgtgttttgagccatagcatctgagataaaggaagagtgttcatcattaactcttcagtgatgatgggaatactgggtttgctttcagtcatctgctaatttttcatttccctgccctatgatcttaccctgggtgttacttaacccttgaaacttttttctttttaaagaatgtagtgtatttgtaagtaaggtccaggagagggaaagggggaaaaaaaagcaaacctactttgctttggaaaaaaccgtctagaagataaattgggagacaggaaggagggaaggaaggaatctgccacaaaccagaatggcagtagagccagtaacttgctgcttctctctcctttggctgaagcagtcatttttgagagcacattttcccaggaggtgtttagagcctccactcaacaaatctagcttgtgttttgtagaaggataaaggattcatgagtgtatgtgtgaacatattcaatggattgaaaatgagtctaccctgaagaccccagatttttgatctgctcttttgatgcagttgatagaataatggagtgtggtatacctccaacccttgtatgcgttgggagaggagggggactacacacggtaggggtatttcatgttctttctcaattgatttccttgtgtaccattccggaggtctttaaagaaaagcccaaggtaattatttctacccctctatgctctcttcctacattccgtggacgggaatggcagcctgtttaataagtaatgattattgacagggccctcagccccaaggaaaagaggggaaaaatctgtaaatggtgtcaatgttcacatagacatataagcagtatttgttgtatttgtatcttagtttcagctctttctcttttttaaacctttacaagaagttgaattaaggtatgtaatacaagtatgcaaaatccagctgaaattgacctggtttgcatctataaacaagggaaattttaaggaaaagtggattatgtagttttcataaaacgtgtttaaataggcaagttgtatggtgacttgaagaaagaggatagtttagttatttttttcatccaagattgcaggatgattaacaaaaggaaattaagatttcatttgagagattatcagcagtgctactgtaggatgaaaaaagcctgaatcactggtgttcatattttttttacttgtcttgattatgcccgtaaagttcccaggagagaaattttcttttccccagctcctacctccatactttagtggg

SEQ ID NO: 56 - DNA, 6103 bp, Homo Sapiens; identical to SEQ ID NO: 55

SEQ ID NO: 57 - DNA, 6250 bp, Homo Sapiens
tatgtatatgcttatacatatttatatgtataagcttatacatatttacaggaaaaagagcatataactgagcatttgggagtgggtatttaaaaagtcactgcctattagaggtctcttttatatctattaaaaatgaatagaattaggaaagaactcaggatattatctgactcaggactttatttaggtcataaatgtgtattacctgatatctgtgggacacctgttaagtttaaattccagccaaaaatttcagaactgggcctcttaccattgcttaactgaattctagccaagaaatcacagatattcattttttactggtaccttatatcagtgcttattactattttcattggcgagttcctcaaagggaagggactgggaaataagaatgcttacaggataaactcaatttttaattaaaatgggcaaaagtgatctctatacaatattaactcaaactttaatcaataattatcaacagagtaaaatttcattgtcttaaatatttatctatacatgatttcagtaagagttgcccttttagtcttattactgtcaggtttattcctctgtgtctgatttagtacaaaacatgccttcccatcattctcttaacatctgaccaaatcttgacttgcattatgtggcataataggatggcgagtccatggtggggaggagatacatgaacttcattggttattttgagagattgattaggaactgtacactcagctttagggatattactaataaaccttaatagcgtttttccattccaagaagccactgttaaccaatggcttccgctggaacgctttaatgtcctacaaagacatataccggtagactctatctgtctcctacggacatggtggaacctgtttgcctggagaaaagaaatgtcattggcaagaaaagctctgccccaaatgcatgtgtaacaaagatactgcccaatccatcaccagtgttgcaaagtgcacagacttccttttgctctttcaggaaaggttcatgccttgaaggagagtcaggggtgacattttagtttcaaaatctgtcagtggccaaaggaaccaaagacaggttggtctttgcacctgggtggttttagcacagagattgctccttcataaggaaaccaaatatcttgttcagtcactgaccctggccatactggaaatttccagtaacggtctttctgaggaaattcttcaaaaaactttgtacctcttatacttttatgtaatagcattcagacattcctatttcgttatcgaagggtttgctcttacgacaaaacaaaaactcaccttgagacaaccataaccaagttcctgggatgcagttgcatttccaacatgatccactgggtcttcacattctataaattcatcaggtctgtaattcaccagtaagatcatgatcatcatcatacggtctttgcaaatcgctgtttgcatgcacgtaatcaaaacgggcaaaagacatttcttcatcaagttttctggggttcggtttcaccctgctgacccctttccaagccaattaaactgaagcacagcaggtcaaacggacagccaccaaaatgaaccttttgttggagaagggaggtgtttctggtcctgtttctataaggattctacttctgccatggtttcatctcttcagtaggcaaacaacaagattctgggggcaaaatttaagccaaagtattctcagtcctctttgcatttcccaaatgccttttcttgtttgatcaaaaagagatgttaaaaaatggcgtgattctgcaacggtaagaatattgattgcttttttaaaagatgccttgtaggcagagacaagtcatttactccatttatgccttactcagtactggcaccgaatcgaccgactaatactctccttgggctaaagggcgcagggcaaagaaagcacaaccttacgcccttcttccagaggctatatgatgttactcctacccagttttcctctttggggatctcaaagcctctgtcactgacacacaagagttttctctgcacgggctgtgagaaacctggttcatgatatttgcctccggaacgacctcagagaggcagggtctgaaaaaatgcagcgtccccccaaccctgccttcccttaacacccatatattcctggcacaccctccacgtccacccgcctcgaccactggtagcttacaggtaagagcagaggatgaccggagagtgggggtcgccatattcccagctcgcagcacccccggggccctccggctgggcggcgccagcggatgtgagctcaggctcagcggtcgcattttgcgagtggctccgagacacacaatgcagcagaagtaaattccccagcagcaaagccgcctggccgcacagaagtaagtaactaaccgggcaaccacctagcaccatcttcccgggcacaggagcggagacccggcctcaaccacaaccccaggccagcagcacagacccaagaactgcgtggtcaggcctttccgcgtagccccgcccgcgtagccccgccaaacagccaatggacgcgcagctcgacgctccgcgcacctccgccaaccaactagaaaaggtcgagcagacgggcggggctactccgccctctgcttctgcttctcgattcctcttctgggtctcatgctcctccttcttttgcgccgaatgcgttctccaatcggatccgtcgacccccctaggtgggcgtgcccggcagccgacggggcggggcggatatgactggcgggccgactagtgctggttgccaccgccggtttagaaatcctattctcgcgccggggactggatttttccctacgtcagcgcagctaggcgatgtcgggagcgagctcggaccgagggctcagttgcgtcagtgccgcgcgcgtgctcgtcgggcgcgcgtgctcgtcgggcgcgcgcgcttcccggccagacttggggccccggcagggttggaaaatgatggaagaggcggaggtggaggcgaccgagtgctgagaggaacctgcggaatcggccgagatggggtctggcgcgcgctttccctcggggacccttcgtgtccggtggttgctgttgcttggcctggtgggcccagtcctcggtgcggcgcggccaggtgggtgtccgcgccccgggtcggttgggacggctgcttcctagggacggggcgctcggagtgaacctgtggtgcctgggagtggaggggcccggcctggggatcggacccggggtcggggggcgcggccgctccaggtgtgtgcggaccggggtcgcacccgaggcgcggggtttggcgccccaagcccttcttggcccgggtcctctgcccggcaccgcttcctccgtgtcctgttcgatggagccgttcccagcgtccccccatccctcgccgcctcgcgcgaccccgggtcccccagacgccccgaaacccgctctggggcgggcgctgacctcggcgggccggagccctgcaggctgggcgcgcccgcgggcgttcagtcctccaaacgcctgcagggagggagctggctctcgctcgtggagttaatgtcgcttggaaagagactgagagatgaaacttttgctgcaggttataatttgaaattttgacgttcatggtatccttgggtcaacacagctaaatttaatggtggaataaaggtgggtgggaggacgctcatttctcttgggtcatttttgtagtaagaatattttgtaaacgatgtgctacctttctatagccaaaccattcttaaaaaatctgtgtttttattgggttcgtactgtgttaaatccggacagataatccctgctcttttgaactcacaggattattgtaggaattaaatcatttgtgtgaaatcgtttttgaattgtgaaactgcccttgactatgtaagatacttgtattggagatgcccaaacatagtggaagcagattgtcagcacgctggcgtctttctggaaacaagttgtttattttggattttgtatgatataattgtttgcatggctgtattttctctatcagcgacagaggatgatggagaatgggagtttttactaaatcattgattgaaagttattcaaaggtgatgatagaagatttcaacgcaggactgttgaccttcaggaaactaattacttgtttttcttatctttggctgctttatttgaaattaagtaaatttgccccagtgtggaaatgttgaaactctgacaatgttttgaatgggaagttgccaaatttcttctggttaaaactacttttccggtggtattctagatggttaacactcaccgatgtttaaggtgaagacgattatacatccggagttttattaatctgtgatttttttttgtgtttgtaaatgtaaataagactgtatttttaaatgttaatataaattgtcagtcattaccgacctgcattaggtgagtggaatatcctgatggtctttaactgtggttttggccagctcctcacttcggcatgtgtatgccccttcaaagtttagccaccgtttatggaactcctataaacaccacacagttgattgtagaggggcagaaggtgaccaaatatgctaagcgcatctgagagatgttggggaagatttttagagaaaataatatttgaactgggctacatcggtgatttttcaagtagaatagtagatacattctaagcagaggaaagtttttgcaagagtatggtggggcggggggcgtatgaaagaacatgactttttaggaaatgataaaaatgtcaatatgtcttcatgcagactataaaagggagggatggaagatcaaactaaggtaggttgttaccagttgggaagagtcttctatgctgaactaaggggtttggacttcaccccgtaggaagttctttgggcagtggaggttttaagtaggggtgcgacctaatctcattttctgttaagaaaacgggcaacacggtggaggatagaatctaggagggagagactagaggctgggacaccggttaagaggcttttgtaatagtgtgcagtgagtcaactcttgtttctctcggggaacgttcatacaaaatcagctgaccacatttttgcagtataaggtgtttaaaacgtgcactgaaacattttccaggatcgaaagaggaatttgaggtaccaggcacacgtcagttacattaggagttaattaggttttataggatttttactaccttttataacattgtctcaatgaggaaatgcagtataatttccaaacagctaactttcagtaaactttttttttttttttaaactgacaaaggtaactgtgtcattgtaaaaaataagcggaatcaggtatgaaacctcttctgattttctaaggtagtaattatgaggaacagatttagaatttttttttaaacaaagactggcattctaaagaaaatgactttgaaagcttactcatggtgagtcactgtaaaatcatttgtgtagtaagaacttaggtccatactaatctcgttttcagatgccagcaaaatatttgaatttgatatgtttgtgtttgtgccgataggagaatgtagccttttacatttaagaatgatttggttttcaaccttttaagtaaaaaagaaagcatatataattaaaatatgtacaaacctagttcctggtttccaagacagttttcaaaaagcacttgaagctttaacttaccaaatttatatttgctctttgtaaaaaatctgggtttataatagaatttattatggaatcccccaaaagatgcaagctctaagtaactggaagctttttcttgggaatatccgcaagctcaaacatatgacatagcctcatatttctttttcctttttggtatgtaacatatactggaggcttggagtcatgccatccttttgagtcagcgctatggaactgcctcataaatgaatgcagtccttttgtatctcagtagctaatccctcacagtctttttttttttgagatggagtcttgctgtgtcgcccaggctggagtgcagtggcacgatctcggcccactgcaaccttcacctcccgagttcaagcaattctcctgcctcagccttatgcctggctagttttttgtatttttagtagagatggagtttcacggtattagccaggatggtctcgacctcctgacctcgtgatccgcccacct

SEQ ID NO: 58 - DNA, 6134 bp, Homo Sapiens
ttcctgtaggaatcctgcttttacgttttatcttaaagccaccatagtatctgtaatctcttttgtagtcatgtatgcttaattttggaagactgtcaactacctcttcaggttcattcaaatgaaaatgtatcacaaaatcgtaggctcttcccctatctcactgaaaaattactctaaaaatgaccagtaagctgttttgttgaagcaaaacatccagaccctaaacaaaagtagcagaattacaacatttccatagaaatggattttgagcttcttttttttaattggggaaaatcttattttttaaaaaagaatcccagaatacatctttgctttcagtccttcaattctaacataatgccatgttagagaatatgtggtagtgtatactaagcccttatgctgtctcacatccttgggacaaaatatctgttttgaaaggacttctctgaattttgctatttcctgcttactgagcagtggccccctcctgggaaaacagagttatttcagccagtgttcagactccatcttgcatacgtctctgtggaatattaatagtgctactgagatatattcatcatcttttctctgcttttgctgtctttatagcccagtgaaatttatatttggtgtttgtaggaaggctatcagaagctacttggacatcaaacttttaaactataaataatgatggcaagactgctaggatatctttccacagttaaacccattcaacagagtttcgttcttatgacagtgcaaattaaactagaataaaattagtgtgattttaggacagttttaaagtgaacatatttccctccctcccttcccatctacatatcaaggagacactccagactgcacttttatttaaattgcggccatcagaaaataccgtgagaaggtagtgtgtaggtaatggttcagttagcattgaccccagaaaatggaaaaccaagagcaagtcacttttaaagtgaagcaatagattttgaatatggattgttccaactcaccacttcccgaccacaacacaagagtatttcactgtaaattaagagtctaagttaaccacagctgtggtataactctgagaatgttttctctacatgtagacaattctggatccttccgtggtgcccgttaccctggtctttaacttttgtcctttgcaggggaggggtcaatgccttcttatttccttgctctttagaattctccaccagagggaggacaagggaaggagtaggtttcacgcgcagttctgagtaaagtttgaatctgagaaaccccacattcacgaattaaggatctccagttctgtgtctttattctacccctccctgcctgcttttccactcggcagaactgagtgactttcagcggctgcagtaattttaattattctgagtcgtgctccgaactatgttttttatcagttcctctgaaaattaagttgtagtaagagacgtagtttaagggcacccccttagaagaggccaggttattttttaaggaaaagctgaagatttctaacaggcacttactaaacacacacacacacacacacacacacacacacacacgcacacggcgcagacccagcaggagagcgcaacctagcatctttaaggttcgcttagcccttcctgtgcacctggaaggaagccttatcttaaactcccttccacctagagtttattttcgcctgcgtgcgacagggcttttgtacttaagtgagttaaggaatgaaccccgaactcttctgggaaagccaccaacgttccccccgcacccctcccagggttcctgaccacggagactctgcttggggcacaggtgtgggagtcgcaaacttttctctgcgccgtccttttccgcgtggaatgggacggagcagccctcccaggcgctgcctggctgcggaggggagcgggcagcgagagcctcgggtctccgcctgggttcccgggtctccggggcgctggcctcggtctccgcgcagcgtccagcgacccctgtcgggggttcccggcagccgcgccgccaccccccgcccggccagcgcgggaggaaaaggggctgcgcccgggagcgccgagcccaggctcctcccggtggcgtgtccgcgcctcggggtgggggtgtggtggggaagagggagggggcgaggccaggggagggtgcgaaggaggcgcctgcctccaacctgcgggcgggaggtgggtggctgcggggcaattgaaaaagagccggcgaggagttccccgaaacttgttggaactccgggctcgcgcggaggccaggagctgagcggcggcggctgccggacgatgggagcgtgagcaggacggtgataacctctccccgatcgggttgcgagggcgccgggcagaggccaggacgcgagccgccagcggtgggacccatcgacgacttcccggggcgacaggagcagccccgagagccagggcgagcgcccgttccaggtggccggaccgcccgccgcgtccgcgccgcgctccctgcaggcaacgggagacgcccccgcgcagcgcgagcgcctcagcgcggccgctcgctctccccctcgagggacaaacttttcccaaacccgatccgagcccttggaccaaactcgcctgcgccgagagccgtccgcgtagagcgctccgtctccggcgagatgtccgagcgcaaagaaggcagaggcaaagggaagggcaagaagaaggagcgaggctccggcaagaagccggagtccgcggcgggcagccagagcccaggtgggtgcgcagcgcggcccgggccccacgatcctcctcctgctcctcctactcctcctcctcctcggatgccgtggcctctccctccccctctccctcgcccgtcctcttcgccctgcgctctgagcgcccgttgagtcgcgcggtgcttcccctcctgggggccgccgctcacctgggcgccgagtcctaccgggcgcctacgcccagagctcagggcaagggacagcagtcccggccgcaccctcccagagtcccgggagcgcttcgctccctggcacggcccctccccagcgccttagcggctgagcccagcccgggagtgggacctgggctataggagtcgaggctgcgtgcgcgcgtgccccgcgccataagcgctttgcacgggggccgtgtgccctctagcgggaaacgctggaatgggccgcctggagggagagccggtcccctcggtgtgcctggcagcgcagaagtgggtggtcgagcaagaggccgcgtgggaagttagcttcggcgttttggggcacagggcaagcgatgtagagtgcgcgccggttcatcttgattcagtcctgtgctacggagactcaagagcagcggcagggattcctaaaggtcagcgaagcagatgaaatctagtccagtgtcaggaatcagctctgccccaaacaagttctacaaacttttggcttaacagttctatttttcaagacctctgtgataaatatggataatttactttcccaagagatgtaagaaaacaaccgtttatctgaatttttgaacccaattgtttgctggttatctatataataaaatggcaattgaagctttctagaaacaaatcttgtatttcatcatcagaacacgagcatgaacaaaagctttaccttagatgtccctaggaagcgctgatgctttggacattaccttggacaaaagaggcatgtcgaataaatacttgtttatgagtgattggtaggtagctgataaaagaggggaggaaggagatgggggagaatttattttttgcctctgcaattcccaattattaattgatccagatgccttaagtcgcttcgagcgtacccccaacacacatttcatgaagcacttctgcagaattaattcactagtacttgataatactgtggctacagtaatactgtagaagtatttgtcccttgctggaagaaaacaaaccacatttgcttggtcttcttactggtatcactgatagcatttcagaacctgggttattggcagagaccttcagcagagttttgagcaaaacagaaattgaacagagagtaattgtttcaccactggccattcttgtgcttgcttctttaataagatcctgctgatcatattcacttcaattactgatcattgcccctcatgagggtgtattgaattttcccttatttttaccctatattttggggagagaccatagcactttattcaacaagataggaaattggggagctggattagttacctccctgcgtgactttgtctactgtcctttctaaggtcatcatagtacattacggagatttcagacctagctcaaatcgttgtaaagagttattttgggggctcttatcactgtttgtggttgtgttctcctgtctccctgctcattggcttcagaagaagtttctgtggtcctctgtagatggtctaatgaattaagaaggggccagcggtctgaagtagcatcctgttcaggtaataggtgtgcattttgtcaagggctcccagcagcagtaccgtaacacagcaacttgacaagttcagtgggggaggggcaggcatttctgtgccctccagatctcatctactaggtaggcagctgtcttgtgattagctacgctctcttgacacagagcaccagagcttccttggtggctctcatctgctttccagtggtacagcagtgattccctgtaaaccagctaagtcagtatctttaagtgacatttgcttaactgtcttccctgaaaaattggggtgaatttggctgtaggttagtttttagtatatttgtctctgttttccaccagattataatcttttttggggagggactttttacccccttcgaagcatcttgtgctttttaaaccagataagaatatgtattctttatttgattcagaaagaatggtcaacaacttgaaaccagctttatatagaagcacatggcattaaatacaatgcttcagaatcagtgtttctttccttctttgtcattttccttataatggtaagtgccagtgtagttttccttgtcttaggagaattcatacctgatgactataatggtttgtgagaaaaacccacactctaggtttcaggcattcccaaaggaacgacctatagatgccataactctagtattcacacttgccgtgccagcccaaattaggacttaggaggacaagtttctcttgtattgctcccatcttagtgcctgtcagttccaagtttcactcctttcttaaaacagccactgcaactgtctgtccttgatgatatgtatgcaatagccaagcctctcttcagctgttttaacattgcctcatgacagtcaggggagagataatggggtgggatctcagccactcagccccgctgtgtgctatattgtacgcataggcataaacacatctgttggagggaaattttcagggggaaaaggcttctttaactttcatatggcatgagtgactgatatgcgatacatacatggctatttcagagcatctgcacttttatacaattaactaaatgttgaattgcacactattggggctgcagatgttcaacacaattatctattccataataatagctctaataggtcccaagcccttggagtcattgattccttttctttgctcaaaataagcaagctaagaatagtcttgggtgctgtatcactgatccacgtaccaagagccctgtaacagcctgggtctccttggtgctggacctcccatatccagcctcttcatactgattcagctcaacagactttttctcttgaagcctgaattacaaaaccagagcttttttttttttttttttttgacggagtctcgctctgtcgccaggctggagtgcagtgggtgcaatctcggctcactgcaacctctgcctcctgggttcaagtgattcccctgcctcagacttttgagtagctgggactacaggtgtgcgccaccatgcccagctaatttttgtatttttagtagagacagggtttcaccatgttggccaggatggtgtcgatctcttgacctcgcaatccacatgcctcggcct

SEQ ID NO: 59 - DNA, 6103 bp, Homo Sapiens
aagtctcacaaatatgtcctttaatttctaatccccttatataaggctccccaaaatggtacctatttatatacttccctttgaatatcaattcaaagcaatttttttttgcattctaaaatgtttactgccatacacattcctgatccttgataatttgtgatatgtgagggcccttcctttaccagtgattgcagttctaaatgtatctttttaagaactatactacacatgctattttgataatatgagatgatcataacctagaaacagaccatatttctgcccctcaaatctttcatgatttctgcattcaactgttaagctactgaatacccactagaacaaacaatgtgtaattgataaggtgtattgtgttgggggaaggagaaagtaggaggagggagacaagggagcagagaagccagttactctatggggttatctgacaaagaccatcaagtcctcagcggcccagactagggattatgtggagatgtacactgtgcaaatgcaggagcaactcaccaacaaccaaacagaagctgtccttggacaagattcaataaatatttttactatctattttccactgtacaatactgtttcacagctccccaaggcatctcagagtattttaatactccccaagtatcaaaatacttaatagaataaaaaattagaaattcttagctggtctctacttgtctttataaaacatttcagaacataaaaccaataataaaaagcagtcaacaatattcctaaggataatgtcagagcgataaactgctgttatcccccaaagttttcccctccttattaagacattgccaagattcttctcattaaagtgatcacagtttaacatagttagtgtctagatatactcccatcactaaactcctaaaatttgcctcctgaagggggtgggggaggaaagcttccaaaaatcataggtatcgatctagaaagatgaaggcagcaaaacttactataagctgttacacatattttgctactcaaacaaagcctgtctacactacccagaatcagttggtaaaactggtaaacataccaacttctatgagagtacaggacatctatcataattcagcgattacacagtccagcaagtcataccgcatgccaacaaattcagctttagttgggacaaaacgaaacctcaatttgaataagcacgagacaggcttacaccaaatactccagtgtgggacaatttgatttgaaatatcttactaagaagtaagtactggattcagggacaagaagaaaaagctcttagactgacatttctttgacttttgacatgggagacttccattcccagctgcagagatctacagatttcagtgttttgtttctaatcacctgcattcctgtgcagcatccaacatcatgaagatgagagatgcagtcaaatacatccggcgagtaagacgttagagctgaacttaaagcattcagcagaagttactctctttcatcatcatcacaatcaacagaccttgtaattcccccagaaacagctaaaaaaaaaaaaaaaaaaaggtgtctgcttgctagtcttaagagaaggatgtgctacctgcttagcaaagacaggcaatcacgatgaagaaaaaaactggagccacatggaggacggaaaacagtagcagaaaaagtccaactctgcctgcgccagcggtgtggatgagcagagcaacgagcccaggagaggaaggagggggcgggggcgaccattccctaggagaacttgtaagcggaggccttcacagcctgggagtctgcccagctgctcccgcagaccctgccagcctgggcacggcaggcccgcggcagcagggcaggcaaggcctccgagggtcactcctgactcactgagcctcaggccagcaccgccaggacctctccgtttttccttccgctactgggctatgatggcagctttccagccccacatgccatacatcagccgcagatccccgctggcacaggccagcgcctccctccgccccccacccctggcacactttgagcctgatccttcttctctccaaccccaaccccctcacccacccgtgccaggcgccctgcccaggggcggccccacccccccagcgcccggacgctgccaggcccgggcacctgcagcacctccccgccccacccccattctccaccacctcgcccctcccccctttctccagcaaagggagggggcgactcaccgcagtcagtgcacaggatcttgcccacctctttcttgagatttttgccgttggtatcgaggggggcaaaggccgtcttaaagactaagggctgttccgtgggctccaggaaaaagatgtagcgctggttcctttcgagcggcacacaggagcccacgctgatcacctgctcgcgctgcagccccccgctccggagcggccacttgtccagcacctttaccaacgccacccgacccgaggcgggcggctctcgggtgctgttggagctggagccgccggctgggaccagcccctgtaccttgccctccaccaccacgggtgccttgtacgcctggtcctgcactgacttgaggctgggcgagtagcaggcgagcgacacaccgaagagcagcatggagaagccgggggccgggtcgcgcctcatgccgccggcggctgcggctcgcgaacgggcggcggctctccgggctgcggggctgcggggctgcggctgttgctgcggccgcggctctgggggcgcagcgggacgagagatgctgctgttgttgctgctgctcctgctgctgctgccgctctcgctgctgctgctgctgctgctgctgctcctctcgctgctgctgctgctgctgtcgctgtagctgctgcaccgacccttctccagtggcggcggcggcagcgctgagcagcaaacctgccgcatctggccaggccatttggggggctccgccgctcagccgccgccgccttgggaggggaaacagagcccgctggaaaaccggaaacagcgtaacgttagcgcctcttagccctccaccggcagcccggggaggtggcccagctagggcagggggcaggcggcaagcgggccgcgatgcgcagcgcggcgcagcgcagcgctcccaccctgtgcgccaggacctggaggaggatgcggaggatgggacgcccgcccacttgctctctcgcgccccctctgcccccggaccgagtagggagcgcggcttctgcaggggaagcttgggactgcactgctttagtgcccgccttcagcccgcaggggcgcgggaggaatcgtgccaccctttgctcccgggatttatcggcatgacagtgggggtggtgcgtgaggagaaggcgaagaagagataacgggctcctggcaccatcctatgaacgtggtaatgggacgcagggcgtgccccctgcctttggccagcagctgtaggagccagagaggttgccatggccagggtggccggccagcctctcgcctcttgggctgtcctctttcctaggaggaccctggagcccagcccctaaatgataccacgtgctcggtcctgccaccgcctggtgaacgctggatattcgacttgaggtgggggagaatcccagccccgtcattttggaaagagttgggccacaaggtgtcttgtcttagcattgaggacacccaagcagaggtggtagctgagaaagggcccagtccccaacactctgggctttcttcagcggccacgtggggatctggctgagcactgtacaacctcatcttttaaaaatctgatctctaagaaaggtggggggcttcttgggagccaacagagagccagagcctgtcagggccagaggctgctccataaaaaaggttttttttgttttgttttgttttgtttccaaggctgatgcttgcaagaggcagaagagtttgctgcactggagccagcatctgatttaaaacacacacacacacacacacacacacacacaggtccataatccattagcctatcaatgagggtccagggagttttcaacacccagcttttaaccttgaaggatgtggagctcaggaatgccagtgagctcttggggaattttataccgcactgggctccacaggaaactggtccaaggatgagtgacttaggctaggactgctattctggaaaggaagtagagagagctacacctttcctcctagctaagagacatcttaaactcaatacatccaaagccaacatcattatttcttccacttcactccaaatcccctataattattaatgccactgttttattcttttagactacatcaatccattacaataagtcccttcatctcatcttttattcttcctcatccaattaatcaccaaggcctttgggtctctcttttaaaataatctccaatttatctacttccactccaactctgctgcaaataccttaagtccaagccctcatcatctctcacctggacaacttctaagccttctaactggtctccactcctttcacctcatcacctatctccagtcctaccaatgccagagtgatccttctaaaaataaaatgtaagtacaatttggccatgctactgctctcagaagttaagttcaaactcctcagcaaggctcttcatgggctccctttgcctagccagcttcatatcctgagagccaaccccccactctagcaatcctcagcacttcatgctctttcttggtgtgcttctgcacatgatgtctcttgtgtccagaaagcctcacctccaccttgaccacatggaaaacttattttcccaaggcccagctcagcattataccgcatcccccttcctacatatccacctctactcccaccaacacatacatgatggaattaatcccttcctcctctgtattgccatgagcttcacacatagtattactgttgggatactggcccataccgtatttcaagcagccatttaatgggtctgcatctcccatcaggccaggcacgttaatgtcagggactatatatatcctattcatctttggattcctattacctccaacacaatgcctggcataaaataaggattagcaaatctccagtgaaagaaggagagaaggaagaaaataactgaaaatcggcacgcttaaaggcatcaagccaatcttcttggctccttcagtgtcccccatttcattttcatagatcacagacctcataaatcacaaaacatcaccataaggaagatagcgacatccactctttcattttacaatgaaagaaaaagtcccagaggggataggggacttactcaacatttcacacagccaggactgaactcagtcttctgttcctgagaccagggtcatagtgaagagcttgtgctctggagcccagcagagctgggttttaaagcaactctgtgacttaccaactttgggatgagtctatttcactctctaggccttagtttccttatcagtatgaaggagaaaataatagggtctacttcgtaaagctgttttttgctcagtatgtactttcaataaatattcaattgaatggctcctctgtgccaagcactgaggcactgtatgttactggatgtactgtggtgaaccaaactgttcaatagtacatgtctgtgctctcaaagctcatactctgactgggaagacaacagtaaataagtacacaaatgggtaactaattacttgtattgctgagtgtcctgaaggaaataaacaggatgaaatgctagagaataatggaaaggggagaggataggtctacttggataagggaaggcttctctgaggagataacatttaagctgagactagaaggatgatgaggatgtggattatgtgagataatatgtaaagtgcttagaacaatgtctggtgcacagtaagggccaaaattaaagttgaagattactaatattttacttatactggtggttcccaatctaagagctgagaatctctaagtggtatttattttctgtatattaaaaatattcactaggattttctgtatattaaaaaatgcggctgggtgcagtg

SEQ ID NO: 60 - DNA, 6245 bp, Homo Sapiens
taaggaggcagcttaaggccaaatttaatctaatttaacacctccagcttgaaagacaaaaccaaaccaaatcaaccaagaaacagaaaaaagaaaattcaaagatgtatgagcatgcataactttgataaaaataaaaataataattatttgaattggcaattagaaaatagttatatcctcaggtaacagatgtctctaggtggatgagattgtgggtggtttttcttgttgttgatattttctgtgcatctctaaaaaacatctaatgctttgcaaagaacataagaaacagattagtacattagtggccttggaggaaacaatctcagtaaaacatgtgtttattaatgaatgtattcccccatccctttccaaaaaagttcataggtgtagttatagtcaaaggtaagaggcagtcttgtcagagccagtaaagtaaccaaccatcctggtttgcccaagaccaagcagcttcccaagacactagactttcagtgctaaaaccagagaagtcccatccatactaggagagttgatcactctagtctgtgtaatttgcaaagactctccatatcctttggttcctgtgagtctcaaatccacccagtgaggtacaggtgggccggtggatggtcacctccatttcagaagagaggcagctaaggctcagggaatctccctatccctgacccgggaaaggccttaagagaaagtggtcttttaaactgtgtgtatatatcactttgataaaattaaaaattagttttaaagaagagagagggccaggcgcagtggctcacgcctgtaatcccagcactttcggaggccgaggcgggcaggtcgtaaggtcaagagatcgagaccatcctggctaacacaggtgaaactccatctctattaaaaatacaaaaaaaaaaaaattagccgggcgtagtggtgggcacctgtagtcccagctactccagaggctgaggcaggagaatggcgtgaacctgggaggcggagttttcagtgagccgagattgcgccactgcactccagcctgggcgacagagtgagactccatctcaaaaaaaaaaaaaaaaaaaagagtgagggccaggcgcagccgtcacgcctgtaatcccagcactttcggaggccgatgcgggcagatcacgaggtcaagagatcgagaccatcctggccaacatggtgaaaccccgtctctactaaaaatacaaaaattagccaggcgtggtggtgggcgcctgtagtcccagctactcaggaggctgaggcaggagaatcgcttgaacccgggaggcagaggttgcagtgagccaagatggcaacactgcactccagcctggcaacagagtgagactctgtctcaaaaaaaaaaaaaaaaacaaaaacaaaaaaaaaagagtgggaatccagaatgatagaaagaaaatgagcctgggagggatgaactgcagaggaccataaggtaacatgggagcagttttgcaggtgtatacaactgtcaaaactcactgattgtacactttaattgggtgcagtttttgttgcccttaaattatgcctcaattagagagaaagagagagaatataaggaaatgggggcagccatggcgtccttggagaattcacacttgggacgacaactgctcatttgtgtactctctcctcctcacctgtcttccactccacccctgtctctgatggaacatctctccagctaagccatcttcctcaaggcagcccaattctctgtggggctgccacagcactaaactgttctctgtgtccccaggactccaacctgtctgtgcacacagaaaacccggacctcactccctgcttccagaactccctgctggcctgggtgccctgcatctacctgtgggtcgccctgccctgctacttgctctacctgcggcaccattgtcgtggctacatcatcctctcccacctgtccaagctcaagatggtcagtggctcagggatctcctaccgatggggctgggccctggggattctgcttttattttttaatttaattaaattaattaattaattaatttagagacagagtctcactctgtcgcccaggctggagtgcagtggcatgatcttggctcactgcaacctctgccttctgggttcaagcgattctcctgcctcagcctcctgagtagctgggattacaggcatgcgccaccacacccagctaatttttgtatttttagtagagatggggttttgccattttggcaggctggtctccaactcctgacctcaggtgatcagcctcccaaagtgctgggattagaggcatgagccactgtgcccagccagcattctggttttaatgaggccctctcccacctcctcggctggactgggttccccagtctcacctgacctgcttggggtcatgggaatctgacaactgagaatatatacagccagctgacatattccccacttgggaaagtttaagtaagttcagcaacactctccccacctccagcaagcttctggtcagctccattcccagacctcagtgccagtcccaggcaggtctagtggattctggtggcttcaggtacaaagaccccttcccagtgaggactgtccttgcctctggggatgcggattccaacctgtgctctcttcgcaggtcctgggtgtcctgctgtggtgcgtctcctgggcggaccttttttactccttccatggcctggtccatggccgggcccctgcccctgttttctttgtcacccccttggtggtgggggtcaccatggtcagtgtggggccctgggaaagtggatgggggaggtctccattgggttgtggactgtgatagggaaactgtgggctctgaggagagggctggacatattgggaatgggaagaagaagggggtggccccagaaacttctggccatgtgggatggggagaaatggaggcaggtccagatgtgtgtgttctgcccgggcctccctgccctccctgcacagctgctggccaccctgctgatacagtatgagcggctgcagggcgtacagtcttcgggggtcctcattatcttctggttcctgtgtgtggtctgcgccatcgtcccattccgctccaagatccttttagccaaggcagaggtaaggttgggggagaggggaacctgccaggtttagccctgataggagggtgacctcagggttcaaagtcactgctgggtcccaggtccctccctcgaggcttcaagtacaaacacaattgtgttgttctccacttgctacatttctacctggaagcaggctgaggagggggcaccagtgtaacacaggaatgagccaagatgccaccactgttggaccatcatgtgagggtagggggctgttccacagcacccacccaccaagtgcaatatctgacgtgggtgtcagtcagtgcctgtgtaatgaacacatgtatgcagacaagtgtgaagagttctggcttacctagaggtcccattagcatgttcccttcctttcttcccacctccctcagttcctggccttcctcttgatcttcagtggctgtgatgttgggctggtgggatggaacactgcaggccaacctagtgcctcccatttctccatctcagcgggaagcaggcaaggagagtagcaaagaacataggctgtgaacaacccacttactccccatgtgggctcgggcgggtcgctgaaacctttggagcctcatttccttaattgcagaaagggcgtcatgagctgtcctgcctgtaggctgatgtcccagttagacaaggtcatgtaggtaaggtgatggcaccacacctggcacaggtgccacacctggtcctcgctgaaccagagctcccttgtgatccttcctcatctctcagagtcctctgagtggggacctggaggcccccaggtgctgcctcctgccccagaggagactgatgccccaagggactccgcagggcaggggctgcaggcccaggcttttccagtgcttctgacgcccctccactctcccacccagggtgagatctcagaccccttccgcttcaccaccttctacatccactttgccctggtactctctgccctcatcttggcctgcttcagggagaaacctccatttttctccgcaaagaatgtcgaccctgtgagtttcccatggagggtgcgggggctccacagctgagtcctcagcccaactctgaccagcagcccccaacccctccagttcctttcaaagtgggagagaggtcatccccacaatctgtaaactggggcttggagcaggaacaagggtcccctccatttccctactctgctttgagagggtggtgggcactcctgattcccccgtcctattctctcgccttctagaacccctaccctgagaccagcgctggctttctctcccgcctgtttttctggtggttcacaaagtgagttggctcttccaccagccaggccagagggaggggagggatggaaggtgagatggagaaaggggagcagggcagcagtttagggaccgggctggccacctatcccaccccccaccgcagtgggcacagggcagatgagggtagggaagtggtctgggagggggaccaaatgcagaggcctggcctggcccagtgccgcccccaggctacaggccagccctgcatctggcaggctgtggggacaggcccaggaggctggaagaagactgtcattagttctgagctcctctgtttgtgataaacttgcagcctgtcatctccttggctgcgcctcagagcggcttgagcaggataactgtgtctgtgacctgggtgacagctcattaaccccacagcactgaggaagcacccgaggctggggccaaattgcccaggcctcgtcctcacccagggccccaggcagcgtggattccatcaccagggcctggggtggggaggagatgggacacctggggaggaggaggagaagggggtagtggtaggaacttcggagggagagccagtgacctcaagcctattcactgaggaaatgaaggagacacctttcatggtcacagtgcccgagggagaccctcctttctggagaccctggggccctggagacactgacccttggctccaggctgctaaaccctgaccctctgcggggctgcctgccgggcttcacctccccccaggatggccatctatggctaccggcatcccctggaggagaaggacctctggtccctaaaggaagaggacagatcccagatggtggtgcagcagctgctggaggcatggaggaagcaggaaaagcagacggcacggtgaggccctccccttgccccaacacccagccccttcgcttaccccagatctcctgcagaggacgctggtagaccttggagggcggcattgctggggtggcaagcagagcaggaccaggtgatttcttggcagcctcgggaccattctatgggaagcttaggcctggatggcgctagttctcccagctctggtgggggcaggagaatggctggcactttggagcaactactccatcccaggtcccatcctaaggatataaataaactcacttaatttttcaacagccctaaagggtaggttcaagtgtccctgtgttacagatggggacactggggccgggtgtggtggctcacagctgtaatcctaacactttgagatgccaaggcaggaggattgcttgagtccaagagttcaagaccagcctgggcaatatagtgagaccttgtctctacaaaaaataaacaagatgagccgggcatggtggtgtgcacctgtagtcccagctacttgagaggctgaggtgggaggatcatttgagcccaagaggtcaaggctatagtgagctgagattgtgccactgtactccagtctgggcaatagagtgagaccttttctcaacaacaacaaaaacagatggagacaccgaagcacagaaatttaacagagggcctcccagggtccccaagttggtggtggcagagctggaatccacatggagccggctggccccagaggttctcctcatatcactgcaccaccctgcctgactgagagggctgattccagggccaggagccagcacacccctgccaattctgcctcctcctgtctggaggcggcggctgaatgagatgatcttcccctgaggggtcttcccactgtcagcctcttatcaaggaccac

SEQ ID NO: 61 - DNA, 6150 bp, Homo Sapiens
aggttgatagttcttccagaaagtgtggaagtaaaatagaggttgcgtaagggatgggaaaaaccaaaaaccaagtattctccctactctcactctcagtaccgaatgtttcacctctggtcacccaaatgtgtgggagtttctccccaccaaccaccagttcttcagtagagatcaactgggagtcctacaatttaactctattctgactctatctacctggagaaagcatcagatcacacaggttaagggctcagtcccacaagacttccccccaatgtcagatgccaatcacaagtagtaggttgtcacacctatacttctgaccaactagctataagttgggggtccacaacccccttctcaggttcagttaatttgctaggtaagctcacagaaccacagaaaacacttgcttatatttaccagtttattatattaatgaaggatgtaattagggacacagatgaaaaacagttggaagagatgcaaagggcagagaatgtggaaagggatacagagcttctgtgtcctctctagatacgccaccctccaggaactttgatttgctcagcaatctggaaattctacaaaccttgtcctttggggggtttatggaggcctaattacacagccatgattaattacaccattggcgatcaagtcaaccttcaatccgtctcccctccctggaggttgcaagggaggtggcactaaaagtcccaactctaatcatgccttaacaagctcattagcatacaaaagacactcttaataccccagagattccaaggattttaggagttctgtgccaggaaccaggggcagagacatatttcttattatatcacaatatcacagcttggtgcacagaaaataaagcaaacaaaaatcaagacaaggcaatcattaactctaggaaaagcaaaaagttacaagagggatgaaatgccataaaacactgcacggcaaaacagtgaaaagtatttgcaaagtcttcttagtgcaaacattgaatttttttttaatgatggcactactatattgggtagttgaaaagaagagaaggcagtgtgtctggagtagggtgagcaaagggagaatggtaagaaaggagatcagaaaggaaaacaggaattaggtcatgctgaggtttggattttctttcctaagggtgctagagagccactggggagttttagacaggaaacttgaatgctctaactcatgtttgaaaataataactttggctctattgtggaggaaaatataccatgcagggataaggtgaaaagccagtaggcccgttgggtaagagggataagaggcttctgcagaagagatttttcctataatgtggcctggactgggaaaggcacacttcgggatgtaaggaagtgggtaggtgggaatatacttaggaggttggtggcttacggagtaaaaagagggacacagggatgacttcctgcatgtcagcacaaggcatgtggagaaggcagaggaggttgttactgggttcaggaaggctggggagggaatgatttgcaactagagagtctgggatctagggttctgttttggacttgttaggccgagttgccccagaaagtaccaagtaggcaactgtgccagggctcagggtacagacaaggctagggagaaactcagaatatgctcagactcaacaggtagtaattcctccttttctcttgccaatgcaaagaaatgtttcattatatgtttggcgttttatacggcctcaatggtatgatttggggcactgattgattgaagacttgatactgagaatctaagggtaaacaagcagtgaatcctggaatatatcacaataggtaacccattcaaagtgcttaggcctccctggttttctattttgggtcatatctgtcttaaggaaacactctctctaccaaagctgaactcataaaatagtaaaagtcctcccccgcccacacacacaagaaataatttcccattattagctggatttaataaacattttcttccaaaaaaaaaatttgtccctgctcagtagacttctctttatgtgtacaaagcacgtgccaagttaaagaccatgtcaggcacactttgagacactttccgttttttaaaaagttctttcttaataaacattcaaaaggaccaatttgtttaaaagtctttcaaagcacaattcactacaggtcgtagagttctttaaaccctcagcaggattctttcttgactttctcattgctttgtgcaatctttgtatttaatcatttatccccgaattggtcttcgcagtgtggcttttaacaagaactgggttttagccacattacagtagacgcggtgggggcggagggcagcagtggcaatcgcaaaataaaacgtatcataaagtggtaacggttcgtgatttaggccagttgttgaaaaataaatgcctgttatatagaatcacagaacttgagagcttgcggccaagggaagtcgttcatcggtggaccgacagcgccccgggcggcagaaagaaggcggcggcggcggagacccggggaagttgccggatttttaaaaaggcacctgctgggtgagtcctcactgtgcaaacgggagccacaggtgcccgattttaaggggctacaactcgggaaaacctaagtctgtaaaactaagtacgttaaactaagtaagttctcgctgtgcaccaagttgatgggggcgattatttacggcggagaaactgagtggaggaaggagggagaattccgctaaagtttgcctgcgactgacagctagggagtgacctggaagccaggaagaggggcagagaggaaactaaagaagtaggtaagagagtcagtttatgaaaatagagcctgctgtggagagcagcaggcacacctgcggaggagggggctgcctcacctgcggggccgctgcgcgcccccctaagtgtgttagcgggggaggcggggctggaaaggaaacctggtgaagggctggcccggagcctggggtggggatattcactgcgggatagggccagcaagaggacccgacacgcatcgtcccgagtgacacgtgtaaatgtcaagatacagagacatctgcaaatgtcacccaagagggtgaggacgggggagcggtcccgaggctgtgccctccggggcaggtactggctcctgtggggctgcgggccaagtgtcgcccttccccaaggaattggcacctggggggggggggtcggtctcgccgcgctggaagcgcaagccccggggctccggagatgcgccggggcgcgtcgcccctcggggcagccctggacctcggcgcgcccaggcgcagcgtgcggtgccctcggcggggcgggcagcgagccgccctagttcggcgacttacctcgggcctcgcagggcgcgagcagagcaccggccagggcgagcaggagggcgcgggcgggggacacgggcagcgggcgcgctgccatcgtcgccggccttcagtgcagcagctctcgggcccggcggcgagcgctgcaccatcccacgcgggcgccgagccggggccgggcgtcgcgaccggagggatttcctgcctcggcgagtcagctccggagccctcgcgcagcgcccgcgccgccgctgagctcttctagcctttcatttttaaaaaagtttccccccgtgtgtgtgcgtgcgtgcgcgcgcgcgcgccgttctggcacaagccagccttgaccgttgcaataaatgagcaaactgtccgagttggcccggggactaggaagagcgttagtgagagaaggcaggcctgtgaaatggatccacggccagcagtcaccgttcttattaccgcggaacaaattattgtctcccccgcacccccgccagttggcggcgtcccgcgggtcctagagaccgctcgggtccccccgccagggtcccgccccgagccgcggctcgctcacccccgagggtgggcggctcagacgtggctcagtggcgtccgggcgcccggagcgcacacgtccccgccccaggatgatgtggccgcagggcccggggcgcccggctgccaagcgcacatgcggcggcacggtccagcttttcaggctgaagctggaaacgatgactctgctactcgctccccggctctctgggaaccctcggagtgcgggtcaggtctccaccgcggcccacagcccggcgcgcgaccccgcccggccctaagcgcccaaaggggcatctctcgcccgagaaacaagcttggactcgcaggcacaagacacctgggcgttacttttgatcaacagtgttaggttttacgttgatagattggctcacgtttccattccatgacctggacccagaaaagggtgtacagtgacgttccccaaactttcctgattgtaagaagcacctgggttggcttgttaaaaagattcccgggcgccctcctacgctttcagaatgagactctccaggctgtgaggccaggggagcccagggtgtttggagaaacaccaatgaaagaatggtgcgccttgccttctcatccttgttccgggctgaccccacctcttcagcctcgctcggccctcagggagaccatgaaaagcagcagcgagggggcccgcacagacagaaatggctggagctatggaggatggctgatgcccaccctgcgggttaccatgattcccaaccttggggacttattagaatagtaagagttaaagacattgccagccccagacaccagttaactcagtttcccacaatgcgtggagctcaatagttttcaaagcctcaggtgattctactgtgctgctcagacctaggaccacctgcagaaattccatcctggtcctgcgacctcgcaccgattcctgacggagcacccactcctaggaggcggttatccagcatttgaggaagctgccttccataccatctcttcccactgcagaggagttttctcaggagttccctcccacggcaggttttgcagtgttcccaaaacccaggtcgatcctcctaacaaggtgcaggactttctttttaaaaaaccttagtgggaagcacaggctctccagcccccttcccaatgctgccatatctcagtaccagatctggaaaccaggcctggttcaagccctgtgtcatatctaaccgtactaccaaccagcgttgcagtgtacttcttttgttcattcattcagtcaatctacatgagcaaccctatgttagaacttgggaaactaaacgagaaagcctcttgccttcaaagacttttctttctgatcaaactgataaatcatcattattggacagtgtgagctagttacttaacctagttaataatgattaggcttgtttactgatatggtttggctgtgtccccacccaaatctcatcttgaattcccatgtgttgtgggagggacctggtgggaggtaattgaatcatgggggcaggtctttcctgtgctgttctcatggtagtggataagtctcaaaagatctgatggttttaaaaagaggagttcccctccacaagctctctctcactttctgcctgctaccatccatgtaagacatgacttgccccttcatgtcttctgccctagccatgtggaaatgtaggtccattaaacgtttttcctgtataattttacccagtcttgtgtatgtctttatcagcagcacgaaaacagactatttactacttcataattcattacatacctcgtataatcggagtattgtgctaacgtctttcacctgcattatttcattttttaagtcctgaatatacagatgaggaaactgcagcatagagatgtagctttcccaccaccacacagtgaagtaggtcagagcccaacctcagatctgttaaagataaagcctgtttctttaaggctgagttccaaccttcagttttagcagctgttaagtgaaggtaaaatacaaacctcccaggtggttgtgagcaccaggtgaaataatgcaatgtctcccaacccacctgatccctgggatgtctgttaagaattcaattcctctggcgtttgcactggagattctcattagaaaggtctgggaaggacaagttttagcaagtacttaggtga

SEQ ID NO: 62 - DNA, 6238 bp, Homo Sapiens
tgtgcttcgttttcaaaaagctgttaggaataactaaccatattctacattaaagctacaaaaggggtaataaagaacagcatatgtatttttcagtattctcaatagaatctcagtatgcacaatttcattcaaggatgaacattttaaactcaaatgtttatttccatggaaaataaagtttggatcagaattttctatacaaccttataagacccacgtctccatatagttataacagtcaacttttcttaaaattatttttggacaactcaactcaacttgaccagtatttttctactaggctaatatatttcaaccataagtgcattcttcattttctcccctcctccctactcacctcccacccaacaaattccctttgtatgtctgcaaggcaaggtactatataatgcagtataattctaaggcagtttgaatatataattcttataacaggaatctagaattattaaccttactttttacaataaaagtaccagtgatgtactaaatttctattcatatgtatgacaaatgtatctaacatgctttaccgttagggggaaacaaagggggaaagacacaatagatgggtggcaaatcttacaaactttacaaaacactgaaaagctgcatctggattgcagtcacaattataaaagcaaataaagctctgaaataaaggaaaagaaaaaaattctaagtgatcatcaagagtgaaaaaggtttattcaatactagtttttagtacagcaccatttaacactgactaattgaaaaaaaaaacaggataattcaccgtttgcaaggacacaggaaacaatttctacataccttctataagacagttacacttcttcacacttgcatggctcaaatcctttcaaacgtttccaaaaatacagtcttataataaacgaggttccccaatgacacacattttattctgtagacttagccataacacgttttaaaatacataaagaattcatcctcgacagaaacaaggagtcacaaaggctctctacttattcagaatcattacataaaacaccatctgtaactgcaaacagggtttgagaaaatctgacagctaataatcataaaatggggtagactttaaaggaaaaaaaagccaacttttccattttgctttccttttcctttcctaccagatacacaaaatgtctgtaatagcgtcagacagagctttaaaataaaaatatagtgctatatatgtatactttacattacgtgtataggaacacatatgtatatatcacacgttcacaggaaacagaaaggttccctcgtttttgtttttgctttttctttattctaggaattgaagttacattaaaccctatcccataaattaagttaaatcatcattaaattaaagagtaataaaatattgcacgtagatttctctgagcgactatcttctgagaaggaaaacctcagactaagaccatggctgaatacgaacgcccaatccctaaaaaaaatcactaaccggcatttgtttctgcaagagaaaaagggagtcttacaatgaataatcacataactcagtttcagaagttaaccggggtaaaacacaacgaaccaaattagacaaatgtatgaaaggacaagctttcaagaattcgcccaaagtgaaagactggttttaaccccgggatataaaacatcctttgcaggtagaagagtctttaattgaaaaagaaaaaaataaaataaagtggcgggcacaagaaaaacctgaacgacacgcaaaggcaaagtaaaaaataatgataattttaaaaaggggtctctcctcccacccccacttccagcccccacccccaccttcgcaggacaataggatcagggtcctaactgcaaactttaaacgtgtaaaccagaagcagttttaccgcagctgtaactgcaaatctcctcatcccgaacctagcgcacccaggaatacttctgccctgaaaacatcagcaagctcttggtaaatacaaatcagacccatcacgagattctttttttttttctcccaagtacctggaggatccatttcaatataaaatatcagttctgtcgaatagggcatcatcacctccctccagtctgcgtcatcgcggtccatactccacaccgtattgtacatcgcgctgtcaggggcaggtcgccaggagatatatagaaggcatatattttttatctggtatttaaaaatctaaaaatatatatctgcaaaagttccacacggaaatgtacttcgggttttccaacggccagtaccagtccggccaaactacccgaacagggtcctccccctctctcctacagaacacaacaaaatgcccccgaactttcaagctatgggcttttctcctcagaggattacacagaggcttgggggacggagagcagaggtgttaaaaagcggcttcccaaaaatcctttctacacagtcgctctccggggagaaaagctcccaccgcctccaaatctttccgcggaagccacttttgtgtccttcgaaggagggagaatgaagaggaaaaaaaagaacacgttgggagaaacccgggcaagtgacaaaggaaggcaaaaaagggggctggagattgcgttcaagtttcggggtcccactggtctgcagagagcgaatcccccagaggccgggactcgggctcctctccggtcggtctcggaaccgaagctgccgcagcctcgggaatggggccggccggagaagtccagtcagctcggcttgtctgggcgctcccgccggggtgtaagaaccaacccgaccgcaccaactgccctcaagctctgcccggactccagccactagagtttcattttaacggcgcggaggggacaccctccccgccccatgctgcccacccgctgaggcgccacccaaccgcgccgggaggggggacagcaggcatcaccaccgccccttccacgccgtcccgcctcgatgtaccgggattctgtcaagtgcctgagaacatgttcaaaaagctgctctccatctcgactttcacgtctccccaccgctctctaggcttcggctccccaatcagccatccgcgctctcccccagcctcaatcagaatggtacgatccgggcgctggccgcactccaggagtcagtgccgggagcacgcgagccaggcgaggagggagtggggcgagggaagagaggcaaggtgggtggtgattggctgaggccggttgccggagcctggagcctgcgtcttttgtctgccttgctcctgcgaaggagcgggagacggctgcgcgccccaagcgggccaatcaggagacagccggcgccggccggtaaggcggcgattggtcagagcccagttactaagcgggacaaaggcagaaggggaaaagaaaagaggaggaaaaaaaagaaagaaagaaaggaagaaaacgcaaacggcggttactgacaggctgggcgagcgctcgggggctcaaactgcctggagacaggcggggctcctgctgaggcttggtccgcccggacgagtaaggagaggagccagggaggacctgctggcgtgagacgcctctgcccggtgattggccgcgggggaagggagcggacacagagggggcacgttctgtcacttggcggggtgcgcgctcttctggtccttaggaggtctctggggagactcctttcctacagacctcttcaccttgctgggacagccctctccgcacccttgacaagttgtcaaagcaatggtccccaaacccacttgccaccttaccactcagggagaggatgtgcccgtggcccctgcaaccttcctggctgctacctgaccccactccctgcttctccccttgagcaattggacatttctgagggaggcatttcgcagttcctctgtgcttcccacccaaagacttttgaacccagaggtaactccccacgcctaaaatagtgagaggtctcagcaagccctcctgctcgagtgctcaaaccaattaaaaaaaaaaaaagtcttggaattacagtgcatgtgtaatttctaagataagtcacaggtgttggaatctctcaccaaaagggctctattctgtttccctgacagaccctcttcctcacatactcattcccacccccaaagcttaaatctgggagattggcttcactatgaaaatgctgaatatttccatgcatttcagaaacagctaattaacttgctggggaacactgaatagctaaaagcagatttgtgtctcctgaagattgtgcctggaattgccatcctgtataccctacaatacagtctgaggaggccaaaaactgctccatttcctctttacacaggagtaacaaagcccattgtgtttgagttgacagcctgatttaagccctagcaaaacctcctaccttgagcatgtctgctatattgattcgcctatggaagagttgccacgtttcaccctctacctcctaaggtggttctgccttccttaaagatgccctgagttgagacagttcctgagggcagacagtcaaaatgtatatggactgggtatagagtaactggtttaaaagggccagaaagtatggatggacatggttgagctaagaaaagacaccaggattcttatatgctttcttattatttctgaaatccaaatatgatttcaactttggggcaggactcattaattataatttcctgaaccattccttacaggtagaagatactggaagatcaactctaatttgtggctgccttcccagcagtctctacttcagcatatctgggagccagaagcactcaagtttgataactcaaaagacagaacaatcagtcaagggtgggttggtttatttttgttcacgggtgttcatgtgcattcccaaacaaaatgagggtgaagagagaggaagtgtggaaaagataatggctttcagatttccacagcaccttttgcctggaccacttttcagcatttagtggtggggtttcagtttctaatacacagagcaatcacccaggcttttcccacagctaaggctttgagagatgaagtgacgtccaagcacagtatataatcaagtggtcaaggctgacacatggagtaaagctgtgattcagtctttccacctaaaattgtatgacccaactctccaacttaaatagacctttgaatatatctccagagaataagtgatgcaagaggcaatgatgaatcaaggggaagcaaactttcttagtccttgagcttaaaccagtgccctgccatgggggaaagcacctgtgagatgattctggtctttctttcagttgagaaatagaagtgaggttgtgattgcttgtcaccaaactgccccaggctctttggcaaaggtaaaaaatgttagctcgggtgtcctggaccacttccaagttggagaattatatttgacctgggtgtggattaaattcagctctaagcactcaagctcctgggtcacaacctgctactttgggagctgcttgttttcctttgccctctccctttctttttttaatttaaagtagtcttaggtaaatcatgaaatctgctttcatttatatatctatgaaatagatttatgcaagctgcttagtttatagtgaaacacttagaatgaaaaaatatgccacttaagtatttaggattaatagtacttttctgtaactccaaatggctaggatgcccttcacttttcaccctggtatggtttttttctgcaactgttcaaatatgcttcatttcttcctctttatttcagagatggatgaaatatttcttctgtgctctgaatatagggtatgatctcagagctctctgtgccagcagaatcagtctggaactcagccagaagttcttcgtgattaaaggtgccatctgagcgcacaatatttttttaaaagccttgcaaaatggggccgggcacggtggctcatgcctgtaatcccagcactttgggaggctgaggtgggcagatcacgaggtcgggagtttgagaccagcctggcccacgtggtgaaactccgtctatactaaaaataaaaaaattagctgggcatgttggcaagcgcttgtaatcccagctactcgggaggctgaggcaggagaatcatttgaatgcaggaggcagaggttgcagtgagccgacatcacgccattgcactccagcctggacaacagggcgagactc

SEQ ID NO: 63 - DNA, 6218 bp, Homo Sapiens
cttcccagtgacttttcccctcttcctttctgggaatcttaagtcctgctcccctccacataggaggatattgatacctaaatctctctgcttcaagggttggcaaccccaaatttctacttctaggaagcaacagatcactggtccatcttggtactgggagacatcagatgttgactccatctactctggatctactgccctctggcccctcctatttggagaaagcttgaccgagcctcttccacttcagggagcagtaaccctgaggtactcctactttaggaaagcactaacctctctcacagcctagaggatactgacctctaagtcctcccctgtagagctggtaactttactggttcttggtgacagaaatgaatgtcctctcctgctataagtgccagtgccctgaccctcactttttggtactttgaggttagaaaaaaacactgacctgacctcttcatctgagtggtccagagacccagacccctcactatatgtgggtggtccctaatggacaagcaccaaattatgataatgatgaacctgacctttattatcaaggagctattccagcctcagtcctttgaaggaaagctataattcccaattcccattattcaaatggtggcaaaccttggtgccattcttagaggatagtgacccctttgagtaactgatgaaccaaatccatttttttgtttttttttttgagacacagtttcgctctcgttgcccagctggagtgcagtggcacgatctcgactcactgcaacctccgcctgctgggttcaagcgattctcctgcctcagcctcccgagaagctgggattacaggcgcccgccaccacgcccagctaattttttatatttttagtagagacagggttccaccagttggccaggctggtctcgaactcctgaccgcaggtgatccgcccacctcagcctcccaaagtgctgggattacaggcgtgagccaccgcgcccggccaccaaatccattttgaggggccagtgacaagttctttcagagggagataaccctacatcacttttttttttcagagccaatgacaccataccttagaacaattattaaaaaagtataaccttagatccatattctgtaggaaactgtgacctaccctgctccattccatttttgttaaaggagacacaccaagccatgtattttaaaacatggactatggacttggtttgaaggatatgctgactcccaatgtctttatatctaaaaggcagtaactattaattctcaccattggcagtacagctcaacaagatttagggtgggtaatgatgccaggtcttggttttaatagggaagatgatctgagtaccaggtttggaaagcctggccctattctttggggacaaaacacagtaacctcaaagccctgcttctaagtgatattcgctccaaatccccatcttctgaaggacagggaatgcagatccctctttttcggggttggtcttattcttgttctcttaggagacaataaccctagatccccatttgcaagcgactgtgacctctgatccaatattataatgaatagcaacatcagatacctgttcttaaggctcaaggacccaagacctcaataatggaagaacagagacttgtaacccgtttctttaagtgttagtaattctgatccacgagtaattctgatctccaagagatggtaaccccaagactccttttcctgggaggaagagggctcggatccccggtatggggaggcacagtgacctcgagctcctatctaagcacatgaaagaatctgatggatgtctgaggagctttgggaaccctaatcaccaccctacacgggcgccactagtactcacggcccagcttcaccccgggcggcgggaagctagtgcctgcgccggggcctccgctgcctcctccgccgctgccgccgggtccacccccggagctcgaggccccgacgcccccacccatggccccgacagatgcctttccgccgccggtgccgcctgggccggaggccgagcctccggggccgccgccgcctcctccgcctccgccgccgggctccgcgaacgagctagtccgcgccctgcccgagcccccagggccgcctcccgaaggcccgccgccgctcatggcgccgagcacaggcccaggctgcggggctcgggctgcccgggctgccccagccgccgccgctgccgccgcctcccccgggccctggcctcttccaggccgcgccgctctggcttgggctccggctccggcccagcgcccgccgcggggcacgccgggagatgcagtccggctgtcgtccgcgccgccgtcaccgccctcggcccgcacagagagccgcgtggcacgccgggaaatgaagtccacaaaagcctcagagtagaccgcgggaatgatgggcgggaatgacgggtcacgctgtacgtcgggaaatggagtccagggtaatctgtcagccgactgtacgacggggagccctgaagcactttaggaagcagagagcctgatgcacgctgggaaacggagtccactcactcagtctattagctgtgtatgcctcccagagctcggtgcgctctgggaaattgagtcggcccgcgtgaacctgcgggtctcgggccgtgaggcaagccgggaaatggagtcgtcgccacgccctcaccgcattgcaggtgtaaagcgatttttaaagcacgccgggaaatggagtctcaggtggtttttaagccccaggtggatactgcagttccggagatgggcgaggaaatggagtaggtttacgcgctcctctttccaggtacgctgggccgcagtccctgccgggaagtgtagtcagcaccaaggcctcagtgcagttgccacagcgagccctggtgtgttctgggaaatggagttcgacgtatcctccccattgactgagggggcgggatcgcccatgagctccaagcatgctggggaatagtccagacctgaccctctgtgaggccagtctgcggaggcttgccgggaagcgaagtccaatggccaccatcaggggcgtgtgaacgaaaggttagagactgcggcagttccctggagagacttaaaagtgtttcagcgcctccttcctcgcccccaggtccttctttaagaaagagccgaggtcgatcaaggactgctggaaaatggatccaagcacctttaagttccaggtgaccatagatcaggaaagaaaaaatgtcccctctctaaccgcaactctgcaaagattcgggaaacaaagttcccggcggtttctcagaacactaactagtcttcggatacagtctagcttttcctagcaatgtggttcgcaccaggaagctgaatggagcattaaaaagacggaaatgtcatttctgggcctggcgctgtggctcaggctgggcgccagtagctcacgcctgtaatcctagcactttgggaggccgaggctggcggatcatccgaggtcaggagttcgagaccagcctggccaacatagcgaaacccccgtctctactaaaagtacaaaaattagccgggtgtggtggcgggcgcctgtaataccagctactcaggaggctgaagcaggagaatcgcttgaacccgggaggcataggttgcagtgagccgagatcgcgccactgcactccagtctgggcgaaaagagtgagactccgtctcaaaaaaaaaaaaatcctgtcttgaaccaccattcagttttcagtttttggtttgttttgagacagggtctcgctctgccgcccaggctggcgggcagtggcgcaatcacaggtcactgcagcctctaactcccaggctcaagcaatccccccacctaagcctcccatgtaggtgggactacaggcgtgcaccatcacgcccagctaatttggtttggtttgttttttggggtggtggggggtagcggggtgggcttcgccatgttgcccaggctggtctccaattcctgggctcaagcgattctacctcagcctccaacgtgctggtatttcaggcttgagccacggcaccgggcctcccactcttgtgttttgcatcctccgcttcctaaattacaagatcccggaaagccaaaaataaggaagccagctgcctcaggttttgtgtactcagtgagtcgtcctatttatcgattaatacccgaaggagagtagcccccaaaaggcgctgggaaacagagttcctgtgtctgtatgtgtctcttcctcccccggaaatacttagaagtagaatgaaagcgttctcagcccctcccgcatcctggaatggtgggaaatggagtctctggacttcacgttaatccgagcttgtgcttatactaactgtcctgtcctttctgaaaccagaagaaagtcctgtccactcagtttgttcctgactgcaattccccgcggacacaactgcgggggtcggtagcgccaaagcctgttgagactacattacccagaaggcaaagtgcggaacacttccgctcccttcacaaagcaggtggccgcaccacgcgcggctaggcgcgggcgtttctgggagttgcagtttcccagccaaatggtacctgctgccctctgatggcagctctgagtcaaaaagtaaaaatttcagtcgagccccttggcctagggattccaacgcgggaccaagacggctcaaaagggcggcgacatggggcaggatagcgagggttatttaaccgccagaacccgtggggcatgcgccgctgcgtgtgggcaaccgccacgaggggattggggtccgtgggagtttgaaggtgacggtctgcaatctatcaggatgtttgtagaggatgagaatgttcatagagggatgctaggaagggttgtaaacgtctgagagaggcctatgggtgtctagaagggctaagaggagtccgtggagtggtgaaggggtctttgatgagcttagttgacaggataattactggggaccagtggagaagcctgaggggacttaggctgtctgctaaaagttctatgggtgggtggacgcgatggcttacacttgcaatcccagcactttgtgaggtcaaggccgtggatcacttgaggtcagtcagaagttcgagacccgcctggccaacatggaggaaaccccatctctactaaaaacacacaaaaaaattagccgggcgtggtggcccacgcctgtaatcccagctactcgggaagctgaggcacaagaatctcttgaacctgggaggctgaggttgcagtgggctgagattgcaccactgcactccaccctgggcaacagagtgagactctgttttgaaaaaaaagaaaaaaaaaaaaggtctatgggagacagaaattactggtgaccaaggggatctctgagcgacctgaaggggtgagggatggttgagaagcattgggaaggggctttgagagtctgtggaggtactggggctacacgtacaaagcagggaggtctctgatgagattaattaatatgtgaagtgccttgagagcatctgtaaagggctttctacttggaagcaaggatctcagaggatatggatgggaccaagggtgtcttcttgcaggaacatttcaagccagctagctaatagatttaggtgggcgattaaaggttagagtagccgctggagttttcaaggccaaatgccacctgtgacatcctacacagccagaatctggggcaacttgtctggtagggctgtggtctgacctggacagcagttagggagctgagctgagcacttatgattccatattagatgtggttagaggtgctttgaaggcactgggttcaggggctgaggccagtagttagggtcctctcctcccgagtgacaacatccccttctccatcaccccaccaccaccaccaactcagctgcaactatgttgccaggagacatgtctcatcccagcttccagaaatagcccagtggcccccaccccagggaatgacttacatcacccaggagagggagcagtttcccgcaggccgcctcgggagcctcggtttcctgccagtatcctagccctggatcctctcttccctgccaaccgacatcatctgggaccacccaccctggctggcatgaaatgagatgcgagtgggtagcagttgccagtcaacgtttcttccccctcagggt

SEQ ID NO: 64 - DNA, 6250 bp, Homo Sapiens
aggcgtggtggcacatgcctgtaatcccacctactggggaggctgaggccggaaaattgcttgaatctgggaggtagaggttgcagtgagccaagatcatgccattgcactccagcctgggcgaagaaacgagactctgtctcaaaaaaaaaaaaaaaaaattagtcaagcatggtggtacgcacctgtagttgttagttacttgggaggctgaagcaggaggattacttgaggccaggagttcgaggttacagtgaactatgattgcatcactgcactctagcctggatgacagagcaagatcctatctcaaaataatactaatagttcaaggaacagactttgaagcctgacaccctgcatggtgttattccagctttgctacttacttgctgtgtgactctgggtgaataacttaacctctctgggcttctgtttcccttcctgtaaaatgatcatttgtacctcacaggagtgttgtgagaattaaataagttaatataagctcttgggaagaattagctcttgttatggttgtgtgaagagctttacacgagtccctctgcaggatgcatggttgttggtctgtgtgtgtgtatatatatatatgtgtgtgtgtatgtgtgtatctatgtgtatatgtgtatatgtgtgtgttgctctcttgatctctgagtgttgtgtgtgtgtcaatgtgtgagatcatatatgcacctttagtaaagatctaggggtctctgtgtgttttgggggtctgtacctgtccttggctgtacacctgaaccctacgtcttcttgtgtgtgtagggatgtgtgtcatgtgtgttgataaccatatgacagtgtgtgtttccacatgccagtgtgtgtctgtgaagctgtttctatgtggctgtgggtgattgcccacgcgtgacctggtgagcggctgtgtggaagtctgtgttgcctgtgtcgggtgtggagtctctggccagccagggtaggtctttgcatgtttcctttattccatggaggaggagatgaggggcttggatgagacagaagaatgaggggtcactccctgtctgatgctggggccgagtcactgcctactagtggctgctgtgtcatctcccagtctctgtccctccctcctggctggtggcagacagagggggcgtggaggaacagggcagggggtgggcttgaggctggacttttgtctggaaacttgaacctccacctatgccccccacgtccctctagtcttccacatctccctacaccctccctactattggggcagggaatcaggactccctgaaaattaagaaccatcgccttggctctgccacaggcttgctgtgtagcccggagacaggccctgcccctctctcaacctgtgaaattcaatgttttaaaagtgcttcttcctttgtgcccagggctgggccaggctgtgcactgggagggaagtgctgggttctctgaggtttgtgaaatagctggtagcacccttcccagtgggtgcttaagagttgggggctgtagcatctgaaatacccaagtcagtgcaggcatagtggctcatgcctgtaatcccagcactttgggagaccgaggcaggcggatcacctgaggttgggagttcgaaaccagcctggccaacatggtgaaacccccatctctattaaaaatacaaaagttaggccgggcacagtggcttacgcctgtaatcccagcatttaagaaggccaaggcgggaggatcacctgagtttgggagtttgagagcagcctgaccaatatggagaaactctgtctctactaaaaatacaaaaaaactagccaggcatggtggcacatgcctgtaatcccagctactcgggaggctgaggcaggagaagcacttcaacccgggaggcggaggttgcggtgagccgagatcgtgccattgcactccagcctgggcaacaagagcaaaactctgtctcaaaaaacaaaacagaacaaaacaaaaattagccaggtgtggtggcgcacacctgtaatcccagctactcgggaggctgaggcaggagaatcacttgaacccaggagatgtaggctgcagtgagccgagattgtggcactgcactccagcctgggcaacagagtgagactctgtcaaaaaaaaaaaaaaaaaacgtcagattcatgaaccccatttgctaagaagatttgctcaggtagtcacctgtacccctgtgagccaagattgcaacagtacatgctaagagcagtaagaaggagattgtaaagcttagaaagacctgacaggccaggcgctgtggctcacgcctgtaatctcgacacttcgggaggccgaggcaggcggatcaccaggtcaggagttcaagaccatcctgaccaatatggtgaaaccccgtctgtactaaacatataaaaattagcttgacgtggtggcccgcgcctgtagtccagcaactcgagaggctaaggtgaggcggaggttgcagtgagccgagatcgccactgcactccagcctggcggcagagcaagactccgtctcaaaaaaaaaaaaaaaaaaaaaaaaaaaaagacctgacaagtgaaagctactaatattgccattatcatttaaaaaaaccccagacacaggtttttcagggagtttcatccaaccaggcaggtctcagaaatcagaaaagaaatggaaagggtaggaaatctggagtttgacaattctgagtttgaatttcttgtgatgggatcttgggcaagtcatttaacctccctgagtatcatttttttcttttataaaatgaagatttttctctcttaaccttccagagctgttttaaggattacaaatcttctactgaaaggcgtagcacaggagctgtgcttggcaagtgccaaatacaaggcattaattattattattagaattaataataatatcccctccctcttacacattctttgtctccgggtggattaaaaggtggaaggagaggctaccaacaccatcagaagagaggcttctctctaagtttcatttcccatctcctccaaatccgcatccctcccaaacgccggacctgtaaggccagcagggtccaagacacacatcctttgcccagcggggaagattaaagctaaagctcagagagggaaaacatttcctaagctcgcacagcgaatcaggacagaaaccaggacgagcctcggaatccctccattacctccactttcacctgagcatcacagcccgctcgggactcagtttccccacctacgtgaccacaccacactaatcagggtctccttttggagatctgctcttcttctcgaatgggggcgctgcaccatcggtagaacagggtaggtgggggcgccagaggtgaaggggacctgcaggctggggtcttccccgcccgggtcagcggggtccctgcggggctagtctaagcgcctattattaccagcccccggggcggcgttgcactgcgcaggcgcgggcggggcgcgggcgcgcgcgcgagcgagcgagggattccctctgacgtcattgctaggataccaaacaaacactccgccgcgccggccgagctccttatatggctaattgcgtcacaggaactccgggaaggcggggccgggatcccctcccgccgagtggcccggaacgcaacccccgagacccccagggccccgagggtcatgcaagtgaccagatcgagtctagaacagacctcttgctggacagtgcgggactcgatttggcggggccggagatttggggaagtttgtccagcaaggggcgggtgacgtaagcaggggggcgggtcccgggcatataaatacaggctggcgggtctgtgcttcattcataagactcagagctacggccacggcagggacacgcggaaccaagacttggaaacttgattgttgtggttcttcttgggggttatgaaatttcattaatctttttttttccggggagaaagtttttggaaagattcttccagatatttcttcattttcttttggaggaccgacttactttttttggtcttctttattactcccctccccccgtgggacccgccggacgcgtggaggagaccgtagctgaagctgattctgtacagcgggacagcgctttctgcccctgggggagcaacccctccctcgcccctgggtcctacggagcctgcactttcaagaggtacagcggcatcctgtgggggcctgggcaccgcaggaagactgcacagaaactttgccattgttggaacgggacgttgctccttccccgagcttccccggacagcgtactttgaggactcgctcagctcaccggggactcccacggctcaccccggacttgcaccttacttccccaacccggccatagccttggcttcccggcgacctcagcgtggtcacaggggcccccctgtgcccagggaaatgtttcaggctttccccggagactacgactccggctcccggtgcagctcctcaccctctgccgagtctcaatatctgtcttcggtggactccttcggcagtccacccaccgccgccgcctcccaggtaagtttttgatagtaggggtgctgctttgtaggttttattttttaagtcaagggtgaaaagaataaaccccaacccccacaaaaaggcgcatcagaaccctagatctgagatggaaaaggctcacagcgcactttgcaaactgcaaagagtcgggagatgtttgcaattggttgcgtgcgtggagcgcaaggagggaacgcggcagggagggtaggctttggggcgaggtgggggtggggtgggtaatgcgctgctcaatgcaacgtgtatgcggtagcggggctgagaactttgagccggccccgggactgccccctgctcgggtcccagacctgaagctagcgcagttaggcaggtgggggaaatcccggggaagcttccagcagtctcttttcctttcctcctccttcggagcgcccacttcggtgccgggtcgccctccacccatcgggaagaggggcctcgaaccctcagccgcgctgcctccgcctcctgcgcggagacgtaacgggggacccgtgcgtaacggctgacgcgctggaatcctccgtctgacgcggggcacgcacggcgcgcggcgcccccttcgtccgccccgcccctgacgtcccgggagcgttctattttggaacgccggggccacgttgctaagggagggggcagcccggcgtttcgattggccgccggggcgcacgccttggccaatcagctttcccttcctatttgtagggtgcattttccttcccccctctctgtccccggaacccgtggttccttggcggctgggtctcttttcggcgcctctagaggcagagggaggggatccctgtcgtgacaagagcgcctgtctgcgacccaatggatctgcgaggcccttgcggggatctagtccctgggctctcaggagaagggggtgtctgcttgtgtgctggcgtttcttggagagatacggtggctgtcaccctcttctccaggcacacacagacacattcccactccctctgctcctcatgcccggttcctccggtgtgtcccaagacaggactagaaccgcgaaccgaagggcaaccagccaggtggtctccaggagctccgccccctctgggttcccaggactctgattggtcggcgagccagcccttccctcaccacgccccccgagagagtagttaagccttcagagcagttccaggagtccatttacgggaggggggagatgagcgctgctgaggcttgggggctcaggtcccgcaccattccccctccgcgacaatctgagagagctccagtggttacttttatctacctgtccgttcaccctaaactgtcactcgtcagtctcactctgagaagagacagtaacttgaaacgttgttctaaactcctaggcccgtcccccaaacacccttttgactgggacccccgcccctgcatgggacctcgcgcagaggggggtgtgtatgtgtgtgagtgtagaggaaggcttggcctaaggcctctccttctccctccccttgcctctggggtgggggtggggtgttgtggctgtgtgtgtggctgtggctccgtcccgggggttctgtcacccggctgtgtccagcctcctctccaccccccatacctaagagtcaccaacccggggtgtgattcaccaccc

SEQ ID NO: 65 - DNA, 6154 bp, Homo Sapiens
aaattgtaattctaatgcaattgtgagaagctcccttctacagaaacagcacaggaagaacagttaataaatatcactctggtatcacacttaaaaaaatgtatttattataccatatggttaatttataccatacactatttcataccatatggccatagaaaaaaaatcaggtaaatataaatggtcagatgttaatgtttaatgccaaaagtacaagtacattcatttgataaatatttaataagcactaatcatttaccagaatattctattttgagcacctacaaagtattaatactacaaatacaggatgtgaaatttgttcattccccaacatattttaaagactaaaatctacatcctatgttcaagatgtttgatggcagtaaaaaattaaaaacaacctaacaccccaaaaaaatgattagttaaataaatcacagtatgtctaataatacgtagaaatttttgctttaagttttttaaaatacaaaactacatagtgttataaaagcattaaaaaagaacagatggaatacaccaaaatgtctatagtaataatatcttagtggcaaaattactgatgattttttactttttgtacttatagttttctaatttttgataatgacttgctttccctttgaaatcagactttttttttagatgaaatttccctctgggaaacttttatttaaaaaaaaaaaacctacattttactgttaggtaaaataaatcttcagaataaaatgtgtcattacacacaagcaaaccttttcattctttccatgtaatttgcagtaaaagatccctttaagtgaatgtaaggaagacttcaaataaaagaccacagcacatttcagtttccactgaatatcaacttcaaatttaaaattatttcttggaggaatttattttatcatctgtaatactgatatttacattcaagagatacattttttaatcaatgtcaccctcccagccaaatacatttattatcagttcagaaaaaaatgtagagggaaaactactgttcaccactaaacattaaaacctgggtaaagaggacagtaggaaacacttgttttttaaccaagtaaaatgagagtatccttatagtttcagaagatatgaatatgctttccaattactggcaatttatacttaaattcagctagcctagaggttctcaaggattggtacatgggaactgctcaagacatgtgccaaatacagaaatccatggccctcgctctcacttactaaatcagactcttcagggggtacagttccaaacaatctggccctttcaaataaaatagaagggtagagattttacttcacaaaagccttctttacagaattgcaaacggttctaataactctgcagcaaagttcccaagataaacaattttataatcagagaattacaatttcataacccctacttattacttcactcattgttccactctgtagtagtcttcaaacaagatacaattcaacaaaactacacatctattacagagtaaaataaaatccagaggcacctgtgcctggttaagacaaaggcatatccgattcctggagaaaacagacagcagatgtgacccctagtatttatccattaaaaacaatgtatcctaaaaataaatttccatgtcaaaggaaacaaagatgtttataaataagaaggaacgtggaggtgtggagaagaaaagaggaagcttcagaaagttaagtaccaaaagccaggaaacaaggcaaaatgaatggtaactggaaacaagggaaacagaataaactaggaaattgaagtagagaagagctttctccttagaaatcaagaagctgggggaaaggaacagatatgagaggaaactgatctaagcaaaaatgcatactgaaaagtggaatgattttaagaaacttaaaaatgagaaattttagaacagatcaaatgatggtacagaacacattttgggcatgtaacaaagatgatataaagagtagaaaacaaacattatcataaacaagctgatgctgaataaagcaagcatattggatgaatttccaaagatgatgatgcaaaaaaaaaattgcagagagaatgagatgttatgagaattgagaaattagatgttaatagtaagtagcaaagagaacttcgagcaaagtcaacagagtaagtcacattacctaatcaataactgtaaaccacaattattataccatatcttatttgtaaagcataataaagtattattttctgtaataaaataccaaatatttgtaataaattttatgtaataaaaaaacgtaaataatttgacacagtgctaagaggctgactaatgcaaaaacaggctgagagaagcaaggactggagaggaaaaaggaaaaggaaaaaaataggacaaaaaggaggacaacactaagaaatcaatcagacctataaaaatgggtaggaataaagaggtgtgaatgcacaatggacgactagccaaaaagtgccagtagtgcaagcgcgaaaagagccaagtgaaacctgatggaatcttgacagcttctgggctcagaaaacaagtagctccaaagtgtccaggaggatttgtgaagataacaacagacaacaatgttagggagtggtgagatcaagtacagagcctcaagaggaccagggtaagagaagtgcaaaaatgctcttaagtgggagctggggttagaaggcaggcaggtccgacaactggaaaatgagcgggcggtagatgggaatagaatgggggttaccaatcagcgacagagcgctgacaaacattaggaacagaggaccagagaccagaaaaggcatcggaaactgcgatttaggattgaaaaagtaaagactaaatcaaaataatttgctgggtaaaacaggtgaagagaaatccccaaatagaaaagtgaaaaagggcagcggactgagaaggggggcagtccgggagaggagagaggaaatgatgagccccatcatccccacgaccatgtaagaattacacgcgacagtaactcgggctgttgtctcagccccagcaactaacctatatcctccacgtcgaggccgccgccgcccccaccccacagagatgcagagctggatacttcagccaatcgtgaccttctcggaccaaccctgagtttcgccccctattgatagcctcccgctcaaccaccgctgccccaatccccacatctggggtgggggccagggaaaccccccgggccattgtgtgtgtttacgtaggaaggcgctgcatgacggagagggacacgggggcgatgcccacctcccagcccgcggagctggcccgagaaggtggctgagggcatcaagcccccaccgccgcctctttccaaaataaacaccagccagccgccgagcccggagtcgggagggcggcagggtggcgccagcactcacctcctccggaatggcagggtccgcagccgaagaggccgcggcgccggcgccggcgccggcctcgggctccatgtccccgttgaacagagcctggcccggctccgcgccgccaccaccgccaccgctcagcgccgccatcttataaccgagagccggggcccgagcggccgctgtcgggcggggagggggaagggaggcggagagctgggggaggcggaggcggaggcggaggcggaggagcggggggcgcggggggcgcggggaggagcggcccgggcggcgccgcgggcggagggcgcctgggccacctcaggtaccggcccgcggccccgggcgcagccgagcctgaggggattgggggaaggacgctaggcgggggtgcgggggggagcgggggaagggggcggagacgacgagaagtcgccgcggcaacggcgtcacccgcgtgtcacggtcgtgacgtcaccccggtgcgtgacgtaatctgaggcgcgccttcgcgccgtcgtccggggagggttttttcccttctaaccacccgcgctctcacactttgcctccgctccgccgtttccatggctccggtttcctactttcctcttgtctcctccgtcctcagcctgttctgtaatgtgggatttactagaagagcagggctggtgttcgaggaggagaagttgaaatcctagagggaggaaggcggggaagccaatactacttgctatttccactgcaatgaacgtctctgtgtcatcaaaataagaacttcaaccccaaggttgaaacagccaagcagaatttgatggaaatatatttaggaacagctaaattagcagtgcgacgcgtgttttcttttcattgaagaattcagccagttaaaacgagtctaaatggaagtctgaaagctttttcttcattgttgaggaataaaatatttcgtgtatttttcgttttccagattcattcatttaacaaatatcagttgagcactttccatgccgtagggcctgtacaaggcacatagcattctagacatctgaagcatcaaaactaatcatttttattttgaagaaaatcactcaaaatattttatgtactttgtgcctttcatgaacagaatattccaagcattctctgcaaaatacgcatgaaaacaattgggagagaagaggtcaattatctttgagaagcccaattacagaatgaaattcaattcattattaaaaatacatggatctaataaagaataaataattggaaaagaaaagtttaaggaagagagaaacgggaatgagaaacaattactgtgggctcccaatggcctggagtgaatcaccaaagtaacctaaacatgaagtcatgaaaaactaagtggattctgccttttagtacttcccatcatgggggaagtcaccagcgacctccttactgtattttggatgattcaagaaatagaaaggtgtcctactgacttctgaaacagggtgtcttcatattgattagggtcaccgtaagcctgggagctgatgcttactctcaggtaaaggatgctgtgtgaggctgcttgatgaatgagaatactaacattcttctgcattgaaaaaatataacctataagatgaacattgtaggccgggcgcagtggctcacgcctgtaatcccaacactttgggagtctgaggcggatggatcacctgaggccaggagtttgagaccagcctggccaacgtagtgaaacctcatctctattaaaagtacaaaaaattagcctggtgtggtggtgcacacttgtaatcccagctactcaggagcctgaggcaggagaatcatttgaacctgggaggcagaggttgcagtgagccgagattgcaccactgaactccagcctgggcaacagagccagactctgtctccaaaaaaaaaaaaacatgaacatggtatgctttgttaacttcattgtacattctcctccaagtaggaaagtttctatgaggaaataaatttaaatcaaaaagtggcttggcaaatgtagagtaaatgatcacaagggatgatgtcatcaagctaaactaatctgaagcaccctttactataaggacatacttagaagcagactgaaatagcaccattagccagtcatggcaccttttcccctttcatcaccctttcatcaccctttcatcagaaacacaactggcaagatttttgttaattctctaactgtcctatttcatttttaaaaaattagctgctaaaaatgttatatcattataacacttccttataacattaaaagttttaaaggcttttatcctcacattggttccattttgaattctagccttatttgtcagtatcagtctgtagttcagatcttccatgattatttctccacaggatgactggtctcatccatttaatattgattcttcttagcgttctactcatttgacattttctgaccttgccttaaaattctggatatatcctgttttacttccttaggccattctaaagtcctacagtatccagatgagaaacgagagaaagcataagctttggagtccaaagatcaggattttagcgtcagcactccacaccttagctatacaatctcaaagcaggtaagcttaaatccctgtttgttgttttgttttttaatctataaaatgaaggttataataatgctag

SEQ ID NO: 66 - DNA, 6154 bp, Homo Sapiens; identical to SEQ ID NO: 65

SEQ ID NO: 67 - DNA, 6217 bp, Homo Sapiens
atgtctccatttacatacatgtggtagtttgggtgtttatgcatatggatagatgcacatatatagagttcctgtgttgtctagcaattgttttaaaatttggacaattatctaatttctagggtaaggtataaattatggtagggaggcctaccctaattttcctgttccttttcccccagtctgcagtccaataaattgacagccttaaaagtagaaaaactaaagaggatgagacctcttgcttgatcctaggtgaattcttttctgtcagttaggtaggaagtcctgacttgaaaactagttctgggcactgccccctttactgttctctgggtatcaacccctgtccttcaattttagttgaactagtggatggtgataccacaggctcaagacagctgcatttaaatatcagtgaccacaggccacatcaaggaaacatctgcaggcaacccagggcctgggaaggagccattttcagtcacttgtaagacagcaggacctgcagactacagcacaatcaaactcagacaaaaccctgaaccagtgagaaccattaggaaggaaaggaacagaaaatgaaccaacctgagtgttaggagacttgcatctagtcctgactccggtaccaaccgaatgcatgtccctggacaggaaacctctctgagtctcgatttcctccgtggtaaaaaggagagggttaaaccacagggtcccgagggtcccttccagctgtcacattctggagcgtatgagatgaggtaggcacacaaagtggacaagatgtggctaagaaaacaagctacacatcaagctcatctgtagcataggtgcttaagaaaactttgctgctgtgtaatattagaacggaaggttggtttccagtaaaatgcattaactttggctcaaaccaagatgatgggtaccgggcatgggggtggggaggcagttgaagatccactgagctttgtctcagggcagccctgctcatcgtcctactttaccttccaccacggtgctcaagcccacactgagagagaaatttccagctgcaaaagggagaagagaaacgctggaatactagtatcggacgttaggacatggttgtggtgttttaaaaatcatttcatcatctggagtttgaccccgaggggagtattttcacccttcagccctctgaaagcattcactagcatctgaatattgttctgagtttgttggagcagtgaaatctggtgagagagaagggtggaggaaggaaggagctgttgtatttggcggctggactcaggtagaggaaactgctacaatcccgggaaagaacagaaaagtagaaagggacgagttcccacacgcagccaatgtccatggccttaactgtgcttgggaaggaagatcctgggccaggggtgtaccctcgtttttcaaaactaaacgtgtctgagacagctacaaagtttattaagggacttgagagactagagttttttgttttttttttttaatcttgagttcctttcttattttcattgagggagagcttgagttcatgataagtgccgcgtctactcctggctaatttctaaaagaaagacgttcgctttggcttcttccctaggcccccagcctccccagggatggcagaaacttctgggttaaggctgagcgaaccattgcccactgcctccaccagcccccagcaaaggcacgccggcgggggggcgcccagcccccccagcaaacgctccgcggcctcccccgcagaccacgaggtgggggccgctggggagggccgagctgggggcagctcgccaccccggctcctagcgagctgccggcgaccttcgcggtcctctggtccaggtcccggcttcccgggcgaggagcgggagggaggtcggggcttaggcgccgcggcgaacccgccaacgcagcgccgggccccgaacctcaggccccgccccaggttcccggccgtttggctagtttgtttgtcttaattttaatttctccgaggccagccagagcaggtttgttggcagcagtacccctccagcagtcacgcgaccagccaatctcccggcggcgctcggggaggcggcgcgctcgggaacgaggggaggtggcggaaccgcgccggggccaccttaaggccgcgctcgccagcctcggcggggcggctcccgccgccgcaaccaatggatctcctcctctgtttaaatagactcgccgtgtcaatcattttcttcttcgtcagcctcccttccaccgccatattgggccactaaaaaaagggggctcgtcttttcggggtgtttttctccccctcccctgtccccgcttgctcacggctctgcgactccgacgccggcaaggtttggagagcggctgggttcgcgggacccgcgggcttgcacccgcccagactcggacgggctttgccaccctctccgcttgcctggtcccctctcctctccgccctcccgctcgccagtccatttgatcagcggagactcggcggccgggccggggcttccccgcagcccctgcgcgctcctagagctcgggccgtggctcgtcggggtctgtgtcttttggctccgagggcagtcgctgggcttccgagaggggttcgggctgcgtaggggcgctttgttttgttcggttttgtttttttgagagtgcgagagaggcggtcgtgcagacccgggagaaagatgtcaaacgtgcgagtgtctaacgggagccctagcctggagcggatggacgccaggcaggcggagcaccccaagccctcggcctgcaggaacctcttcggcccggtggaccacgaagagttaacccgggacttggagaagcactgcagagacatggaagaggcgagccagcgcaagtggaatttcgattttcagaatcacaaacccctagagggcaagtacgagtggcaagaggtggagaagggcagcttgcccgagttctactacagacccccgcggccccccaaaggtgcctgcaaggtgccggcgcaggagagccaggatgtcagcgggagccgcccggcggcgcctttaattggggctccggctaactctgaggacacgcatttggtggacccaaagactgatccgtcggacagccagacggggttagcggagcaatgcgcaggaataaggaagcgacctgcaaccgacggtaatgaccctttcccaaccatagaatgtgtttggggccccgctttgcctgctggagggtgttaaccttagcttgcttttcggcgtattctgatttagctttgggagagctaactttattggtcttaggtgttcagtgctacctggcccactgcttgtctgtttgtgacttttaagtcagaaactggagatggtaagatccgataatttccctaacttaatacatcgcggtccctctcactagcaactcctaggtatgtgacaaagttgggatgtttatcaacggtccgcctcctggctagggaaagagctctggggcggagaatgcactttctgttttttgaaaacaacctcattttgtgcccttaaaagccactggggatgacggatccaggattgtgggtggaggtagtgggtttttcatcccctgactatggggccaacttctgccagccattgttttttctaataaagattgtgtgttctttttaaaaatttcccctgcgcttagattcttctactcaaaacaaaagagccaacagaacagaagaaaatgtttcagacggttccccaaatgccggttctgtggagcagacgcccaagaagcctggcctcagaagacgtcaaacgtaaacagctcggtgggttgatcactaaaggagcacgcactggaacccggggccttcagacctcacgatacctgatcttactggttgctggcaaattaaaagcttatggggttttgttttgtttatacttcgtgaggtcaaaaaagtagcaatggggaaggctggggatacggtaattcctcagagtttctatgcccagagatactttctcttcaaactgttgaccagagcagctacttgtaacccaggccccatcgggtaggaaggtcgtttccctgtgagtcccactaaaacgtgttgggagcaataggttctttgcccatccgaacaagaactagggtactccctcagtccgaattaatgagaattaatttcctagaggttcagcttgagtcggtaacagattttgagccatacatggaaaaatggcaaatacatgattaagtttcaattttgagggggaatgtttggtagaaattgctcatctttggttatgcaagggattagagatgtgaataggatggtatgttgtgttctttgacattttaataaactgtcactttccctgttgtctcctaagtttggagagagaaggaaccagtatttgcaaaaaccaaatggaaagataaaaaagttactaaagtttctacagaatttctggtaacactgaagttgcaaagcagaagttaaattaactcttgtcagtaagcaatccaggaacacgtcagccagtgtatgctaattgtgccgtaacagggtgatttggatatttgtaggggaaatgggtagtaaatatcaagactggtgaccgtaggtcagcccagcacaaaggaagtggagatttttccatgcacaagaatctgatcactgtaaatagctaatttgaataattcagtccccagataaccaacatgggttggttattcataataaactacatattttaatagtttattagcttcctttagaccaagactgtgacctctttattttctaaagcacacacgtagtttagcatatgaggcgataaaatattgatgttaactttttaaatccccagttataaaaattttaaaataacagggattaaggtgagattcaggtttgttgtgtctttaaattgtatatgtgacttcacatatctttttcagcgcttatacaaaacggcactatagaacctccattttacagcaccatatgaagtgggaaaattaggtgaaaattttcctgaagcaaccttaacatgcgcagcccttgttggtttgtgacttgtggcctagctcatcagatgagccacgagaatcagacctggattttgatctggccctgttctgacatgcaatgaggcatttgtaggatttagtaatattgctagttcaaagaatactagaaatattagtaagaacctattcaaaagtattcatgagtattttctgcatatgaatcaggaattagaatattttgaaaatgatgttaataaaattttcctctggaaggcctttataatttttattcccaatcatttttcaaatttagaaagtttaatctgtcacaggagaaaaaaaattaaaaattttcaaaaatttagaaaatttttacccgtaagtattacagtttcctaattatcctatttatttcccacttgcctttgacctagattatttagagtagggtttctcagcctctgcactaatgacattttgggccgaataattctgttgtaggaggctgtcctgtgtgttttagattgtttggaattatccctggcctctcacactagatgccagcagtatcctcctcccccagtgtgacaacctaaaatgtctccagacattgccaaatgttccctgtggggcgggggcaacattgcctactgttaagaactactgctctagaccaaagaacacagcacagaggaaaggaaaaaaaaatccagttaagagaatgttaggtggagatgactatagtcatcaaacttttttccccatcaagtatttccaagctaacatagtgacaaaataattcctgtactctactggtaacgttaatctagtgctcttcctttaattcttccgttttgttttcttttgcagaattaagaatatgtttccttgtttatcagatacatcactgcttgatgaagcaaggaagatatacatgaaaattttaaaaatacatatcgctgacttcatggaatggacatcctgtataagcactgaaaaacaacaacacaataacactaaaattttaggcactcttaaatgatctgcctctaaaagcgttggatgtagcattatgcaattaggtttttccttatttgcttcattgtactacctgtgtatatagtttttaccttttatgtagcacataaactttggggaagggagggcaggg

SEQ ID NO: 68 - DNA, 6196 bp, Homo Sapiens
tttgtatttttagtagtgatggggtttcaccatgttggtcaggctggtctcaagctcccgacctcaggtgttcccacctgcctcgcctcccaaagtgttgggattacaggcatgagccaccacacccggccagaaaaacttcaattatatctgaaatccactcacattatcataagaaacttacacatatcaatgaaaaaaaaaagagatactgaatttttagaatccaatttcaaattgttcacaatttaagacaataataatagttgtaaatgtattacctacgtgtctgtacagcttctcacctgaaagttattatcaaaagtataaagaagttgttgttgaaactcttaatctgtatagctgtttcaacatgaaaccataaagaaaaagttatgatcatgaaatcaggctcaagttcctcttaactttaaaaatatctcatttaaagctttattcaaattatctactttcaatactttgtattttattgtttttttttaacaaaaaacaacatattttcgccaagtgacctatagctatgctcccaatttattgcagttattttattcacaaaattccatattttatgaatataaaaaactgagaaacaatgccccatatcatattaattagtctagagcacaattgtggttacatcggttaatgggccaacagggttacctacccattgttaataattttctttctgtgagtaaaataatttggatttccaaactacaaattacaaacccattaatgtcccaacctatgagatggagcaagcttcttcaggtaaactgcaatcggttacagccttatttgcaaatgcattttgcttgcttcaaacagcttctagagagctgtttcgtaatgtgctttaggatcacttccagaataaccccctatggttgtgtgcactgtggctcaagggacttctcattggtaggtttaaaactcacttagctcgcccctagaagagcaggattgtttttgtaagcctgcataaaaaacaaaaagccagaccagaaaaatgcaaggagtctaggcaaggtggctcacgcctgtaatcccagtactttgggaggctgaggcgggcagatcgcttgagctcagaaatttgagaccagcctgggcaacatggcaaaaccccgtctctaacgctacccaaaatacaaaaattagccgggtgtggtggcatgcgcctgtagttccagctatctgggaggctgaggtgggaggatcacttgagccagggaggtggaggttgcagtgagctgagatcgccccactgcagtccagccagggcgacagatccagaacctgtctcaaatacatcatacatacatacatacatacatacatacatacatacatacatacagggagtccacagactttttctttcttttcagttgctctctcccttttggcctccttgttaaaaactctacatacgttttcaagtaaaaccttctaatttaccccaacagatgaacctgctctggattaagccagaagcaagagagaaccctgctagaccagccatttcaccagctccctaaaatgcagctatatttgggagacttctgtgtaggaagtaaggctaataatgcagttcccagaagattaggtgtggttttaatgagctcacacaaggcgggtggggaggggagtggttccatggttctatttttaaaactcgtgtaaagatcatcctttgttgtctaaacacggcagtagagaaagagacgtctctgtttctcacgttacaatcagaggtaacaacctgtgctaacctggtttccagcgaaaaggccaaaagtgtactgataacttcggcttcagctgagactgggataacccgcttgagccagtgccaaattccacccatccggcgcgcaagcgagcggggcttctcctccccaaccccggcccaggctgcttctgccgggtcagtgctgccgggttggtggaagctgccttccctccctccaagatcagaaaggcggagggttcaggaaggggttctcctctaggtgcaagggactgcctggatatttggagggaatggcaaagccctgcttcatgaggtgaatgaatataaattaaatcgctctcgtatttaaaataacttgacggatgacagtgcccattcagtcaatcggccctcgacgttggatttgctacctgggcttgttgtctgcgagttaaggtcctgcaaaaagcccctggcttgtcacctcaactaacctatctcctccagcaattctctcaatacatcctcgggttgtattgtaattcattttccatagcagaaatgtggagggctctagagaaggtacaaggcaaattttttttttaaattttatttttggttggccgcggtggctcacgcctgtaatcccagccctttgggaggctgaggcggacgaatcacctgatatcgggagtttgagaccagcctgaccaacatggagaaaccccatctctactaaaaatacaaaattagccgggcgtggtggcgcatgcctgtaatcccagctactcgggaggctgaggcaggagaatcgcttgaaccagggaggcggaggttgtggtgagcccagatcgctccattgcaccccagcctgggcaacaagaacgaaactcagtctcaaaaatttttttgttttattttattttttaaatttgagacaaggcctcgctctgtcgcccaggctggagtgccatggcgcaatcatagctcacggcagactcgaactgctgggctcaagggatccccctacctcagcttccgaggagctaggatgacacgcgtgagccaccatgcctggctaatttttagattttttgtagagacggggtagctatgttgcccaggctggtctccaactcctgacctcaagtgatcctcccgcctcggcctccaaagcgctgggattacaggcgtgcgcaaccgcgcggaggcaatctagaaactgcagagggagcacggacctgggcactgggaagaatagggcgtggacttggagtgtgaccgcgtttgaatctgggttgtgcctgggacaccccacctcctgggccgtaggtggggggggagagagagagagagagagagagagagagaggatgtcgaccttacatggctcctagctctccgcgctctagccgaatgcctggttcctagtgggtgcttgatacgtgggaaatgtagggggagggggtggcggggcattgggaatgtcccgcagagtggatttcgggagagtggcgcttttctctagaactctcttccggttacacctggagtaaaagcttgacactctagaaggaaaaccccagatgagcagctaggactgagggttagcggtaggcgggagcggggagatagtacaagtacgcttcctaatgaggcggtgccgcaaaataaccaattttaataaagactgcagagaagaaaaccaggttctgctggcggagtgcacaggctcccagccgagcgcccaacaaccaggttccgggcccaccctgccgcagcctcttggaaatctctaagttggaatgtgtgcgtgcgcaccacgggtcactgccctctttgtgtgtgaatttgaagcgaaatctgggcgaggcggggccgtgctactagcaatcggacccacagtcgcggttccaagaagccccgaagcttccccggcttcccgcagcactgctgggagggcacacggcgcctctgtccccaccccagagcgtggggcgcgcggaaaaaggtctggtgactgccctccccgccgccccccgggagcgtgccctcccgccggaccctgggactccagagaagcgccgagggcgcgagtacactaagatatacgaccttccctggggaccgggaagggcacaaccacctcttgcaactccgccactaagacgccttgggtcaccaggcccgggggaaaactcgtccccgtcccaggctctcgattcgggccgcagctcacgtcccgcgctcctccctgcgcgccgctctgctcctccctagtcccgcctccagctccgcccgggcgcccagagggcaaatgaggggcggcggggtggcgggtgggggggagacgcggaatttcccagcgcgggggctctggcttaccctgcaaccgggcagtctctttctgtttacggagagaaaggggaaatggaaaagtcggggaggcggtggctggcgtccgctgcgccgcccctgggcaggctcagacgccgtgagtcaggggcagagcagggcggtctgagcgtgcgggcgacgcgggtctcactcgtccgctccgctctggactgcgcgccacgctctggggtccggcgccctggttcctgcttctgccgctgccgccgccggatcccagtggcccggcgtgctcggctcccacaggcctgcagccagcatcgcaccgaaccttcggggggccgcggctggagcgctcggccggcgtgggagcgccaaggccgcaggtaatccagggttgggggtctccggcgtgtctttcgggtcgcgtcccgcctgggtgccccggggattcccatgcagaaatggagggtgcccccagcagaggggaaaactctggcgtgggaagaggtgggggcgtgcccacagctgcgctcgcgggtcgccggctgcaccaggcacagctggaaagcaccttgcgcaagggtctcacggggtgcagactcgcgactcctcccccttcctcctccttcccgtatccgcagcgccagggcagtgctggtctgggcagtgcgcggggaagcggggacccgctgtcactgcgcctcccgctgccgacgccgcctggacggccgcactctccctgcccgagacccggtgagtgcagctcggaggctggaggacccgatcctcccaaatgctgggtgctttgataatttataagccttttaggctcccttgacttagagaaccaggaggaaaggagtgggagtgtgggttggcggagcccagagacttgtgaatggctggaactaaattcaagtttgtaacccggactctatcccatgactaaagaggtcatagcagaacacgaaggctgggcttttggtctaagaaagaatactaggagaaaaaaaaagttattttcacggaagttgttttcgagcgatagtgcatgatcaggactctgaaatttttctagctctgggcggagaaggacgcctagggattgtctccatagttaacaggggaaggccaccggctgcctgtaagagagaaacgttgcgatgcttgtctatttcacttttgggaagacaagattaaaggctgctcttgataaaaaacagggacagaaaggctcttgcagttgctttacatacctgtggcctgagtcgtttgtgccaaggagagtgtaatccacttccagctgacgcccccagctctctgcgacggattgaggtttgtgtgcaggacgtctggcatacggcccatgaggactttgtcgtgtaaagcaaatgggaacgttgaggcatgtagaggttttgaagcagagtgtcggtccttccttccatacgcctgaaacgcataatccggggctttttgagagcaaaaacatagtcagaaatgtgccctgagggagaatgtactattttggcacacatatgtatatatgtatatataatttttaaattttttttgagagggggtttcactcttgtcgcccaggctggagcgcaatggcgcgatctcggctcactgcaacctccacctcccgggttcaagcgattctcttgcctcagcctcccgagtagctgggattacaggcgcccgccgccacgcccggctaatttttgtagagacagggtttcaccatgttggccaggctggtcttgaactcctgacctcaggtgatgcaccctccttggcctcccaaagtgctgagattacaggcatgagccactgtgcccggcctaaaaaaatattttaaatgagaaataacacaagtaatagtcattctttgttaggcagaagcatatgctgttatgctggccattttcattcacacttgccaggaaacactcacattttgtttctgtatatggaggcagccaagagtattatgttaatgtttaggaagagaatttcctcgtgattttattgctgatttctgaaataattcagtgtaactaattttgactgtat

SEQ ID NO: 69 - DNA, 6191 bp, Homo Sapiens
ttagtacatacttgctaatatagcatacatgaaggctttatctataatttttttggccaagcagaaattttggtattactcaccctaacaaatttccaagacattatgaaatagaattttaggtcctgacatcaccatttgtctcaggttttgaagcgttgctggacaagaggggtaaaacacggctctgccttggattcaaagttggcctctcatactagcaagtataccttggtatcctggtcacttctcccggccacagcatcacattgctataaaaggcagatacaagtattaaccagctcacaggttatcagataagcttagtctgaccaatgcttaacacagcaactgggccactattgtcattcctgtggtggtggcacacacacccagcctctgtccgggccatggtctaggaccaccctccacagaggctgtgagctagagccctaactgtgcagggccctaactatgccaggctacttatctctcttaagaggacttcattagtgcctgctcggccatacagttttttacttaccaagtaacacagttatcagcacactccaggtactagccaaggactacaaaatcaacgtgaatgtcagcttttgtatcaaaagctcaaaggagaaactcaaactttacatagatgtcccatgaagatgttcagcaaacccattcttctctgttccctggaatccatcccagtattgtgctatgtgtgtgtctagtaattctttacaaaaagctctgtttcttgtgatgctatcagatcacattgaagaatatacaagccgtactatgaaggctgttgtctcatatagtcctaacgtagtgagaactgatgttcttacatgctgtctttttgggcactcaaagaaattcctgtacagtcttacaaatcagttgtagcttaaattgatttgtgttgtgacttgtacacacaggtcacattcccttgacagaaaatatagtttaaaaccaaatttgcagcccttgttaagtgaatgcacaggactttattgtattcaggtcttttattgtaagactcactcctgtcttcattttatgttccactgttgtgcttcccatttgcctttctctagttttgttttctgtgtttctacggactgctctcagcccaggtgtgcaggaagcacacacatgcctgcagagccttcatggcctctgcattcagggcatgacttcaacgcacagtggctgtactgatttgttaaaacaaaggaacagattacttctcctaattcacagggaagttccaggttgtgcgggcagtgagcagacctgtgtctgtctgcgcttgccctggtgaaaaaccccaccgttcaggctgcagggtgcgagacccaggcacaaacattttgctggatgaggaggaaagatgtaaggttgctccccttcagagacagcaaagggcaggtctgtagcttcacttacttcaggattgtgatttttgacagagccgagagatcagggttgttgaaccaggcctgaaggtcctagtgaatctcgtgaagagaggaggggtctggctgtaacatggacctagaggacatttttactgcaggagaaggaacagtggggatggggtggacttgccaaaggaatatagctcaagttcctgcagcccaaaaaagctcagtttcttttggccaaagcttccgcgagtttccctggcatttctcctgcgggagctacaggggcagtgggacacttagcctctctaaaagcacctccacggctgtttgtgtcaagcctttattccaagagcttcacttttgcgaagtaatgtgcttcacacattggcttcaaagtacccatggctggttgcaataaacattaaggaggcctgtctctgcacccggagttgggtgccctcatttcagatgatttcgagggtgcttgacaagatctgaaggaccctcggactttagagcaccacctcggacgcctggcacccctgccgcgcgggcacggcgacctcctcagctgccaggccagcctctgatccccgagagggtcccgtagtgctgcaggggaggtggggacccgaataaaggagcagtttccccgtcggtgccattatccgacgctggctctaaggctcggccagtctgtctaaagctggtacaagtttgctttgtaaaacaaaagaagggaaagggggaaggggaccctggcacagatttggctcgacctggacataggctgggcctgcaagtccgcggggaccgggtccagaggggcagtgctgggaacgcccctctcggaaattaactcctcagggcacccgctcccctcccatgcgccgccccactcccgccggagactaggtcccgcgggggccaccgctgtccaccgcctccggcggccgctggccttgggtccccgctgctggttctcctccctcctcctcgcattctcctcctcctctgctcctcccgatccctcctccgccgcctggtccctcctcctcccgccctgcctccccgcgcctcggcccgcgcgagctagacgtccgggcagcccccggcgcagcgcggccgcagcagcctccgccccccgcacggtgtgagcgcccgacgcggccgaggcggccggagtcccgagctagccccggcggccgccgccgcccagaccggacgacaggccacctcgtcggcgtccgcccgagtccccgcctcgccgccaacgccacaaccaccgcgcacggccccctgactccgtccagtattgatcgggagagccggagcgagctcttcggggagcagcgatgcgaccctccgggacggccggggcagcgctcctggcgctgctggctgcgctctgcccggcgagtcgggctctggaggaaaagaaaggtaagggcgtgtctcgccggctcccgcgccgcccccggatcgcgccccggaccccgcagcccgcccaaccgcgcaccggcgcaccggctcggcgcccgcgcccccgcccgtcctttcctgtttccttgagatcagctgcgccgccgaccgggaccgcgggaggaacgggacgtttcgttcttcggccgggagagtctggggcgggcggaggaggagacgcgtgggacaccgggctgcaggccaggcggggaacggccgccgggacctccggcgccccgaaccgctcccaactttcttccctcactttccccgcccagctgcgcaggatcggcgtcagtgggcgaaagccgggtgctggtgggcgcctggggccggggtcccgcacgtgcgccccgcgctgtcttcccagggcgcgacggggtcctggcgcgcacccgaggggcgggcgctgcccacccgccgagactgcactgtttagggaagctgaggaaggaacccaaaaatacagcctcccctcggaccccgcgggacaggcggctttctgagaggacctccccgcctccgccctccgcgcaggtctcaaactgaagccggcgcccgccagcctggccccggcccctctccaggtccccgcgatcctcgttccccagtgtggagtcgcagcctcgacctgggagctgggagaactcgtctaccaccacctgcggctcccggggaggggtggtgctggcggcggttagtttcctcgttggcaaaaggcaggtggggtccgacccgccccttgggcgcagaccccggccgctcgcctcgcccggtgcgccctcgtcttgcctatccaagagtgccccccacctcccggggaccccagctccctcctgggcgcccgcgccgaaagccccaggctctccttcgatggccgcctcgcggagacgtccgggtctgctccacctgcagcccttcggtcgcgcctgggcttcgcggtggagcgggacgcggctgtccggccactgcagggggggatcgcgggactcttgagcggaagccccggaagcagagctcatcctggccaacaccatggtgtttcaaaatggggctcacagcaaacttctcctcaaaacccggagactttctttcttggatgtctctttttgctgtttgaagaatttgagccaaccaaaatattaaacctgtcttacacacacacacacacacacacacacacacacaccggattgctgtccctggttcaagtgtgccaagtgtgcagacagaacatgagcgagtctggcttcgtgactaccgaccataaacccacttgacaggggaaacatgccttggaaggtttaattgcacaattccaaccttgagctgcgcgggttccaagagccaggcccgtacttgctgttgatgtcattggcttggggagttggggtttggtgcccagcgcggtcgttgggggaggggcaaggcatagaacagtggttcccagaccttgctgcacattggaattacctgggattaaaaaaaaaaaaatcaaaacaaaaaccagtgtctggctcccgcccccagacattctgatttaattggcatggggcaagacctggacttgggattttttttaatgctcttcatgtgatctgttgggcagccagatttggggatcactagacggaagaaggattgttaaagtctccggagatgttacttgccaatgctaagagctctttgaggacatctggaattgttacaatattgccaaatataggaaagagggaaaaggtagagtgtgattccaataataaaggattccgcttttcattgaaggaactggtggaaaggtttcttctctgctgagcctgcaggcccgtcctgcctgcctggggtgcccgggagacgcgggcctgctccggagactgctgactgccggtcctgttagtcaggtgtcagccctgtctctgccgaagagactcttctctttattttaaattaaaccctcagagcaccaccaaagcatcacttttctccctccattggtgttctcattctttgatgttacttgtttgaacaccactattagtagttggagatttgttcctgagaaaaatataaataccacttaatttgcctgtttgtcccgcattcactcaaaacagaatgctcctgaagacaagagagagagtaggagaacagacgctattccattacagtaacataaaagactggattttcaggggcaaattattaaaataggagatgagctcttttaacagaaatttgtttaaggcctgtgtctatcaaattcagtggattttattcaagatgcactttgtttagtgggagttttgtttggttctgggacatgctaacttctagacttgctgctcttagaggtaatgactgccagacaccatttcatgagtcctaatccccacattaagcataagaggtgcacactctcctcctatgggggaaactgaggtacgaagaactaaagtgactttcccacagctggtgggaggcagacgggaaattcacaccaggggcttccaactccagatccctctctcaacttccaaactccactgccttgtccgagttctggtttcaggagatccaaatcaggtgtgtgcaaatgtctaatgtcagagctggcaaggggaaagggcccagggagccggctcatgacgatgagcctgtctgaagcttcaacgcgggctgtccggcagtctgcattcctgccgagttcctcagccctctgttgggtcaccttccatagaggcagcttagtcctcagttcagtgagcatggagtggagactgcttgaggggtgctgagcaaagccctgcctcttacaggatgaaggtgctctccagaagggacactggaaagtattccaaggcgagtcgaattcccaactgagggagctttgtggaaataagcccgcccagccccacttctggagacgttcccattcagtaggtccgagctgtcttaaagagaaaccaaagtggggatattaatggtatccaaagtgagatctaccccaccctccctcctcaaaggaggtcagatcaagaaagcccaagcccggcctggcaattgggacctttcttctcactccagcccagggtgaaggtggacaagtcactttgacccttcaggcttctgagctgttgtttctgaattcagtgaatatttactgagtgcatagaatatgctagatattctgggctaaaggttgaagggggggtgagttttaagggtttctgctcttgcttccagattgctttcaaatctggaaag

SEQ ID NO: 70 - DNA, 6171 bp, Homo Sapiens
tccagccacactggccgccttgatgttccttgaacatggcaggcaccatcccacctcagggcctctgaactggcacttccttctgcctggtatgctcttcccgtagacattaaggctctctccgtctctaccgtgaggccctaattcaagagtcaccttccctatgcctaagatttcaaccacccccaatactcgattcctacctgccctatttcattatttcttctcagcatttgtctattatgctaattttacttatttattttgttcacatagtctgtctccccagcttgggtttttttttttttttttttgagacagagtctcgctctgtcacccatgctggagtgcatggtgcaatcttggctcactgcaacctccgcctcctgggttcaagcaattctcctgcctcagcctcccaagtaactgggattacaggcgcacgccgccacacccagctaatttttttgtattttagtagagatggggtttcaccgtgatgcccaggctggtcttgaactcctgagctcaggcaatccacccacctcagcctcccaaagtgctaggattactggtgttagccaccgtgcccagcctccccaacttttaataaatgtcagctccacaagcacaaatatttcgccctgtttcgttccttgccatattccagcacctagaagagtgcctggtactcacaaggggctcagtaaaggttggttgcaggaacagtcccaactaattagctctcatatcccttcttcttcctcatgtgacccctacactggtgtctcaaattatctttttcccatttattcatgggataaattcttattgagcatctgctgtttacctggtacattttcagttgctggagacatagcggtgaatgagcagacaaaaactgagtcctcatgggactcacattctaatgaggagagacagacaacaaacaagtaacccacacagtgtgtcagacagtgataaagggcaacgggacaaatcagggacctggcttgagccctgctgggtgtgcagcttcagatggtcagggaggggttgactttttttgtttttacaagtagcattgttaggaacttcttttttatacatgtgcctttgtatagtatattctaagtaccatggtgtgacaatcaacctttaatgaaataacactacccaggtacaacaaaatcaaatcactcttagaaacatcttttacgcctgtgcctttaagagagtgtattacacacaccacagtggttgttttttgggtttttttttttcagaaaaagggatctcgctatattgcccaggctggcctggaactcctgggctcaagctatcctcccacctcagcctcccgagtagctgggactataagtgcacacccctgtgcccagctacacaccacagttttgtgaacacattctttcaatgcaacaacacagtccttattcacatatacaactagcactcttagaaacagcttttatacctatgcctttacagagcatattacgtacctcagtcttgtgaacacatccttttgaaaaggaggaaaacccttactcatatataaactggcattcttagaaacatctttcatacatgtatctttttatactgcattccacacaccacagtgtggtaaacatcctttgggggttggtatttgaacagagtgctgaaaggaaccatgcagagatctgggggtggtgttcaaggcacaaagaacagccaatgcaaaggccctgaggctggcccatgcctgctatgtttgaggagctgtgtggtggaaccagtgtggttggagcacagtaagggggtgggaaggtataggcggtaatgctagaaaggttacttgttttaccattaattcacagttaatatttatttacactggaagggattctagttctgatcccccatttcacaaatgaagaaaaaggcacagagaggaagtggttaaatcactcatctaaggtcacacagctgctgggattggggggtgggtgggtgctgagagaaggtgaggaatgaagactgctctgcaggcagagggaacagcaagaacaaaagcttggaggtgagaactaatttggtttttaaggactgaggcctcacgtggggtgggatgagatctaagaggggagcctcaaaaattatcctgtgtcctgagtacttcctgggccacctttgagtaaggaatttaacctccctatggcccaattccctcactacctatctcatggggttgtggtgaggattaaaggaactcattcatatgaaacactctgcctgatatacggcaggtgctcaataaacgctagctcctattggcattactatcatcactggcgctaatgtattcacttattgtagtgaggcagaacgtctttgtggttacgagtgtgaccaggctgacccactattaagaggtggaggacagggaaggccgtacagtgctccatcacaaggaaaagaggatcagcacgttctcttctgggaagggaaaaaaaaagagaaggaaattgaaagtacacggccgatcttcccccaattacaaagcactggactcacgggagggtatgcgggggactgtgcaagcatacaggggtgtgggggaggaaggccaatgaacagatccactgcaaagggaggggtgatgaggctcatcgtctgaggggaaggggagcagaaaaccttacagactcctgcaccacagtgagaggagagaaaagccatcacacagactgattcaaagcagagagggaaaaggctatggactgagctactgaaaatagggagatgtaaagcactaaactaacccactattaaaaaggagagaaccccaagcgctagagcgacagtctacgaaaaagaggagacagggcaatggactgatagctaaagggacgtgaatccaaacatgaagactgatccactataaaatggtggtggtggtggtggggggggggggtggttttgaaaaaagccatggactgatgcattgggggactggaggaggcaggaatacaaactcaggtagactcactgttaaagagggatgcggaggagtgcggcgccacggattgattcgctacgatgtacaggaagggtggaataaataaggccacggacgggtctcctgaaagttgaggctaggagaaatccaaacactcagatacacctactattaagggggctgaacactgtcacaggctagctccctataagtgggggtgggtggggggcgggtgggggtaggggtagggggaaagcctatggacgagtccaccctaagttggcgtggggaaaaacataagcacgcagaccgatccattatacaacgggagggggaggttaggccacggtcagatccactataagggacgaagggcttgagcaatgccacacgcaggtccaccagccgtggtggtggcggcggggagtcgaacaccagcaggccaccggccaagccacatcctctgcgcgggggcgggaaggatacgtggggtcacggactgggccctccaccctccaggcccagagctcacctgtgtgtagcgtggcggtggcgttggcaatgttggcagctccggggggcgggggctccatacgcggccccaccgccccccaggcctgggttccgaggcggcggtggaggtggtggtggcggtggcggcggcagcacctagaagccgcccctgcgtttccctacagctcacgtgggcccgaggaggaggagcccaatgtcccgccgctcgctgattggccaaagcgctattaatcggccgcaaggcctcgaggggttgggggacgggcccttccctacagagctgtgccgtgattggcgtaaggggaaatgatggaacgctcacggcccctggagtcccgaggaggcgcgttcggccttcacggtgctccacgccgattggctcaaggactgacggactgtgagcaactgaaaaggctcggggcctgtgtcgggggggcgggggtctgcctcacactgattggcttacatgggattgatggaagacagcccccaaggacgggggtgggtggccctgtttttctctgattggcggacgagggacttctagacccctgccaaaacaccaagggggcggtgtcgcacgccatgctgctcagcggaagcagggcttgtatagaaatgggcgtagcagccggcgggagtgggtcggactgggctccgcgtaggcgggcagggcagctctacggttagacaagaccatagagctgggtaaagacgaatttagaacacagcggaggtaggagggcaggatggctgtcaggcacacgaaagagcattgagtggcagaaacgaaatgctttcagagggcagggttgaactgcggccagagttaaaaaggggaggaacctggctctgcattgattggcggtggctggactcaacctagaataggggcccgactagggagagcgggatccaggtctgtgcccattggaagctggaacacttacaagcaggggctaagacaaggtagggctgagttagggtttgggtgtaatttggggtacctggggaatgattgggtgtgtgaaagcgtaaaccttagggccctttgattgttgtgggaatgaacaaacctccaccatgaattggcccattctctatggcaattcaaagggtggcgtctaggaaaaggaatggaagaaagggtgaggtggggggcccaggttgccaagatgacagaagagagggcagtgcataaggtcaactggcaaatactgccaggcaacaggctggaggcaggactgctggggcattttggaggttccacagagagactggatctctgggtctctcagtaactttgtgccctaggaacaggcccccgtggcaactagcagggtttatggggaaaaagaagggccatgtgactcaaaggcattcaggctctttaatgtctgaggatggggggaagaagtcaatggtgaggcttctctgggaaattctgcaggccttgtagttctctaagcccctgaaaaagaggacagaagagattgaacaaagactgggtctgggttacgcccccaggcttgctctgacctccctcccttgactccagtttagagggaaagatggtccttcccttctttcgctctcttccttcttcaggtcaccaccctaaacacagagtctggtagtggggtgagctgctctcacctctagcaacatgtggatatgggctttgatattcatggagtccttggtgaggctgttgctgagcctagagaaaagaaacaagaaagggcaaaatgggccccacatgattatgatgacccttccttatcacttcaagatctacttatatcctggatgatttccacctggctcattcctatgtggaaatgccaagccaccatctggttttcactgattcaaagattattaaatgcctactgtatgccaggcaattttaggcactgggagatagcagcaaacacaacaaacaaaactcccggcctgatggacttcaaattcttgtaaagaaagacataacaaaaaaccaatggaataaaagctatgtgtcagatggttctaactacaataacaaaaattaaaaatgagagacaataaggagtacaggagtggggggctgcaattttaaagagggctcagggatggcttcacggagaagcatttgagtaaagacttaaagacagtgaattttgagtagtgtggctatatggaggatgtgttccacacacaaggggcagcaaacacaaaggcactgaggtgggagtgtgcctggcatgtttgaggtgcagcaaagaggccactctggctggagaagaataagtgaagggggaatgtaagaggtgaggtcagagaggtaatgagggagacaaactgtgtgaagcctacaaggccatggtaaggaccctggctttgaccttaagtgagatgggagccaagggaaggttgcagcagaggaaggaggttgaattacatgaaccagtcagttgactccttttctctaagccagtttggatcagatctcgcccaaaagaatcctaattgatataaagggtcaaggaaggcctttctcaagaatgaagaatgagaaggaatcgaagaatgcctaatggttaagcagtaggaaggccttttccacaaaa

SEQ ID NO: 71 - DNA, 6249 bp, Homo Sapiens
aatgataacacctgcctcctctggagtcttggggactcagtgttctgaggaacgtggctgtaggtcagagtggcacagagtagggtccaatgaagcatggcgtccacagtagctttcctgactggactaacctttccggacacaacagcagggcaggggtggggcctggggagaaaggacacctctaaccctgatcctaacatcccgatggcctctaaggctgcctgcacactcatccaggtgcaagccctccaaggtgtggtgtgatgaaccagtgactcctggagccaggtcagcgcatcctcttcccgcagggctgtaagctgcaggactgagaggcaggttgaccaggtcctgggctggatgatggggtgagagtaaggggtcagttttgatacatgcccaacttttctctctagccctaagacatcctgggcaaattgcttacctcagttcccctgatcctcaccctaaccctaacaccagctcaagagaaaatagggatattgatggccatccagaagggctgctgtgttccatacacagcaatatttctcgaatgtttgtgacagcggtccaaggaataagttaattttacattatcactctggatacctgtacaaaactccaccttatccttactatatgaatgtgctagggttgtttttttgttttgttttttttttttttttttgagacagagtttcgctcttgttgcccaggctggagtacaatggcgcgatcttggctcaccgcaacctccgcttcccaggttcaagcgattcacctgcctcagccttcccgagtagctgggattacaggcatgcgccaccatgcccggctaattttgtgtttttagtagagacagggtttctccatgttggtcaggctggtaccaaactcccgacctcaggtgatccacctgccttggcctcccaaagtgctgcaattacaggcatgagccaccgcacccagccgtgctagggtctttttctgttcaattcctttctctctcttgctctctttctttctttcaatggagtcttactctgtcacccaggctggagtgcagtggcaagatctcagctcactgcaacctctgccctctgagttcaagcaattctcctgcctcagcctcccgagtagctgggattacaggtgcctgccaccacacctagttaatttttgtacttttagtagagatggggttttgtcatgttggccaggctggtctcgaactcctgacctcgtgatctgcctgtcttggcctcccaaagtgctgggattacaggcatgagccgccatactcggccaactttgtattactttcttaaagagagtttcccaaattatataagcttcaggccccacaaaacctagatctgccccagtataactaaatctgggaccatttattgagcaattattatgtgccaagtattgcgctgagtgcttccagagcattatctcctttaaccccagcatagtatgtcagatgctgttttacagatgagccaactgagaccagagatgctcagtcacttgcccaaggtgacatgactgatatggaatagagtcaagatttttttttttttttttgacacggagtctcactctgtctcccaggctggagtgcagaggcgcaatctcagctcactgcaagctctgcctcccaggttcacgccattctcctgcctcagcctcctgagtagctgggactacaggcacccgccaccacacctggctaattttttgtatttttagcagagacagggtttcaccgtgttagccaggatggtctcgatctcctgacctcgtgatctgcctgcctcggcctcccaaagtgctggaattacaggtgtgagccaccgcgactggccagattcaagatttgaacccaggtcctcttggtcccagaggcccctgtttctcaactccctaggatggcatagcaacctgtcccacaagaggtgcctgctttaagtgtgctcagcacatggaagcaagtttagaaatgcaagtgtatacctgtaaagaggtgtgggagatgggggggagggaagagagaaagagatgctggtgtccttcattctccagtccctgataggtgcctttgatcccttcttgaccagtatagctgcattcttggctggggcattccaactagaactgccaaatttagcacataaaaataaggaggcccagttaaatttgaatttcagataaacaatgaataatttgttagtataaatatgtcccatgcaatatcttgttgaaattaaaaaaaaaaaaaaaagtcttccttccatccccacccctaccactaggcctaaggaatagggtcaggggctccaaatagaatgtggttgagaagtggaattaagcaggctaatagaaggcaaggggcaaagaagaaaccttgaatgcattgggtgctgggtgcctccttaaataagcaagaagggtgcattttgaagaattgagatagaagtctttttgggctgggtgcagttgctcgtggttgtaattccagcactttgggaggctgaggcgggaggatcacctgaggttgggagttcaagaccagcctcaccaacgtggagaaaccctgtctttactaaaaatacaaaaaattagctggtcatggtggcacatgcctgtaatcccagctgctcgggaggctgaggcaggagaatcacttgaaccagggaggcagaggttgtggtgagcagagatcgcgccattgctctccagcctgggcaacaagagcaaaagttcgtttaaaaaaaaaaaaaagtcctttcgatgtgactgtctcctcccaaatttgtagaccctcttaagatcatgcttttcagatacttcaaagattccagaagatatgccccgggggtcctggaagccacaaggtaaacacaacacatccccctccttgactatcaattttactagaggatgtggtgggaaaaccattatttgatattaaaacaaataggcttgggatggagtaggatgcaagctccccaggaaagtttaagataaaacctgagacttaaaagggtgttaagagtggcagcctagggaatttatcccggactccgggggagggggcagagtcaccagcctctgcatttagggattctccgaggaaaagtgtgagaacggctgcaggcaacccaggcgtcccggcgctaggagggacgcacccaggcctgcgcgaagagagggagaaagtgaagctgggagttgccactcccagacttgttggaatgcagttggagggggcgagctgggagcgcgcttgctcccaatcacaggagaaggaggaggtggaggaggagggctgcttgaggaagtataagaatgaagttgtgaagctgagattcccctccattgggaccggagaaaccaggggagccccccgggcagccgcgcgccccttcccacggggccctttactgcgccgcgcgcccggcccccacccctcgcagcaccccgcgccccgcgccctcccagccgggtccagccggagccatggggccggagccgcagtgagcaccatggagctggcggccttgtgccgctgggggctcctcctcgccctcttgccccccggagccgcgagcacccaaggtgggtctggtgtggggaggggacggagcagcggcgggaccctgccctgtggatgccccgccgaggtcccgcggccggcggggccagaggggcccggacgagctctcctatcccgaagttgtggacagtcgagacgctcagggcagccgggccctggggccctcgggcgggagggggcagttacacggcagcggctcgagatggcccatccaagagactggcgctttccaggctccgaggggctccgggaacttgtcaaagaagttctctgaaattgttcagaaagttttcccgcaaagggtgtattgcgtagagcgcgcgcgcgcgtttccccccttcttgagccccctcaagctttctcaaagcctttccagttggcagcctccgcctccggactggcctgggctggattccttgggggggtcctctgccctgcccctcctccagcccctccccgctccccttcagacgattttggtttggttgctcctgcttctggcggggtcgggtgtgtgtgtgtgtggtggagtggagggtggcatagcaacctgtcccaaccagagccggggaggaaagggtggcccggagggtggcctcttgctggggtctgggttgggggcgggggagacgtttgctttgaacagattcttggggccagcttagggactgtgctctgtgacttttggagcgcgtggaccatggaggggtgggggtgggtttcttggggtgtaaagtgggagagttcccagagaaggaagctaagaaataaggccagatgggagcctagggagggctgcgttgttctgctgccttttccttggtgctgtgcgtggggaagggtgagtgggggcagtgtgtatcctgacccatctgtccacctgtgtgcattaatcataaaagctaacatatagcctgggccaggtatactctgccaggaactgtttgtggtgttttgcatgcattctcctttaatcctagaacacccctatagtggaagttctgccagcattctggactgagtagcagtccagaggttgagtagcagctagtaagtggtggggtcaagatgggaccccaggcagtgcgacccccaaccatgcattcgaaatcgctatatggatgagtgcacctggagcaatgagggacactgctccctgagtcactgggctgcaggggagacaaaatgaaagtgttctgggagtcgtgggtggtctccataggtcagagggtctggggagggagtgggtgtcatcgtggctgtgtgttgcccgaggggccctctgtgagtgagtgcatggccgtgttatctctgcaggtctacgccagggtgttcctcagttgtgtggtctttgtatttgtgtgtctgggctttgtgttgccaaacagcagtctctctgctgacttggggacacaggctgaactctgtcctctgcaggaactcccttaaggtgctgggccagatctgccataaacagagggaggtagccttctatggccacgccttcttgctgaggaagaaggttcctctcttccagggagtacatccttgccctccctgtttcccagacaagcatcttcacctctcatcttctgatgagaagggtgaggccatactgagctgtcaggctgagctgctgcccttcctcaccttgggctgggagttgatcagggaatggcagttgctgcagagctggatttgagggctgggttctctggatggggcctcctcatgtcctcacccctcaacctgcactattgattgtgttgtgcaggagttagttaaaaagtcattgcacagcctgggcaacaaggcaaaactctgtacaaaaaatacaaaaattagttggatgtgattacacgtgcctgtagtcccagctactccggaggctgaggcaggaggatcacctgagcccaggaagttgaggcttgcagtgagctgtgattgcaaatgctctccagcctgggtgacagtgtgagactccgtttcagaaaaaaagtataccacccagctgcctccagcacccagattttacccaaggggtgaggtctggggcaggaatgtgggggaaggggaggcctagggggagccccagaggggtcaggatttttctgaaatcctttcttagaggtatgggttttacaaattgcagcaaatacatccttttaatcttgcagaactccttcatattttaattccagtatgattcttccaacagcctcctctctttactatacttggggaaagtactcattttatttgtcaagaaaaaaacaattgaaaagatagggatcaaatgtaaaaagaaaaaatacgtggcattccaaagtcaaacacaaagcatgtttaattttctcgtggtttgggattacccatattcctgctgtatgaacctgtcttgtcttaacttttaagaaatgtacggtgtacttcctatatgctaggtttttatccatgctttcatttaatctctgtgacagtcctgtgaagtaggtgcacagatgagaaaatggaagttcagagaaatgaagcaacttatccaaggctcccagctacccagtaatgtccagggaatttttggactctgaagaggaggcattaagaggtggttagagtct

SEQ ID NO: 72 - DNA, 6171 bp, Homo Sapiens
ccctttaatgtgggggagggtaggtaggagtggagacccttaagtagtatcagcactgttgtctgatgggagtgtgaatctgaacacatgaagctccagtctcagtagaacagtaagaaatcctaagtaaggccaggcatggttcacatctgaaatcctaacaatttgggtaaactgaggtggaaggattgcagaggccaggagttcaagaccagcttgggcaacatagccagacccccacccccacccccgcatctccatatcatacaaaaataataaagaaatcctaggtaaggccagatggtaaggccaggtgtggtggctcatgcctgtaatcccagcactttgggaggccgaggtgggtggattgcccaaggtcaggagttcaagaccagcttggtcaacacagtgaaaccccgtctctactaaaaatacaaaaattagctaggtgttgtggcaggcacctgtaatctcaactactcaggaggctgaggcaggagaatagcttgaacccaagaggcagaggttgcagtgagccaagatcgagccattgcactccagcctgggcaccaaaagcgaaactcaggagaatgccttgaacccaggaggcagaggttgcagtgagctgagatcacgccattgcactccagcctgggtgacagagcgagactccatctcaaaaacaaacaaacaaataaacaaagtagccagacattttggtgcccacctgtagactcagttactagggaggctgaagtgggagaatcacctgagcctgggaagttgaggctgctgtgagccatgattgcaccactgcactccagcctgggtgacagagggagatcctgtctcaaaaaaaggaaaaaaagccaggtgtggtggctcacacctgtaatcccagcactttgggaggctgaggtgggtggatcacctgaggtcaggaattagagactagtctggccatcacagtgaaaccccatctctactaaaaatacaaaaaattagccgggcttggtggcgcacgccttgtagccccagctacttggaagcctgaggcaggagaatcacttgaactcagtagtgagctgagatcaggccactgcactccagcctgggtgacagaaacagaacaagattccgtgtcaaaaaaaaaaaagcaacagaccagaaggccatgaggtcaaacaaaacaatgttttgtttttgttttgagatggcgtctcactctgtcgcccaagctggagtgcagtgatgcaatctcagctcactgcaacctccacctcccgggttcaagcgattctcctgcctcagtctcctaagtagctgggattacaggtgcccaccatcatgcccagctaatttttgtatttttagtagagacggtgtttcactatgttgactaggctggtctcgaactcctgacctcaagtgatctgcccgcctcggcctcccaaagtgctgggattacaggcatgagccaccgcgcccagccgaatgttttgttttttaagatggaagatatcccagcactttggcaggctgaagcaggtggatcattccagcttgggcaacaagagcgaaactctgtctcaaaaaaaaaaaaaaagaaaagaaaaaaaaagagagaaagaaaccctaggtaaaagtctgagccccacctcccaatcacctgatcacctcaaccactgtcaccaggtggatgaccttggagaggtcacacacttctagttctgtaaaatggggagttatattgcctaaatcatataatttttatgttaagtgacacattctctaaggcactaagtttgaggacatactttgtaaatgaaatgatatatggaaatgtttgtatatgttaatggttttgttgttgctattattattatgactactatacacatggtctggagaaagccaacctccccaaagcggagattctccagtagagaacaggccctctaggttgcatatcaatagggagcatgtttaaggaatgttagccggtagtctttgctaggtgtgaggggtgaaatttttctttatcaaggctcaactgttttcgaagtcttcaggcttgaagttctggagaaaacaactaggctctccgggcgagatcccgaataccagtttaagggatttgaaatgcaaggccgtctgggactccactgccacggatgggcaccaggcggcgccggtcggatccgtcccgggactagcagggctttgggcagcaacccgcagggagcccgaccgcctctggccaggtccgggcagctggtgggggaggttccagaggtccacgccattcgtggacgcagtctctagtgtcctctccgcgtcccacttcactgccccatcccctttcctgcgagagcctggacttggaaggcacctgggagggtgtaagcgccttggtgtgtgcccatctgggtccccagaagagcggcgggaactgcggccgcccggacggtgcggccagactccagtgtggaaggggaggcagctgttctcccaggcggccgtggggggcagcagaggggacggcgacaggtgcgggagcccctcccggggtagaagtggaaaggcgggctccggggtctgttcccaggctggaaaccacccccgccccccatccaaatccccgggagaggcccggccggcgccgggtctggaggaggaagcggccagagacagtgcaatttcacgcggtctctgtggctcgggttcctgggctgggtggatgaattatggggtttcgagtctgggagaaactgaggtggcctggacgtgaggcaaaaaacaccctccccctcaaaaacacacagagagaaatattcacattctgagagaaaatccaccaagtgaaccaaccggctaggggagttgagtgatttggttaatgggcgaggccaactttcagggggcagggctttggagagctttccactccctcattcattacccttccctggatctgggggctttcggaatctcgacctccccttggcctatctcctgcagaaaaattagggtgagccccatcctcgatctgctccgccaagttgcgggaccgcggggcgtggcacgctcggggcaggcggtccgaggctccgcaatccctactccagcctcgcgcgggagggggcgcggccgtgactcacccccttccctctgcgttcctccctccctctctctctctctctcacacacacacacccctcccctgccatccctccccggactccggctccggctccgattgcaatttgcaacctccgctgccgtcgccgcagcagccaccaattcgccagcggttcaggtggctcttgcctcgatgtcctagcctaggggcccccgggccggacttggctgggctcccttcaccctctgcggagtcatgagggcgaacgacgctctgcaggtgctgggcttgcttttcagcctggcccggggctccgaggtgggcaactctcaggcaggtaagtggcgcgagagcaccggcgggctcggcacctgggagccggaacccagtgcgcgcagcctcggagggtatgggcacggtctcaggcggcgcggggttgtgggtgctgcccccggtttgccaggaccacctgggagaggggcggtcaggctcgggttatcggcgtggtccggccgagggcggcattccgggaccctcacgccacccttctccagagcgtcgccgaccctctaattggtctccccagaagaggctgaggccgaaacagtagttcacacttctgaggggccctgcagggaggggagcagggaacttcattctgtaaacaggaggtgcttggaggtgggggccttggcgggaagggtctcggtttgctcgccaaccccctgccccccacccgcgccgatttcagctacccctagtttcgttgttttgccgacagggcggagctacagaaggttggagggggttgttgttctctggtgttggaaaaacaggagcggcacctcctcttccgtgagtgagcctgccctggggaggtctgagattaaccagagggccaagttcaggtgacatcaggcaggaggcccaacagaggctggcgccccctttcctcagtatagcagagcttaagcaacatctctttgtcaagacccaggtcaacacaactcatatttattgagcatctactatacacaaggccctgggccaggagctgtaagggcaaggatgtccagcctctggtcttttctctccccaacctgaggatcaagagggcacctctgctactttctaagcctcctgccttggggagtccttcctgggctcagcttgtgcctcccgcccccattttgcttattgtctgacactgtctctaggaccctagacagagccccggattgctcttctccagtcctcccccgactcccatgctatctgagcccacccctttggggtgtctctgggaccgtggacacctgaggactgaagttctgtggatctcctcccctcccctcagatctcagcttggggtttggcacagccagggccccttccccagtgtgggagtggaagaaaccacctgtgcttccctcacagttgctgggcctaaatttagatcctgggatttttagatgtgaacactcccagctggtggaggggggtggtctggggactggcgtgggagggagcagtggagtgactgtataactgtcccatccagactcctgcaatcttcacccagaaacccaggagtaccagagtctggccaccctccctggggaggcaggaggcaggcatggttgggtctctttaccctttatctgggtcctgcagcctctgggcatccggccctgtctcagtccttctatagcccctttgtcctggctgtgatgggggtgggggatgttggaggggaggcctctggttgaggaggggctggagattctggctctatcccacccctagtgctctctaccaaaggagggcctgtgacactgcccctccctatgctcccggttcctgggtacagcagggatttttatgattcccttcccctgccctgctccccaagctgcctagctcctccccagaggtgttgtttgtgctcccttcctgcccaggccctttgccccctgtttgtgtaatatggactttaccctcagggtagcagggaactgggctacctctaacactgtagccttccaagcacagacacaaagtctgcacaaacacttatgggcacgtgggatagatggggccacctgaaatacttcctgcaaggaaacccaactatagattcctgagccagcaggaccaatgtgtacgtgttcgtgtgtacattgtgtgtgtatgtgtgtgcccacactactacttccctgtgcagaaagcttggctcctcccttatctggggagaagtgttggcactataacttgggaaagggggtatcctgccaggaaggggattggggtggggctgttccagaaatgactaaccttcctagtctctttcatttcaacccaaggaccctggagttcccagctcctctggaactagctctctttgctgggactagccaaccttcatggggagtgataaggagccctccaaggtcaagaagtcagactaggggtgtatgttataggagggattggggcctcaccagtctccctccctccattcccactgttgcctcccactgagctaccaccgcctcagggaagggtggctggaacaggtggtatctaccccctactccccaccccacacatggtctttccctgaaccagaggaaagagactggggtagggcttcagagtccaggacttcccatagcccgttgtccaccacatttgcaaagaagagtgaactcccaaggctgacatgccatgtacctctagtctaggctctcccctagtgtgggtgaggattgccatggtgaaaggctttttcatgaacctcttctaacaatgaaattgtgtggaggctcaatatggggcatctgctactatctctctccaggttcctctgtatttgctgaaaaatactctagggctggaaagtgatgctgaggttgctagagtgtgttgggatgggggagagagtgagaaggaaaccctgagtttaggaaggcggggaggcaactagctccttatctttcagctttaaagacaaagctcccattgacccc

SEQ ID NO: 73 - DNA, 6214 bp, Homo Sapiens
ggtggaagatggggaaaaccagagtacattccccagagagattttgtgaggattaaatgagacagggaaactgagactgagggagtagctgaagggaaccctcttgttcctgttctctcccagacaacataagcgccccctctatgcatgtcagcaggtggagaccccctcaccattccgtgtgcgcaccttacatgttcttgcctccgcctccatccttgctcctgccacccccgctacctggaatgtcctttccttcctctctgcctctgccagtcctacccatccttctaggctaatatgccaccttttccaggaagctttccctgatctggaagtgactgttgtaccctctgggcctcccgtggggctcctatcactttcagccttgggcagtagtcacctgtagcctaccttaccccctcctaagcctgtgctctcctttctggcaggagcttctctgcaccctagcactcctgggcggggtcggaaccactgcaatgcctctgtgccttacctgttcacaaggccttcgacgtacccctggaggcggccccagggcccggatgactcctggccggggttgtggggggctgtactgagggtaggtcagaggcctggggtaactgctgggccccaggaaatgaggctgtaccatccactgcagctcctgactgccactcatggtgttgatgcttggcaccaggtggaacttctaaggaataagaaatggaaggccacagatgaggtccgtgtggattgaggggcttccactgggcagaggctacactgctgtctaccttcaatgtacaggctagctctgggaacagaaagagcacagcttggcagtcagagactgacctggtggcaaatccctgctcataagctgtgtggctttggggcaggtcacataacctctctgtgcccccatttccccattagaactaacatttataaagcacaaactgccaggaactgttctaaccactttacaaatactgactcatatcattggcacagtaatatcttcattttcttttctttcttttttttcttttttttttttcagatggagtctcactctgttgcccaggctggagtgtagtggcacgatctcagctcactgcaacctgcgcctcccaggttcgagtgatcctcctgccccagcctcctgagtagctgggattataggcgtgcaccaccatgcccggctaatttttgtatttgtggtagagacagggtttcaccatgtttgccaggctggtctccagctcccaacctcaggtgatccacccgcctcggcctcccaaagtgctgggattacaggcgtgaaccacagcgcccagcctagtatcttcattttcagacgggagaacagttgtccgcagacacagagccaatgagcccagcagctgggctcttacccactcctgcacctgtttgcacgaagaggataattacagctcccagctcaaggggaggctgtgagaatcaggtgagagaatgtgtgcgacagtctggtaagtggcaggtgcccagtgcagaggggctgaggcaggaaagagtcactgctctgggttcaggccattccattgcttttttttttttttttcttgagacagggtctcactctttcacccaggttggagtgcagtgacctgcgggctcaagcaatcctcccacctcagcctcccaagtagctgggactaccgacgtgcaccaccacatttggctaattttttttttcttttccgttttttttttttttttttttttgagacacagtcttgctttgtcacccaggttggagtgcagtagcccgatctcgcctcactgcaacctccacctcctggattcaagcaattctcctgcctcagcctcccgagtagctgggactacaggcgcccacaactgtgcccagctaatttttgtatttttagtagagacagggtttcactatgttggccaggctggtcttgaactcctgacctctggtgatccacccgccttggcctcccacagtgctgggattataggcatgaggcaccgcgcacggcctggctaattttttttaaatttttttgtagagacagggtctcactaggttgcccagggtggtctcaaattcctgagctgaagcagtccacccacctcagcctcccaaagtgttgagatgacaggctttagccacctggcatggcaggctgtcccaattctaatctcagctctcagctgcttactggctgtgtgaccatgggcaagttatttaacctccatgtgcctcagtttcctcatttttaatattgttacaggtgaggattacaggatttcactgatgttaagaagtaccctttaatagctctgaaatcatagtttaattggcaatttaaaaaattttagtggactaggcatggtggctcatacccagcactttgggaggctgaggtagaaggatcacttgagctcaggagtttgaggtcacaccgggcaacacagtgagacttcatttctacaaaaaaattaaaaaattagttgggtgtggtggtgcgtgcctgtggccaggtcgcttcccagctaggatctcagtaggattgcttgagcccaggaggctgaggctgcagtgagctgtgattgcaccactgctctatagtctgggcaacagagggagaccctgtctcagaaaaaaaaaaaaaaagaaagagaaggaaagaaaattagtggcataaagttatagtgggtttttttttcaatcgatgaggtcttcgattccgtgaaatatggtaaatgatgtagcaagcgcccagcacaacgtccctgttcccattctatcagccagctatctgaggagtgggttgggatggggctcagtgttctgggagaagtgggttctagctctgccgctgggccctgggtgtgggcgcccaatcgtccgggaagcgcccacaagcccaggcaagtcccgacagcggtagcccgagcccaagcgctgcgggcccggcgtcccagtgaccccagttccgggtccgaggcaccgccggcggcatctcccactcccgggcccgggccgctccaggccaggaagggagggacgccccgggtgactcagccgccgtgactcggccgccgtgactcggcggaacggacgcccctccttccctcccctgtcgacacgtgctcgcagcccctcgacaggaaatgggcacctgcagcctcccgggtgccccccggcgggcagcgggcgccgttaggggctgagagtggggtcgcgagagtcgcccgcagcctgaccccgcgcacgtcccggaacctcgaggtctctattcgccgcattcggcaaagggatcgagggccggtctccggggacctggcaggttccactgcccggacccccctggactccccaggccgagaaacgatagggacttggcgacggaggggcgaaggacagacagacggacggacacgcggagggtcgcagaccgggccgggactcccaccctggcccagctgctctcccgacggatcccgcctccctcccgtgtggggaccctcaccccagcccagactccagatcccaggaattcagcccgaagcggagagaccctcctagccttcgaggcgaccaccctaggcgcccacgccccttctgaagcagggtggacgcagaagtcagaggtgggcaggaggagagaaagcgggcacggagacggagggacggacgcggacggcgagggagaagggggcggctgggagaaggggagttcgcgggtctctgctgcccgctgcgcggtgggggcaactggccccggacggcgaggggcaggatcctcgccccagcccccagcccggccccgactccggttccccgctccagtcccggagcgtgcgggagttgaccccggcctcccacgcgcggtcctcccgtgggaccaccggcgtcgggccccactcacctgctgggctgcctgcgctgcggccgggggctgcgcggggccgccgtacccgccgccgttcccggagctcgggccgggttccccgaagtctcggaacatgcccggggctggcggctctgcggggtacacggctgctgggttctgactcacccgcgccgtgcggagtcttttctttttatgaatgaaaagttctcgggctgaaccactgcgaccgcggggggtgggggcgttgcagcggcgcggtcacctccaggctccacccccgagacgcgccgccttggcccgtcggtcccgaacttggcgacgcctccccaagtccggctgcagccttttcaccgggatgggcccggctcggcgttccccggcggctgcgggcccgcccccctgacgtagctgcccatacatggtgtaacttcctcgccgcgcccaggtggagccccgggttcccctgcggactgacgcacctgccagagcccgcgccccgccccagccctctcgaggcctgggctaacctccgtttctgctcccacaaaatagcacgaaagaatcacatctctaggagccacgccaaccgccacccaaagcttcgtggagtgaggtctttccactggccttgttttaaggcttcgagtatatgaaaagtgaataaatgacaaaccagggttacaaaaatggtggcatattttattttactttatatttttgagaccgggtctctgtcacccaggctggagtgcagtggctcgatctcggcgcactgcaggctcaacttcctgagctaaagggattctcctgcctcagcgccccctccaagtaagtgggactacaggcgcgcgtcaccacacccaggtaatttttgtgttttttgtagggattgggtctcgccgtattgcccaggctgggtggtatattttaaatgtttgcgataaggtaatgctttgaactaaccccacataaaatgcaatataatagtattactcaggataatttcaggagctataacgagttttaattcagggccactacaggtgtcctgaggtctgataaacgccatcttcattacggtcagtgcctttcggaggcttgtggccaccagacttgtttggagagtatgtcaaaggtgagtgaatgtgaggcaggtatcatcctcatccctgttttacagatggggaaactgaggctgggagatgctgaaatgaattgcttgaagtcgctaagtgagtagctggcacaggttgccaagtcacagccgtgggcactccaagcccaggctcagccaagattttcaaagcccttacaccttcacagacaccttgtcgcacatccagaatgttagtgctgggcaccatcccaaagcttctctctgattacttccatcatagatgaggaaactgaggcccagatggagtactgagctgtcagttgtcacacgactacagaaagagggctggggccaggtgtggtggctcatgcttgtaatcctagcactttggaaggccaaggcagaaagaaccatttgagaccccatctctacaaaaaattataaaattttctggacatggtggtacgcctgccttgtggtcccagctgttctggaggctgaggcgggaggatggcttaagccagggaggttgaggctgcggtgagctgtgactgcgccactgcagtccagcctgggggacagagcaagactcaaagtaaatagatcaagagagggctgggctctcctgcttctccatcggtccttccatttcatcagctctagctttgccctctgggctactttccttgggaacacaggccagaagtctgtgggtgcactcaggacttagagccaggaagtccagattgcccctggggttctagtcccagagctaccattttctgtctgtgtgacactgggcaggtcaccttccttcaactgggcctccctgctgatctcacagagctgttgtgggatcaagtgagatcacagatgtgaaaatgctttgtaagctataaagtgttatgcactcagaaagtggttaccagcctggtgcctctcctttgcctttgagcgacccaatgcttgtcaccctcttgtcatcatcatctctgtgtgtgtgtgtgtgtgtgtgtgtgtgtgagagagagagagagagagagaaagagagagagaaaggagaggagagtgtttttgaggcagtatgatccgtggacagaacacccgtgctggggtcagacagctctggggtctgggtttgaatgtggttaggctgctc

SEQ ID NO: 74 - DNA, 6167 bp, Homo Sapiens
acctcctggagacaaggcagggtgctgaggggcgggcaagatgtcaccgagggagaggggagggttcctcaagtgtgcggaaggcggccaccctgccccagcctgatggaaccctctgtttacacacctgctagccccttcccctccggccagcctcaggccagccaggagccccctcctgtggcctccgagcaccctcctgacacctgaggagaccctgcccaacccccccctccgccctcaggacttctggggaccagccactgtccccagaagccaggccggacagtggccttctccactcccctctgacttctccaagggggctcagtggccagtgccccccaggaggctccaccctcaactcaacccaagcaacagggacagatgaaaaacaaaatccaatcagggcgataaatggcggggggcaggacgtggtggtctccaggctggcttcgtgcgttcttgcttttgtcactgcccccctgttacatggggggggggtttaatttggtttctgagcgcataaagctaaggaggggtaaaaaaaaaacaaaaaaaaaaaaaaaaggaaaaatgccccaagaaacaaagagggggaatagatcaattgacatgaaatttgggggttcctaatttctctatgtaattctgcaagtctgctgtcaatcctcctgacttttccatccaaaatctcccgggaccacttcctaccccagaactccccccgcccagcccccactgccccccacccacccctccaaccgccagacttcccacactccccgcatcagtgcacggcccccgaggactccacatttcttggggggtccccaggagacgggcaaagatgatccctaggtgtgctccggtgggggggtccccaagatcttccttccaggagcacaccagggagtcaggctactcgtgggggcatgtctgctcagctaccgccatctccaatgtggccaaactccttcctcactctggctgggccaacacacagtaagtaaggtgtatcgggaatgggtggggtatggggagcatcgtggctcacgctgcgggggccgtggggacaggcgccaaggaggccagcctcacaagggcatctctgtcatggtggaaagatggaattaggcctgggacacaccccgcccaccctacgggtgtatcccaaatgccgccggccgcacactcaggccgcaccatctgagccccctcctctgagaggcagggcacagacagggccgaggggcagtggagatgggaacaggagcggggctcagaccatgaaaacattggagaatcttagcgggactttggcctgatccatacagatatcgtagttgcttagatatgcttattgttttcatccaattttgtgggggtgtgcgtgtgtgtgcgcatgtgtgtgtgcaggtgggtgcttgcgtgtgcaacgtgtgtgctgcgtgtttgtgtgctgtgagctgtgttcatgtatgtgctgcgcatgagtgtgtgtgctgtgtgtgcatgtgtgtgctgtgtgtttgtgtgtgtgctgtgttcatgtgtgctgtgcatgcgtgtgtgctgtgtgtgcatgtgtgtgctgtgtgctgtgttcatgtgtgtgctgtgtgtgcgtgtgctgtgtgcatgtgtgtgctgtgtttgtgtgtgtgctgtgtgtgctgtgttcgtgtgtgctgtgttcgcgtgtgtgtgctgtgtgtgcatgtgtgtgctgtgtctttgtgtgtgtgctgtgtgctagtgtgtgtgctgtgtgtgcatgtgtgtgcgtgtgctgtgcgtttgtgtgctgtgtgctcgtgtgtgtgctgtgtgtgcgtgtgtgctgtgcgtttgtgtgtgctgtgcgtttgtgtgtgtgctgtgtgtgcatgtgtgtgcgtgtgtgtgccgtgcgtttgtgtgctgtgtgtgcatgtgtgtgcgtgtgtgtgctgtgcgtttgtgtgtgtgctgtgtgctcatctgtgtgctgtgtgtgctgtgcgtttgtgtgtgtgctgtgctcgtgtgtgtgctgtgttcatgcgtgtgctgtgtgttgtgtgtgtgtagctgcggggatgcataaagtatgagtgctttttaggatgggaattgagatgtaagatttgggggtgagggtcgtgccaattacatttcatttgcatggattttggttttcatgctctgtcctcccctcctttggtcttactgggtccctctgactgctctgtgatttttagtgatggaaaagggagtgaggagccagtctgggttgttgctattttcggatggccagtttaccctgaaaattcccgtgagaagggagatggcggtagcagcgacgtgcccacctgtgatttctggggtccttcttttctctttgctggttcagggactcaagtccaggccaatttgactcaaagtccaagggagaagagaaagaggggggtggggagtgccaaattcctttattttgccaattgtttctcagccaattcgtttttaatactttttttttttagccaattgattttttttggtggttgttttttttaaagccaatttctgagcttttgtggggtgtttctaaaaagccaattagttttaagagggttgttgtgggggggggggaagggggttagtttaatgttttgattttttatgtgtggggataattggggataatttggggggagggtatgtgaagggtgtttaaagccaatcgattttgtacatgtttgaagatgctgctgtgcttcctcagcccgatggagggggccgaggagagtagcctgtttcggggaggcggggcacggggactgggtcaggagaagccccagggggacgtggaaccgagagattttcgggatggaacctgatggaaacgtccgtggtcaggaggaggctgcaggatggtggcgccgggctgcagacttgcggcagttttgctcacttccgattgctggccatctctgggggggcgcccccgtgggcggggtcttgggtgggtagagcaatcaggggacggtgacgtttggcctccctgaacgcctcgagctccttggcgagcacgtgaccccggcgggcacgcaggagggcaggcaggcccctgcgcaggcgctgggtggactgcttccaggtgtcatattggaagaacttgcccacggggtatctggggaagttgtcctgggaggggaaggggctggtcagcaggtgcctgctctccacgctcttccgcctgagccgcccgcctgacctgacaggccacccctgtgactgatcagtgacttgagctaatgtccacgggcagagggacagaaggagccagcgtctgagctgctcccgggccacacagcaagcaaggaagtcacgggtccttgtccctggccaagaggtcccagaggccacaggaaacgctgggcgcccgaagccctatttctctgtctctagagagtgggaaaggggcccaggaccctcaccggaagcacggtcggaggggtcgacacgtccctctcggacttggcgggggtagcacagtacgtctccaggagggccaggtcacagctgcggaaacagcactcctcaacgatgccacggctgcgacggctcacacggcttgcgggcctgcctggaagtcccacagcacagagagagccgtgttagcaccgcactgaccccagcccccggaggctgaagggggagcaaaccacccctgccctcaggccaggccctggaaggacgcagccaccctgcgggtcaggggagggaagtgagagctggcaggcagaggcgtcccaggaagaagagaggtgagaggggaggtgagtgggacccagaccagcccgtggcctctgctgcctccttcctcagatgaaaaatgggcacaagctcttggtcccacaaccagagggacaccaccaggaccaaaggctcacaatgggagtggtttggaaaatgtgtgggatgtgagcccagttcaggggcccccacaggagggactgctgtccctgagcttggactctggcctggcaccacctaggaggctggaggggcccacaccacccctggagctgctgagacagggagacaagggcaggagaggagaagacgggaggagaggagtgaggaggcgtgatggaaccactcccttctttcctcccgtcttccccctctcccccacagcaatgctcagctggaaggggaaggtcgctgggggctccaccttggggtgccaaagggcaggtgccatcagccggaggagggagcaggagccccatcacgggggtcccccaagtgggggcttggccctcccctcctctcaggaaagcctggtgcagggaagcttctccctgggcaaggactggctggcaccaggccctgcagtgccacttcctacccccaaatggggcaggcaagagagagggcacaggagaggccagggcgggcaggggcttccagagtcaagcagcaggaacttttcagagagaagctttgaagtgcatttgcatcctgtgagcccatttcacagcgtgagtaagcagtggtggtaaagatgtcacgtggtgagtgtcaggtggaataagccgtgcggcctctgccagtaaggagcggcccctcccctgccccatcaggcatgcccaggcaccatgcctgcctctgcatccacccagcccccctatctgggggtggggtctcaaggacaatgggccatgcacccacctgccagcccccaggctggagaaccaagagagaaacatgaggaaaggctgaagcgtccttgaggtcagcaggtgggcaccccccacggcagccttggggcccaaggaggcgcatgcaccgctcacccctgccacccaccaactgcacttgtcttattgattttaattatataaatcactttattgattttaattctgatcattcaccgaacgcacgtcccttgtcagaatgtccaaaaggtgcaggaagaaaggcaggctcttcctccagagcctgaagccctgcactaggcgtgcggtgcctcaggagcaggagcctcacggcccccaacagaaattctgatgcccagggagacccctgtgagtgcccctgacgtctagggggcacctctggcccacccttcgaaggaggcgtgtgatgggaaaggcagctggtgtggatgccctgggacaccgcacgtgctcagaaacgcggcgggaaggtcaaagtctcagagcaagcggctgggctgctgacctaggagtgtgctcccctggcttgaggttgggcgtcctcaccggtcactctaggggcctgaccaggtctgaggaagcccctcccagctacttactgaagtagaagccgcggtccccacagacgaactggagggtgtccaccagctccccgccgcacagggtctcactggggcggtaagcagcaatgcagcacgaggcgaaggccaagaaggtgagaagcaccagcatcgacttccccattgggattcccattggtgtctgggggcgggagagaagtggcgtgagcggggcagccaggccaagccccaggccagaggtgcccctcccaaaccaaatttgccaacctacaaattcagttgaaaattgaaagcacggctttcctataaacattatttttattacaaaagtaacacacaggtcataatgccgaggtgagggcgcagggccatgtgcagaatgaagcgtccagaagcacacagaaaaggcccagttccttccatttgcaagaagcactagtaattttacacgaggggtgaccatctccacggtcattattgcaggagctcagcggcatccacagctgcaggggcccaggctggacacccgacctggcctccgtcctatgacaccatgggggcagggccagcccagcgtcacatcgccacttctcaggcctccagcgccagccaagatggcagacagccccacccctacagagcatgtgcatccaggaggaccagtcccttcctccccacaacccccagctgagcagggggggtccaggaggaccatcgccctcaaagcagcaggccagtcctgctgggccagccccgcccctccccctggcttttccacctttccagtctgcagctgagccaggcctgggtcaaggactccaatggttaacacaaccacgccacccatgctcta

SEQ ID NO: 75 - DNA, 6235 bp, Homo Sapiens
cttaaggagtactacagaagcaatctacagtctctattgcagtttgtaaccccctccccctcccccctttaatactgaatgagatcgaatgttaggtccatgcagttcttggtcaatgttaacgaaaagtccaacgttccgttcgcgcggggacagcccgtccgcaaagcggggcagcccgcaggcggccgctccctggctccacgccaagggagggcgcgccaagtccttcccactcgtgcacactgggggcgccgtcaggacgcaacccagtccaacttggatacccttggctttagttctcggacacttcttttttctctccgtcgcaacttgtcaagttctcaagtctgtctctctgtgttattttttttcttcgttgcccctcagcccccgacggtctctcttcaaaatgtttgcaactgctgcgttagcatgagttggcacccactgttaacgtggttcatgactttctgtttaagctgtgccacctgttccctgagcatgttggccgtggacgccagctccgagttctgagctttcaaggttttcactttttcctccagccgggcgattctctccagcttcctttttcggcacttggaggcagcgatgcggttcctcatgcgcttcctctccgccttgatccgctcctgggactccatgtcgatgggggacaggggcggtgtctcgccgggcatctcgggcactgtctgaggctcctccttcagggcctgcagccgcgggtgctgcacgggcatctgctggggcaggtggtgcggcggctgctgctgctgctggggttgcgcgggaaaggccaggccggccgcgccgtaggagggcgccccgccgccgctgctcagcgcgcctgggttgaagttgctgaggtttgcgtagaccggcggctcgctgtgcaggctggcgctgaagccgccgctgccgctgccccctgccaccgaggctaccgcgggagccaccatgcctgccccgttgaccggctgcgccgccgacgtgacgctgggcagcgtgttctggctgtgcagttcggccagggcgcgcacgaagccctcggcgaagccctcctgctcatctgtcacgttcttggggcacaggaactgggtgggggtcggcgtggtggtgatgtgcccgttgctggactggattatcaggcgctccagctcgggcgacgccagcttgagcagccccacgtcgggcgaggtgaggaggtccgagttcttggcgcggaggtgcggcttcaggctccccactgggtcggccaggttcagggtcatgctctgtttcaggatcttggggttactgtagccataaggtccgctctcggacgggaggaacgaggcgttgagggcatcgtcatagaaggtcgtttccatctttgcagtcatagaacagtccgtcacttcacgtgaggttagtttgggctgcgcgcacaagtttcggggccgcaacagggctgtggcaagcgggggacacccgcgccccccggagcctttgacagggaaagtttctctaagagcgcacgcacccgctggctgtcgtccccgctgcgccctcctcaccagctcgctccagggagcgcagggttaattaagatgcctcccgcactcttacttgtcgactcgcgcgcgctacccggctttgaaaagtcgcggtcactcactgagcgctcttcgtgcgcagcggttcctcggagtccgcaggcgaactcacttcccagagcagcggctctccccgcggagcggatcagtgcggaccctgcagtggccggccggcggcgggtcttggccgcccggactccgacgacttgtcccctcctccgctgctagggggagggggcgcccggcagccgcggctcgcgctcgcccaagttcaacaaccggtgcgagcgaagctgagcgcacgtccttcttctcttgcgtggctctccgccgccttctggtctttaccgccgtggagaagcctaagacgcaggaaaggcttgcaaaagttggctccgggactctgccacttgtctccggtcctcccagccgggaaagttctttgctgctgcagccgctcgccgacttcccccggcgggcgcgtgggtaccgctgctttccgccgctgtcaacagcgcctgggcagcagggctctcctcccgggggcggctggagaccaggctctctggacactcccgaaacaccagcccgggagccacaggcgctagctctgggcagttagagagaaggtgaaaagaaaataagatttgcagttcggactatactgccgacctggctggctggctgtgtctgtctgtctgcctgactccgcgcacctccactcccgcctcgctgcttcagccacactcagtgcaactctgagcccttatccagcccgagctcaacacttatctgctaccagtcaacccctaaaaatagcccatgatgtcaccccaaggccttcccattggctcgcgtcgctctcaggggggcgggcccgcccgtcaccatggagactccaccctagaagattcttctctgggcccgcggaggctcacgggatgaggtaatgctccgctgccctcctacagtcgggcccttctttctcctaccctcccccctgccgcacgcctctcggccctctcttccccggtcccctccccgggccgtttttcccggcccgcccggtgcattgtgggctgacgtcttggggtttgactgtctagtgacggtggctgccgcgagcgggcggacgctcgcaacctctgatggaggggggctcaagttcacggctgcggacggggatgcgggggatgcagggacccgggaggccagggaacctggccagttgttttgggccaggggtgcgggcgaggggtggttgttgtttccccacttgtggggcccgaagtcatccaccggcggccgccaccgcgcggggctggaggctgagaatccaagtacgctgccacccccccgcacttccgggggggcgggaataccgcccttaaggtggctctgtgaagtcccaggtgggggcgagcctaaggggacttaagtttaggggcggtctcccgagagtcggccccccacgttgagaacactccgaagtttgcatctcggtcaagttcaggagcgacggtccgcggggtcgtctggctgctcgtagaagccgagagatttgtattgcccgaaactggacgctcagctgagtctccgttgcaccccacttcatcctccgggaccgtgggggaaagggcgcgggggttcacagctttgcctcggaggggcagtttttatagtgggcgcaattggtgggtaacagggtccagatgggaacaagcgtgtaggcgatccgaaactcggggaaccccggtgttagtctactccccctcccgcccccggacaacacgcacacgcttaacacaacacgcacaacataacgcgcgcgcgcgcgcacacacacactccatccgcgccgagttgcttccgggaaaacaagcccagaaggcggcggacactcgcataaagtcacgcagtagtactcggagcccggggtagaacctggacttcaaatctctgcactcccggccgggtggtgggcgcatatcctgggtagcctctaggaagcgctagacacatgtaagtggttccttttccgcggttattttattctccccccgccccccaccccttagggacgaaagtgtgtggtggaaagaatcccgaagtcgggaatcctggttctttcgtggccaggctaccacagtgtgaagcaagcaaatcacggaactcctccgagcttcatttccctcatctgcaggtggggccggtgccgtccacctcactgggctgccaggagttagtgtgacagggtcgcctgcagcactagggaggtggtggccaaacagcccgcttccctcccctgcctcgcagtttccatcctcgcagagcctggataggatgccaggatataagagtgcgatttggcaggaccaggtgtactttcctgtgagaagcatcgaggggaggaggggagggggaaccgggttagaagtcagatctttcccaagcctctgtctaaaactggggcttgaagttggacctgcagcagtttaagttcctaggttctaaattcagacttcgctgcttctgaacttggaattcagccttgggttcattgcccccagccctaaggtatttgcggctttgagtgttcagaaaccaacagcagctggtatcagtgggaaacctgccaacttttcttcactccgggcactcacctagctttcactgatctgcagagggtaactgaaagcctactgtgagccaggcactgagctggggagggggtggggtaggtaggtatacagtgatgacaagatccagttgcttcctcaaggagagaacattctcctctgtctgttgccctgaatcattttctgttgtattcagggagttggtgttctaaatattttttaataacagtaataaaaatcagtttcatgtattaaacacttattatctgccaggcattctcctaagcaatttaaatacgctgttttctccccacaactgtcttgagagacatatattattatccagatttaacatgtgaggaaataggcccagagaggttaagtatctttgttgaggtcacacaggcagctggaaattgacctcaggtctgtgttacattcctttgtattttctctactctggcaaactttcttgtggagtattagttatctgcagaggaaatagcgcttgtggcatagaagaaattttcttgcctgatcctctgactgtaactccgttcagagctcttgtatttagaaatttcaagacttaggactttgcataaatatatatcttttgcctaaggttctgtgtgttcctctctgcctcatgtggtttagtaggctgatcttctccttatgttgagaaatagcatatttcatccaaaaaaataacaaatctgttcatgttaacgcccctgcttggaagccttcattggcttttccttacaatcaggagagttccgattcctatgccttggagaaggggcttttcacaatccaactccttctctctccagccttatctctcactcccagttctgtcaggaaaggcagtgttatgctgccctaacaaacaaccctaacatatcagtggcttattccagtgaaagttggtcatttctgctacatgaccgttgtaggttggcagggtagctctgctcattgtagtcactaaagggctcaggctgaaggaggcctcgtgttgataccccttttcacagctatcctgactgtggggaaggaactcggaacatcatggctgtcagagcatccacttatggcacacatcacttctgcccatacatcattggccaaagcagtcacatggccatgcctctttagatcactataatcctaccaggtgtctcaaagggctctccaggaatatttggggaataacactaaagactctgtctccctttctgttcaccaaatgtttggtctactctccttcccctggtggaattccctcattctttattcaagggaaacaaccttaaagacccatccagtcacagcaccaagctgccctgcccattgttttccatgactcctggatttgccctcggagagtcttccttttccacagctaaagcaggcattggaaaatatgcttttaaataagcttttaaaagttggggagatgcagagtgacattaagtcttgaatatgtgtaggtaggcttcttatctatctgatatgaggtgttccatgtgacaatagccacaaagttcttttccagacatacttctttggtttgccatatctctttgctttcctgctctcctgcctgttgactcctctgtctctcttttgccgtctcactctcttgctcttcacttgattttgagcactttgggcttattgggttttgatgggagagttagacctttcttccttttcccagagccattttgtccagttgaaagtatatactgggtaagatcttaattgatccttttttttttttttctgagacggagtttcactcttgttgccctggttggagtgcaatggcacagtctcggctcactgcaacctctacctcccgggttcaagcgattctcctgcctcagcctcctgagtagctgggattacaggcatgcgccaccacgcccggctaattttgtatttttaggagcgacaggatttctccat

SEQ ID NO: 76 - DNA, 6140 bp, Homo Sapiens
actcgcctgagatctcacaaatgccaactggaacctaagctgggtcccggtctcccaaccagtgacactctgcccgagatgtggttcttggtctcttgtgtgtcaagacacccctgctctcccacctcagcctcagttcccttcagcaggttccttcaggccctgctgaaacgtctgcatgacctcccacaaggcaacgtgacagctaaaaaccaaaccctggccggacgtgggggctcacgcctgtaatcccagcactttgggaggccgaggcgggtggaccacttgaggtcaggagttccagaccagcttgaccaacatggtgaaaccctgtctctactacaaatacaaaaaagtagccgagcatggtgggcacctgtaatctgagctacttggaggctgaggcaggagaatcacttgagcccggggaggcagaggttgcagtgagcctagatggcgccactgcactccagtctgggtgacagagcgagactctgtctcaaacaaatgaaccccaacatagctgttggtggcaaggcctttctccatgaccaagggacggtggccattctctccaagtttcttcatctgtaaaatgggtacaattcagtggccctccctaacagggctggctaggtacacatggccaccagccctacttgctgtgtgacctcggccactaatgttcacatccctcagggtccccaatgagttggaagcccaaagcgcagggtcttaacagcaaagggcagagcaggcaggagaagcaggaagcctcgggtcaaagctctgaaagtgagggagtccaaggtcagactatctctgcacagtctccttaaaaggctgtgtgatgtcaagccagttgctcaacctctctgaaccttagatttcctcaaagtagggagtaggatgttgggaggaggaggagaagcgaacttcagggagatacttggaaaatcccagtcctggaggcagacctcttgggttagatcccacctgtgccaacttcctcctggtactgggtccatcagcttgtcctgggcctcagcatcccccgatccaccaaaagagaaaagcttacactgtaagccaagcactgctctgtaaacataaactctcttaatcgtcacaactttatggggcaagtttttcgactgttctccccattttatacggacaggcaaaccaaggaccaaaaggttaaaaagtttactaagtttctgtctcttccttcctgctttgggctggggctgtgccctttccacctcgaaatctctccttcccaaaaggcaagggggcattagctagttccaaacgcagatcaaagaccccaagacccctccccaacctggacatcagccggccccgcgccaaggcgcgtctagggggcgctcgctgcgcgccagatgtgcgggccgctctcagacacccgctctctgctccctccaacaaggggaggagctagggacagagggaggagagaaaggcgggggtgtaggggggaagcgaaccaggccccgcccagcccgccaggccccggcgggggaagaaggaggcggagagccgagctggcgtaacgagactttactgaaaacagaaaaccgggcgaaccaaggattacaaacaggaatgtggactcgtagcaaaacaaaacaaaacagaacaaaaaagggaggggggaccggtcgaaagaaccgaaggggggagcgagatcgaggaaaggggcggagaatttttttttcttcttcccatttctttaaaaaaccaacacaagaaaacacacacacacacaaccaacgtttgttcccgagtagaaacataaatagggcagaatcgaacactctgttcttctctcttccaaagaaaaaaaaaaaaaagtaaaagtaaaggaaaggcagggtttgaggctgcgccccctcggagcccccttccgcggcgcggtgtacaaaggggcagccgagacgcgcgggtttgtgcaacacggggcggccgcgcgggggaaagaggcagcgcgagggcgggggggtcatgcgctcgcccccccgggagcagggggtccagcttgtcgagtcctgggcaccctcggggggggggaatccccgggggccgcgccctctctgagttcctgggcacactcggggagggggggtccccagggccgcaccctctccaagtccggggcgcccacgacacccccccgcgagcccgccccttggggagggtggccgcgcatgcgccccgcgcgcggactcagtacgcgggcacctggtgctggggcagcagctggcagccgctgttgacgtggctgaggactttctgcttgagctgcgccacctgctcgcgcagcaggctcgccgtggacgccagctccgtgttctgactcttgagggtcttcactttctcttccaggcgcgagatgcgctccagcttgcgcttgcggcacttggaggcggcgatgcggttgcgcagccgcttgcgctccgccttgatgcgctcctgcgtgtccatgtcgatgggcgacaacggcgggctctcgccgaagctcggcacgtcgggcaccgtctgtggctcgtccttgagcgcagccaggcgcggcggccccaacgcgcctgggggtggcggcggcgggaagggcacaggttcggcagcgaaggcgaccgtcgcggcgccccccgcgcccccggcgccgcccgcgtagctgctcaggttcgcgtagacaggcgcttcgggcgcggccgccgccggggccagctcgccggggggcgcggagcccgtggccgtgcccgagggccccccggcggcggcggcggcggcggcagcggccgcgcccgcgccgagctggttctgcttgtgtaaatcctccagggccttgacgaagccctcggcgaactcctgctcctcgctggccgccaccttggggtagaggaactgtgagctcgtcggcgtggtggtgaccagcccgttggactggatgatgaggcgctcgagctcgggggaggccagcttcagcagccccaggtcgggagaggcgagcaggccgtcggggggtgccgcgctgggggcgccgtcggcgcgcaggggggtaggaggcggcgcggccgcaggcttgagcgctgccgccacctgctcactcaggctcagcgtcagcgcgtccttcttcatcatgctgccggccgcggccgtcgggggcgccccggggaacaagcggcccggggacgcgaagctgccgccgctgccactggcgccgccgcccaggccgctcagcgcctcatcgccgtagaagggtgtttccatcctccgcctcccccgccgcgccggcccgggggggagtggccgcggcctcccggggggcccgcgcccccccgtccgctcggccctgcgcccgccccggccgcggccgcagcgcccggccctccactggcggcggctcctgcgccgcgccacttgtgcgccctcttatagcctcggctcggcgcgatgagctcaccgcccccgttcgccattgggtgcgggtgacgtcgctcatttgcatggaggggcggggccaagccgccgacgcccgcccggccgccgttgccccggcgacgcgcggtaaacgccacaacagcgcgctgccttgtgggttgacgtcatgggggcggccgcgcgcccgggccgggtcaccccgccccgggaccgctgtgtacgaccgatctccccggcgccgcctccgccaaggcacgtcccgggtggcgtgatgggcccgggccaccaggcgcccgcccgccccgaggccccgccccgtgtccgcgcgtggggccccggccgggcgggggcgggggcgggggcggtgccggcctccggggactggagggggatggggtcccgcatggctaaataactccttggcgcctcctgctctgctgtgccgccagggcctcccctagcgcgccttctggagaggctttgtgcggatacggggctggaggcctggtggggctgtgtccgggggctcgccgggggtgtggggaggtctgcgttcctcaccctccctccttccttccctccctccctccaccccgcgtgtgattgctcaggaagagacgggaggggagaggagggtcgccagaagttgctgaaagcgcttggatcctgatcattttcactgagtgcgttctagaaccaggagtcctacttcctgcctttacagatgggaaactgggctcagagaggtggagtgaccatcccccgagagttagctaggagtcacagcagggcccgggctgtgactaggcctgagctcttgtccacccttagaaccctagaacctgggagtccaggcccctgcgcagccccttccttccgccgcccacgttttaaccccaggtctgccagggctgtgatgtcctgggcgagggtgcccaactccaggggctgggctgatgaggcaggaatgccgggtataattattacatgcttgttaccactatcatggctgttagggcttaatgagccactattaagactggctgggaagggggtgtgagggaggagagatggacccaccccaccaatactcacaagggatccttaggacatctggatctgacctacagcctctgcatgcacccctccagctccccacctctgtctgaatggagcccacaccctcctttccctgacctccttcccctcactctctctgatccttggcctcccagttgcaggactaatcgtacctctgggcctttgcacgtgctatgctctctgcttggtactcccttcccccagtgcaaagatgtgtcttcaggaagtgccccaccctcagactttactcctttattgtagcctctgaatctgccagaatgatggagtggaccatagtccctgaaggtcagggacattgcctatgctgagcctgctgacagggcctcgcatagaatggatgctcagtattaaaggtgaatgcggggctgggtgtggtggctcatgcctgtaatcccagcactttgggaggccgaggcaggcagatcacttgaggtcagcagttcaagaccagactggccgaaatacaaaaatacaaaaaaaaaaaaaaatacgaaaattaaccgggtgtggtggtgtgcacctgtaatcccagctactcaggaggctgagacatgagaatcgcttgaacccgggaggcagaggttgcagtgagctgagattgtgccactgcactccagcctgggagacagagtgagactccagtctcaaaaaaaaataaaaaataaaggtgaatgcaacaaaaggttgcttgtgtgggtggtctctagcctcagtttgtctgcctggccagtgggcatgcgttactccttttctatcctccttactcacctggctctgcccccaactggggcatgaaggccataagggaggctgtcctcatcaccaagagaggtggcctgtcggccacacgcggtgactcctgcctgtaatcccagcactttggaagtctgaggcaggcatttgaggtcaggagtttgagaccagcctgaccatcatggtgaaaccccatctctattgaaaataaaaattaggctgggcgcagaggctcacgcctgtcatcccagcactttaggaggccaaggcaggctgatcacgaggtcaggagatcaagaccatcctggttaacacggtgaaaccctgtctctactgaaaaataaaaaaaaaaattagccgggcatggtggcgggcgcctgtagtccccagctactcgggaggctgaggcaggagaatggcatgaacccgggaggcagagcttgcagtgagccgagatcacaccactacactccagcctgggcaacagagcgagactccgtctcaaaaaaaaaaaagaaaaaagaaaagaaaaaaaaattagccaggtgtggtggcaggtgcctgtaatcccagctagtcgggaggctgaggcaggagaatcgcttgaacccgggaggtggaggttgcagtgagccgagattgcgccattgcactccagcctgggctacagagtgagacactgtctcaaaaaaaaaaaagaagaaaaaaaaaataggctgggcgaggtggctcacacctgtaataagcactttgggaggctgaggcgggcaagtcatctgaggtcaggagttcgagaccag

SEQ ID NO: 77 - DNA, 6234 bp, Homo Sapiens
attcaaccccggtaccgatggcccccaccttttcatttcaggcttcttcctccagagtgcttgaggctccctggcctcctggcctctcccaggtccaaggcgctgactccagctcttggctccaacatttacaggaacactgggactaagaaaatcaattgtgttaatcagcaaaaccctccacttgagatgctatcctaaaagcaaactatatgtaaaacacttaacgtggggagctctgtaatatgtttcttttgttacacgaccatcacacatttgtccggagtttggggctttcaaaccacataaggttttatgtgatcgttataaaatcccttcatttcccaaaggtagggtagtaaggattaagtttgactactgaaggcagctttgttgtaagtggtctctaatgtcacaaaagtagcttgggaagacaggcttattaaacaaatttcttgggttgcaaatcattagaagcaatcgcatgtcatgttcatttgcttaacccgaaaggtatccatttggatgtttaaagaaactatgcagattaacattgttcccagtgcccacaagaaagctggctgatcttaaaggaaatccagggagctccttgaggaagtcggactgcagttgagcatacccttttgtggttttcccacctcttttgtaaaaagttcttcataggaatctgtgtctggaggaaaaggggttgtgatttgttaatctgaagatgggagacctcaaaggaatctcacccaaccagtcctgcactgtcatcctatgaacagagaagtcaggtggttgctcagtgaggggcagggctggcaccacatccgagcctccctgtcctgtgttccttactcttcagtggacccggcgacctcccggctttggagccatcctgtgttcctttaacagtaggacgaacacacaggcgatgatgagattgtaatgggacaagggggagaggcgtggggagctcttgatgaaaacttgggtttttgaaattaccatgatgaagggaggagcttgcaccagcaggtgtaaggagtgtgagtttgagttctgctcatcagacagcctaagcagtcacatccttgaatcctggtcttttgcaggccagtccttggtcaggtggtggcctttttcctctttcccctctgcactgagacccttatttggctcctgatcctggagcccctgacacagtccttaccactgaagtagctgtggcccttcacatagttcttcccaccacgccagcaaggggactgagttctttcagtacagccagggccaggtccacacatctccctgggaagccagcactttctctcgtggaccgcctccccattcccacagggccctcctaaagggcctttggatgaccacattggcctttctttcctagggtggggaattagagatgctaagactggccagtctctttttcttaagagtttagggattcgtcttaaaatattattcagataaacgtatgagtcatgtgttaactgcaaaactacttaacagcacacttgttagaatatcagtcggcactctgattccatttcggcattgtttttcctttggttctattaagatcccggttctaactgggtcctggtagtaacaggctgtaagtggccaggtgtatagcattatttcttagtagtgtggtgtggtgctggtggtttattttccctatgcacacatgccctaatatggaaggatagtttgtacacacgtagggtacgttatcatgagactcctttacagagtatgaaactgaggattagagaagtcagacgagtttcccgaagtcttatagaaggctaatggaaaaaaccagagccaagggcaaacatgtttcatctgtccttccacattagtttaaatgtgaatggctgcttggaacacagtgttgagaaggattccgaggctgtgtccaggttcagtggggaaaaagtgccttgatttgaccattatatcgtgtactcagggcctagtttatttcccacaagcagctatttaaaacatgtctcatccaaggcagggtcggggtggggaacctcagaggatcaatgatgcagcctgtattgtcaccagggctcatcccaaagcaaatcctgctgaagttctcctctgaacaacccttatcactcatgctaatatgttggatcctgcaagtcacaaatacgaaggtatgagcattggccgaatcccaacagggaaacttcaccgggaaggtgaagacccctttccattaagataacaaacagaacctagaaggcccgtagcatggtggcttagaacatgtgggccttggatgggatcctgccaaggggtgtgtgacctctccgaagcctccagggatgatactactccctggggtgcttatgccaaccacgttagagacaatggtttctgtacccattgcctggggctgccataataaagtgccacacactgagtggcttaaaacaacagaaacctattgtctcacacttccgggggccagaagtttgaaacccaggtgtgttaggatcctgctccctctgaaggctccagggaagagtgtcctctgctccctccgaaggctccagggaagggtctgtcctcttaggcttctggtggcttgcaggtgcagccctccaatcctcctccccaagcggccttctgcctataaggacacgagtcatactggatgaggggcccactaattgatggcttctgtaaagtccccatctccaaataaggtcacattgtgaggtactgggagttaggactccaacatagcttctctggtggacacaattcaactcctaataacgtccacacaaccccaagcagggcctggcaccctgtgtgctctctggagagcggctgagtcaggctctggcagtgtctaggccatcggtgactgcagcccctggacggcatcgcccaccacaggccctggaggctgcccccacggccccctgacagggtctctgctggtctgggggtccctgactaggggagcggcaccaggaggggagagactcgcgctccgggctcagcgtagccgccccgagcaggaccgggattctcactaagcgggcgccgtcctacgacccccgcgcgctttcaggaccactcgggcacgtggcaggtcgcttgcacgcccgcggactatccctgtgacaggaaaaggtacgggccatttggcaaactaaggcacagagcctcaggcggaagctgggaaggcgccgcccggcttgtaccggccgaagggccatccgggtcaggcgcacagggcagcggcgctgccggaggaccagggccggcgtgccggcgtccagcgaggatgcgcagactgcctcaggcccggcgccgccgcacagggcatgcgccgacccggtcgggcgggaacaccccgcccctcccgggctccgccccagctccgcccccgcgcgccccggccccgcccccgcgcgctctcttgcttttctcaggtcctcggctccgccccgctctagaccccgccccacgccgccatccccgtgcccctcggccccgcccccgcgccccggatatgctgggacagcccgcgcccctagaacgctttgcgtcccgacgcccgcaggtcctcgcggtgcgcaccgtttgcgacttggtgagtgtctgggtcgcctcgctcccggaagagtgcggagctctccctcgggacggtggcagcctcgagtggtcctgcaggcgccctcacttcgccgtcgggtgtggggccgccctgacccccacccatcccgggcgagctccaggtgcgccccaagtgcctcccaggtgttgcccagcctttccccgggcctggggttcctggactaggctgcgctgcagtgactgtggactggcgtgtggcgggggtcgtggcagcccctgccttacctctaggtgccagccccaggcccgggccccgggttcttcctacccttccatgctgccagctttccctccgccagctgctccaggaagcttccagaagcccctgcgcgggccttggcttgcagcaaccctttagcatacttaggcagagtcccatatttccttcctgctggaggccaagttctaggggccttctggttactatggctggtgtttgtgtacatcataccctaactgtattcatcaacacttagagtaagcaaggctcgctggagagccacacacactgggcaccgtaatgtcggttataacaccgcagaggagttctgaactatgtatttcgcactcctgggttcatcatctcctgaaatctcagggtggtgtttgctctcagttgcttcagctgagtagctggctttctgtcctggaaagcagactttgtacatgtgtgtgcaacctatgcctgctgagatcatcatcagacagggaagcggcttggtccagagagctgttctcagtagaatgttaagcacagagagctgagaattagactggttatttacatagacatccaaatagaaacctatagagtatctgttaagtcaggctctcccgtcatctcccccatccctgggcaggtgtctaggagatggttttgttattttcagggccctctcaatggctaaaacactctgggagatgaacaagattttaaaaacccaaagcttagcgcacctggtgggtgggggtgtgaaaactttgaaggaaaccgcgtcaagagcctggctgattgttaatatcacgttaactcagagggccaggatacttgcccagacccggagtctgcctgcaagtagcagaggagagctggccttgctctgccgcgtgtctttcttcctgggccctctgtctcgggttggaatttgaatagtggagtagtgtctgccacagtcaggggcctggatgaagtagaccaccagtacggagctatactcaggtacttttcaatgtatatatcttcattaaaaaaaaaaaatctgggccaggcacagtgggtcacgcctgtaatctcagcactttgggaggccgaggtgggtggatcacctgaagtcaggagtttgagaccagcctggccaacatggtgaaacccagtttctactaaaaacacaaaaattatccaggcgtggtggtgcatgctggtaatcccagttacttgggagactgaggcaggagaattgcttgaacctgggaggcggaggttgcagtgagccgagattgcgccattgcactccaacctgggcgacgagagtgaaactgtcctgaaggggaaacaaaaaaatctgtatcaaaataaggatttaactaatagtattaggcactactttaaaaaggctttgctgttagtaaggttgaaagaaatagagccctaggtatacattgggtagcaccttgttcagctgctcagattcttgaaccttgttgaggtcttactttgatatcacctgggccttacttttcgttgtttgggtttcctccccaggtgtctcaatcagggcctcctctgtccttttgcagggaagaagggggtaggaagggcctgaaaaagaacttgccttccccattgccccctcagagtttgttcctctccagtcctcttcccaccctttcttaggacaccaaaaccctgactctttcagtattttataataaaataaagttactaaattgtctgttctgttttgcagaggacacacatttaggagccagtgattcagaccttccatttttctttttggtgctaatgctcttttcagtatattctctttgatagaaaaaaaatggaggcaaaactgaattttctgcattatcttttcctttagcattattcttgtttctgcacttcattctgacccccttccccagcataaagttccatgtccagatccacttgccctgagatttttgacttccgtttgggactctagtccctccaggggacacattgagcctcccagaccctgcagggccctgtgctcattcggctcttgggctgttgctacggtccttcctgaccctctgtttcctgggacaagtagtttttaatgcagctactttctgaaagagctggggtcttaccgcagaatattattttattatttttagagacaaggtcttggtctttcgcccaggctggagtgcagtggtgagatcatagctccctgcagcctcaagctcctgggctcaagcgaacctcctgctttgacctcccaagtaccagggactacaggtgtgcgccaccatacctggcta

SEQ ID NO: 78 - DNA, 6205 bp, Homo Sapiens
cccagctactcgggaggctgaggcaggggaattgcttgaacctgggaggcagaggttgcagtgaaccgagatcatgccactgcactccagcctgtgagactccgtctcaaaaaaaaaaaaaaaaaaagaaaaaaaaaaaaagaactgaagtgcttggagaccagtgtattgtaatatctatacagccaagcaggtattttcaactgaactttaaaaaagtactatttttgaaactttctttagtttagatagggccagccatttgggtagaaaggaaaagaaaaacaaaaaattggaaaaggatgcatcagtatttctttcagaaacaacttaacactaggaacagaaggaggattttattcaccaactcctaataaccacctgatgttgctgttgggctggccaaatatctgccaacattgatgatcctttcattcaccactagagagaagtagagggacctgatgtttagagaagcagtaaaacccatttcccattttctttcttcagccggatggaagtacttggaggctggtctcatattctagcactttagtgctggtgatgcagattatctctgctccagagtaactctgtgccatggaatccaagaggattctgtcgcaccaggacaggaatgcacccttgtttcatttgcttccatgaaagcagatttcagagattctcagatgctatgagactaattgtcacttagggtaggctccaggggagggacagagaagggcagtgctaataacagggactctggagacaagatcagcaatctaagaaacaaatgtgagacattttacccctccctaatctactccccttttaaaagttcatcttcattttccctttttctaccacgcagtaattgataattaaacacagctctggtttttaccatgcaatctagtagaacacctagacatcaggaactccttatctttggttatttatacaataatgaaatctgtagttcacgctaggctgtgtggacagtatctgcatctctggaaatcaactggaggcctttctcttactcttttccggttgctttccatttccttttccactgtggtccttgcctttcccaagctgaccagaactatgcacaaaaccagtcttcaataaatatcaacactgaagcttcagcaggttgttaactcctgcacagctatcttaaatgctgtatataagtgcaaagttttatggagcctcagaggtctctaagaacactgtaaatatcccaggtttaattagtagtcccggagttaggtaatggcctgtggctttctgcgctaggtctcttgaggtttctagtcttcagaggttgcctgcaactatgatgtgcacatatacagtactctttctcaaatacagcataaaccctctttagactttgctaggcacttacaattattgaacacacatgcagattgattctcattctctcaaagtttgaaaaacaactcagtgcttcaacctaggtctcgttagatattttttgactcaaattgtcgtctgtagttctacttcctaagggaaatgaaaaaacaataaattcccagactggtgttgatgctcattctctttaagcgggtcgactacttgctttgtagatccttgacgggtggggtgcggggtaggagtgcgatccaactctcagcatttccgaatcagctctctcacggtgacaggtcagcccaatcggggctgtaaacagacttgacaggtttgttctgggctgacggccattgactaggttctcagaccagataagtcacttggctgagtccacagtaggtggggcgcgctcaccagctcaggggtagtgactggacgtttgttgcaacatcggagaatgcacgctctgggctgcagcaggagataccctcaagcacagaaccaaaagggttcaccctaagcggcagggcatcagcgatggagaggcccgagagccctagcgcccagctccttttcccacgtttgggaaggcgcagaataggtcgatgtagagcaaggagtgagtctcaggtctcagtcctttggcttgctcttagggtagcaggcgaggagtggcaccagtttggggactctctccccgcgttctgtaagaatcggcggcagccagcaggcggggaggcgggggcacgtgtttggatgtgggtgcttgtgtaaccagttccccaagcgccagccccgacagcgctccttcgggaggctggtccgagcccctgtttccgccgcggcgcaggaagggttggggttccgctgcctgcaccaggcaagagcaccccgagcaaaggaagaagacgacttgcctccggagctatcactggggagtgggaatttggaaagttccccaactagggacacacgtgacctccttcggaaagtagttccgactgtggcccgtgtatccttccacctccttttgaaccctcctaggtctcctcgccccgcccactcgctgggctgcagcttcctaccgttccgtactttccactcaacccggtaaccccaaacgtgcacggtccggccggggcgcgcggagcctggccccgggcgatccatcctgccgggttttcacggcggccaagggggggcggggctaggtggtctctgagaaccgagcttgactccgacgccgcgaaccgacctggagcccgaggggaaagatgctcgactctcttgggggcaccggagcgggcgcaggagaggcctgcggggtgcgtcccactcacagggatcctctttcagttcatttagataggtgccctttgggcccttgaaattcaacggctatgtgttcacgttcagcacgctcggctgagagctttcatttttagggcaaacgagccgagttaccggggaagcgagaggtggggcgctgcaagggagccggatgaggtgatacacgctggcgacacaatagcaggttgctctttgtgctaagactgacaccatgaggacacagatttgggggaagggggaatctctaggcaaaggctgttacagtcaaatctctgcgaacgattgtgatccgacagcggtgcaaaaggaaagagcgaatgcagtccacgccgcggaaatctaggggtagaggcaaggggggagggtattccccttgcagggaccgtccctgcatttccctctacactgagcagcgtggtcacctggtccttttcacctgtgcacaggtaacctcagactcgagtcagtgacactgctcaacgcacccatctcagctttcatcatcagtcctccacccccgccccacaacagcctaccctgcctccggctgggtttctgggcagaggccgaggcttagctcgttatcctcgcctcgcgttgctgcaaaagccgcagcaagtgcagctgcaggctggcggctgggaaccggcccgagcaagccccaggcagctacactgggcatgctcagtagagcctgcggcttggggactctgcgctcgcacccagagctaccgctctgccccctcctaccgccccctgccctgccctgccctcccctcgcccggcgcggtcccgtccgcctctcgctcgcctcccgcctcccctcggtcttccgaggcgcccgggctcccggcgcggcggcggagggggcgggcaggccggcgggcggtgatgtggcgggactctttatgcgctgcggcaggatacgcgctcggcgctgggacgcgactgcgctcagttctctcctctcggaagctgcagccatgatggaagtttgagagttgagccgctgtgaggcgaggccgggctcaggcgagggagatgagagacggcggcggccgcggcccggagcccctctcagcgcctgtgagcagccgcgggggcagcgccctcggggagccggccggcctgcggcggcggcagcggcggcgtttctcgcctcctcttcgtcttttctaaccgtgcagcctcttcctcggcttctcctgaaagggaaggtggaagccgtgggctcgggcgggagccggctgaggcgcggcggcggcggcggcacctcccgctcctggagcgggggggagaagcggcggcggcggcggccgcggcggctgcagctccagggagggggtctgagtcgcctgtcaccatttccagggctgggaacgccggagagttggtctctccccttctactgcctccaacacggcggcggcggcggctggcacatccagggacccgggccggttttaaacctcccgtgcgccgccgccgcaccccccgtggcccgggctccggaggccgccggcggaggcagccgttcggaggattattcgtcttctccccattccgctgccgccgctgccaggcctctggctgctgaggagaagcaggcccagtcgctgcaaccatccagcagccgccgcagcagccattacccggctgcggtccagagccaagcggcggcagagcgaggggcatcagctaccgccaagtccagagccatttccatcctgcagaagaagccccgccaccagcagcttctgccatctctctcctcctttttcttcagccacaggctcccagacatgacagccatcatcaaagagatcgttagcagaaacaaaaggagatatcaagaggatggattcgacttagacttgacctgtatccatttctgcggctgctcctctttacctttctgtcactctcttagaacgtgggagtagacggatgcgaaaatgtccgtagtttgggtgactataacatttaaccctggtcaggttgctaggtcatatattttgtgtttcctttctgtgtattcaacctagggtgtgtttggctagacggaactcttgcctggttgcaagtgtcaagccaccgattgctttcttaggctatctatatggtctcttcctgagggctattgtccgttaatacagaatacagtacactgttagtggattagcgagctcggtaatccggtctcctaaatgaacaaaaaagtagacgctttttgaggttgagcatatttcgattaaatcttggcttaggccctagatcaagggtttagatcagaataaaatgaaaattagtgttgcacgtacgcatattgcatcagaatcttgcagtgattgttttagtttcctgagttgcattgatagattcttttaaaatatgactgatttgcataactttagaagcagaatcattttcagtatatatggtgcacattgagggcaaaaagtagttttgttaatgtttaaacttaagttacctacaactttgaactgtatgtagaagttttgtagtttgaagtcaatagtgccataatataccttataaggcgttcttactagatctttgttatatttacctttttctctccctatggggtgatgtaggatagtgcttgaaatttgcacttcagtagcatttaatgttcagtgctcttgtcataaacatagaatggatattgagtagtttctgatcccagatggtaatgtgtaggttcaagggtattgtgtgtagcaagtgaagattgcagaaataaaacttcagttcatgcttgaaatttaagtattgttgtgatgccagaattgctgctcaccgtttttaggtttcaggtcctctgacaccttttggtatcgttaattttactgatttgtgtagaatgtcagttgtattttaccagctaatatctagaaatgctggcaagaggggtttactccagctttagattgtaggtatgttagcttttttcatacagtgtattaaatttactgagtcagcttgctgaataagacagaagcccaagaattttaacagtgtgtagctttagttgtctaaaagttaggccttcgggcttcaaaagttagtggtcatcgaaaagcattaatctttgcagtttcaggtacaacacattggttttgattagggatggggatggggccctctttttgcagaatggggaaagtattgacaggaattgagagctattggtaggccagtgtataaggtatgtgaaaacagaattaagttattggtctgaagtgactgaagcatttaggctctatcaaggcctaaaatttggtaatatgagtttggtaatgcgaattgtggcagtggacaatatttagttaaaattatgtaattgcataagtactagcacagtatttttaataaaagttatttcttagcaaatgtcagttgcattttgtctaaaggtaga

SEQ ID NO: 79 - DNA, 6176 bp, Homo Sapiens
tatttaaaatttaggccaggcacagtggctcatgcctgtaatcccagcgaggccgtgggaggccgaggtgggcagatctcttgcggtcaggagttcgagaccagcctggccaacacgacaaaaccccatctctactaaaaatacaaaaatcagccgggcgtggtggagtgtgcctacccagctactcaggagggtgaggcaggagaactgcttgaaccaaggaggcagaggttgcagtgagccgagatcgcatcattgcacgccagcctgggcaacagagtgagactccgtcgcaaaaaaataaaaaacaatagaataataaaataaaaattagtaggagagtgttctacatttataaagttaacatttttgtgagcaagtataactttaagagaattttttgcaagaatccccaggaatatatgagttcaattcattcaccactgtgtaagtcaaaacatttgatataaaacacttatcaaaaatgttctgctagccaggcacagtggatcacacctgtaatttcagcactttaagaggctgaagctggaggatcacttgagcccaagagttcaagaccagcctggccaacatagtgtgaccccctctctattatttaaaaaaaaaaaaagttctgcctggccagtggctcacccctgtaatcccagcaagcacgttgggagggagaggtggaagcaggaggatcgcctgagcccaggagtttgagaccagcctaggcaacactgccagactccatctctactattttttttttaattagccatgtgtggtggcacctgtctgtagtcccagctactcaggaggcaaaggcaggagaactgcttaagcccaggagttagaggctgcaaccgagctatgatcatgccactgcactctagcctgggcgacagagtgagatcctgttcctttaaaaaaaaaaaaaaaaaaaaaaaaaaaaaaaaaagtttgcattgttctgaaaaaataaaaaaaaatttaaaagtcattaactaagttaaactaaatatgttcaatcactatcagcttcaacatcaacaaagggagaaaattatcagcaagaatgaagactcggcaacccatgtacaataatccaaattcaactagttcactatctacaacaaagacagccccctcacaattctagcaacttttattttactctcatctctcaccatttccttcctgcaccccaggcaatttgctgctccccaaactcatcccaactcccacatggctctaagcctttgtaccagctgttccctgagctcctcctcacccgatgagcacttactcacaggtgtttcaaaactcgactcagaagtctcctcgagtgtagaagcttcctcaactcctccccaagcaaaactaactgttctaaatccccataacacttgataagccaattcttatcacactgcattgttttcacgccttaggagcgcagggagggcagagtctctccactcagcccacagaggaccaggcaagcagaaacgctcaatgaacgtgccttgaattcattttccacttagattaagtgaccccctagaacccgttcacatctcaaggatacactaagttccattccttcttcccaccacagaatgaataccaggggcacacccagagccctagaacgagaacaatgaatgaacacggccgcctcgcctctcacgacgtccaaacccctctctcttgggcatcgactcgctcgcagagcctcagcagctgcagagctgaagcgtcccggcggctctcgcgtcacacaaaagacagccctggctcttcattccaaagcgtcctgaggccaatcctctataagtatcccaaacctttcattaataacccagagtcctgatacccaaggctagtcctgatacccaagaagaggcccctgtgcctttgtggtagggcactggccagtttcctcctctcttacccgattcctcacgtcgtctctaaaagggtgtcacttgactgaagtaccctgagaaagggtgcaagcccgggtcccacattcggcggcccaagagaaaaggaattggcccatccaagtgacaacagatatggggcagctctgggcggattttcccactgccaaatatgaggaatgcgcatggcataagggtggcgttggcacgtttccgccaaacacaaggaaatttgagtgggatgtgggaactcggctcgccggccatgacaccggactccggggcccccgcccaacgctaccccagggtgacaacggcctggcccaagccctctgcccggcagccgcggggccgctccatcagcgccacccaggcccggtcgccctggaagccgatccctcagccccgccgcccggctcccccggcatccacgacccggtcctgccacctacctgagggagccaggccgccccaacgtcctgtcgttcggcggcagcttctcgcccgctcctcctccccgcggcgggtgagggagcgggaggcggtcacattcggcgcgtccccagcccaggggacggagccccgagcagcccccgcatcgtagcaaacgcgctccgcgcctcagggcacgcgccccaaagcccggccagctgacccttttcggggcccaaaaaaggcagcagaaagccgttcccgcctcacaatcgttttcctcttactcccgccatctaagatggcggcccaagcgcccgcgattaagactctcgggcggcccagacgagcgagccctcgactcggtgctcgtcctcccgacctgcgacgccaccggctctccgattctgcgcgagccctactggcagtcgacttctaacttggctcgggcatccatcgctctggcctgaactcaggccccgcccccggggcgtggcctagcgatctggtggccgccatttcgaagctgaagaggttaggcgacgctgacttgctttcaggagaggcactcggtaatcgagaagaaccggctttcggccagccaggagtggccagaggcctagaaggggagaggaaggcctgcctgcccagcattgcaaggcccagcgatcaccagacgtgcctcaggacacagggcacagtgtccaactttgacgcgtcctctccgggcactttaataccaaatcacggctccgccacttgacagctatgtggacagtccctgaaccttaaacggtcttttccttgtgtgtaaattccgagttcatttttcccccatcacattagcaacaagttaaaaaaactgataatatccggtttggtccaaggtatattgaaacctgttgtgtgccctcgcagcgctatcacagtggaacttggacatgttaaaagtatatatccttcctcccggcagtttcacttctagacactaattctagagaaataagtatacacatacacaaaaagctatgtgtgaagatatttaatgccatattatttgcattctggagaaacactggggatgaaatgaagattaataggaaactggttaagagaacgctgctacacatccaatctgggttgtcatccatccaagaatgaactagatagttactgaatttaaaaaacaacaaaaaaagggcccggcgctttttttgggattactcctgtaatcccagcactttggaaggccgaggcaggcggatcacctgaggtcgggagttcgagaccagcctgaccaacatggagaaaccccgtctctactaaaaatacaaaaattagccgggcgtggtggcgggcgcctgtaatcccagctactcaggaggctgagacaggagaatcgcttgaacccgggaggcagaggttgcagtgagcccagatcgcaccattacactccagcctgggcgacagagcgagactccgtctcgaaaaaataaataaatataaaaaaataaaaataccaaattagctgggcatggtggtgcatgcctgtcatcccatctactcgggaggctaaggcaggagaattgcttgtacccaggaggcggagattgcggtgagccgaaatcgcgtcattgcactccagcctgggcaacaagagcgaaactcttgtctcaaaaaaaaaaaaaaaaaagacatggctgggcgtggtggctcacgcctgtaatcccagcactttgggaggccgaggcgggcagatcacttgaggtcatgagtttgagaccagcctggccaacatggtgaaacctgtctctgctaaaaaatacaaaacaaataggccgggtgcggtggctcacacatgtaatcccagcactttgggaggccgaggcgggcagatcacgaagtcaggagatcgagaccatcctggctaacacagtaaaaccccgtctctactaaaaatacaaaagattagccgggtgtggtggcgggcccctgtagtcccagctactcaggaggctgaggcaggagaatggcatgaacccgggaggcggagcttgcagtgagctgagatcgcgccactgcactccagcctggacaacagagtgagactccgcctaaaaaaaaaaaaaaaaaaattggccaggtgtggtggtgcgcgtctgtaatcccagctactcaggaggctgaggcaggagaatcacttgaacccagtaggcagaggttgcagtgagccgagatagcgccactgcactccagcctaggtgacagagccagactctgtcgcaaaaaaaggaaaaaaaaagccattaagttaaaaaagcagaacataatgtatgatcttatttacgcaaacacaggaacacaagatacctacctaatactacagaatgccatgtgcactattacttttcgatattgagagcctattaggtaccacacattattttggatattggaaaattaacagtaatcaaaatccctgccatctagtaatgggagattaaaagaaaatataaataataaaattcaggttggatgtggtggccaaagcctctaatcccagcactttgagaggccaaggaaggggggtcacttcagcccagatgttgaagaccagcctgagcaacatgagaccccatctctaccaaaaaaaaaaaagaaaagaaaattagtgtgcatggtgacatgctcctgtaatccagctagggaggaggctgaggctggaggatcacttggagttggggatggcataagctatgattgcctcactgcactccagcctggacaacatagcaagcccccgtctcttaaaaaagaagaagaaaggaaaagtgaagcaaagtgagaatgacaggagtatgtggaccaacgtaaaaataaatgtaggagaaagactggccaggcgcggtcgctcacgcttgtaatcccagccctttgggaggccgaggcaggcagatcacaaggtcaagaaatagagaccctcctggctaacacggtgaaacccggtctctactaaaaataaaaaaaataaaaaaatttttaaaaaagccgggcgcggtggctcacgcctgtaatcccagcactttgggaggccaaggcaggcggatcacgaggtcaggagatcgagaccatcctggctaacacggtgaaatcccatctctactaaaaatacaaaaaattagccgggtgtggtggcgggtgcctgtagtcccggctactcggaaggctgaggcaggagaatggcgtgaacccaggaggcagagcttacagtgagccaagatggcgccactgcactccgtctgcctgggcgacagagcgaaactccgtctcaaaaaaaaaaaaaaaaaaaagaaagactagaaggtgtggaatgtggatagcatgagggggatttttaaaatgggaataataggccaggcacggtggctcatgcctgtaatcccagcactttgggaagctgaggcaggcagatcacctgaggttgggagttcgagaccagcctgaccaacatggagaaaccccatgtctactaaaaatacaaaattagccgggcatggtggcctgtaatctcagctactcgggaggctgaggcaggagaactgcttgaacctgggaggcagaagttgcagcgagcggagattgtgccattgcactttggcttgggcaacaagggtgaaactccgtctcaataaataaataaataaataataaataaaataaaatgggaataataacactttccttgcaggattaaatgagataaaacctggagagcacttagtgcagagcctg

SEQ ID NO: 80 - DNA, 6246 bp, Homo Sapiens
tgcagtcatcacgctattgttttaatttttttttccccatagcctccctctacaactaaaggataagcttttgagagcaaggactacaatttcttatgtctgttttcaacaggggttccttagaatgctagcatcctaacaaatgcttaaagactcccctttcttttaaatgcttttaaagtcaaagctgtcaaaaacacataattaacactaaactccaacttttaaaattctaaattgacctatatggtaatcggaattaaacattttcatctatatattttacaagagttactccatccttagttagtatctgtattaccaagaattcaagagtcattttcaaagaaaatcctgaaaagaaaatgaaaagtcccaaaatgtagcattataatctagcattacagatctctgaaataaagctaataaatcaattagctgaaatagactgactgattttcaaactatattaccaagatgtaaaacatacaaacactccagtaccacaagaggctcttaagtagctattataagatttgtatcatcatagctgaaaattaccccggaattttaaaatatttttcaaatcactccatgaagtgcttagaaagcacgacccttccctgaaagatgcataatcagctttcctctttacctacccgggcattctctacttgcaagccacaagaaaaaaaaaaaattaactttcaaaaattatctcccattcagctattacctagactaccctgtttcaggctagttcccaaagccaacatgaattgaaatcttgagttcaactaaaagtgatcattttatgttgcctaagaatataatcaatttcacataacatcatgttttgcgtgtgtgtgggttcttaaaatctcagttctttagttctctcagttcttctaggcaacaaattaatttgtctttgccctcatgatgcccctctttcccacaataaggaaacaatatagatatttttgttaaattctgcaagtatgtttaaacaagctatcattaaataccacatgaacttctccataaatagagatacactggaacattagatacttagtatatattaaacacttcaagagcatacttttcagcacaaacccaggacaagagtagtctatccacaaccctgaacacagcccaaatatccctattatttctaggaccatagccatctgcaaaagccaaaatggaaaggactaaatccacattcttctaactaaatccacagttatctaaatatgatggaaactaacgctagagtgttttaaatcgtcctttttaaggaacccgccagaacatttaacaggtaatgaatgcagtagcactccaaaattgaacttaaatgtaatgagccagtgacaacatttaacttagtatttggcactatgacaaaacaaatctcaatcaaaacttggacctattaatacttccaagttaacttttgattaaacataaattatacggtggcaggttggtaatgtcaaaacaggaaggttaagagataacacatcaaaccacttatccaattgaacacaaatgcatacagagatgttactgctgctaggtatttattggctcccactagtcccttctaaagagagaaatcaatggcagcctccaaatgtgaatggttactgaggaagttcatccacagattaagaacaaatattatgtgtagtcatacaaacaagaaaaaaatgttgggagggtgggacatttaacgtctctattaagtatatcaaactatgataacccctgagacctaaaatattctctcattccaaattccaaaaattctgcaaatgtgcataatggtttagtaatcaaatcttgtccttctctttattctaaaggatgggcaagtaaacactgtcatcactactttaacgtggaaacactcgagcacttgatgaaactgactaccaacagcaagaaaagtacaagaaagcagtttgaaatcgaatcatccaaataaatatcatattatctcaattcaaggttaatgagaccgggggagggggtatgggaggagtaaaaagggagctgcttcatccttgactgaagataggttttgcccttttccattgcctgtttatcaggaggtctaataatttcagatcctggtatttcgaggtttcttattttaagggcgaggtggaaaaggggtgtaaaataaaaccaatactcactgctaactttcatgctgccaaaagctgaaggctgctgcaccggcttgcagctctccgcaaaggaggtggttctgggccgccctgacatgatcactctcttcgcgaatcaccttttccttccttcctccttttcttccttttgtctttatgttggggtgttaggttaacgataaatgcagcattaagttctcccacagaagaaaaagaaaaagacttcgtcctcttggcttttcactccttttgtatactataaaaaacaaaacaagcgatatatttctccttcaagacagatcggcacggatatttaacatatagatgatttaggacttgggaaaaaatacaattctttcccctccctttcctgggaggagagaaaagagagggcaaatcctaaaaaaatatgtatcacgtgaaacgggggcaaatacttgattgaaaatgagtacttcgaatattatattttcctcggggattttttttccgagtcaatgaagaagggaagcggcggaaggatcacgagtctcacgcttgaagagaaagggggatgggtaggagggagggagagggagggagggggtggctcggagatgcgacgggaaacgctgcagctccggcaagccgcgggatccggcgggctgacggcaggggcccggcgaactagagggcggcggagtcgcgagtcagtcagaggcgggcggtggcggtggcggcggctcctctcctcattgcgccaggagcagctgcaggcggcggctggatccagcggccatggcggtggcggaggcagctcccttcagaccccaggcagcggctcctcgactgttccccattcgccggggacatgggaacccggcaaccgcttccgtccctcggggccccctcccccgtccgcggcaacagctcggccgccctcccgcccctcggctctgctcggtgcccgctcaggaagtgtccgcgctttgccccagcccagagccctgtcagcggctgcggggccggctcctcctcgcttccttccttcctttgtcacttggcccgggcggcggcggcggcggcggcggcacaagcccgcattcgcccgggtcaggagctgctctgtgtgaggagcgctgtctgcgcagccgccttgcacttccccactcctcctcccccctcctactcgtcctccacctccttcctcccccacccagccttacaccgcccagcgccccgccgcccgcgtaacaggcgtctgggaatcgccggccgagccccacgctcgcccgcttcggctgggagccgaagcccgaacggagccaatcacggacgtcgtttgtttgcggctcctcccggaaaaagccgatcagcctgagaaaccaattagaaagtgacgctgggaagccacgcccaaagagcggaaaatgccgaaggtagccgaacggaaagggtgaattcgccttgttcggtggctggctggaggagacattcgacaatggcaacagtggccaatcagagtcgccggcccttacgaagaggcttgaagagttgaggacggtgaaacccagagacgctggtgaaactgcacggctgggcgccgccgccgctttgtgattggctggaaaactccgctgggagcgtacctccttcggtgattggtgaagagaagggggcttccgaggacagtctggccagtcaggacttcccctccctctccaaggtggggagaagaaagcgaagggagggcgtctataaagcgctgtctcattggcctgaagcttaggcgctggagttggggcaaaagggagagggagggagcccgaaactcgcggcggcggccaatcggctctcactgccgtccaatcgcaagacctagctgcagtgtgattggccttcggccccggtcccaggagcggggagatgcctgactcgggtcgtggctgacgacccgacggttcgcctgcggccgcctccaacaacggtggaaaccgcacacagggaccgcgggccctcggtgcagcaaatcggaaagtgctgcggtcggcggccctgggctctgagcgctcaagcgagcagaggggtggaggggctctccccacccacaggaggctctcggcggggcgcagccaattctgcgcgcccaaggctcccctctgccgtggatcgcgtgtgccgagtgttggcctcttccccgaaagggccagacggaccaagggggccttcccagccggctgcaagctctcagacgctaaaatgggaacaaagcttccagaaaggcagcgcctttgggcggccgcgccccgcccagccgcgggggccattgatacagaggcttgctgcgcttggtgtgcgcggcccggccgggcctctggaaacgcccatgagaaatgagctcatgctggatgcgcgcgctccttgggcgcaactgcccagcgcaaaacgggccccgaaagcaggtgaggggaaatgccgtcaggccggatatcctgaagcctccgaggaaatgggggggtcagaggagcccgtggtagctttggatcttttggaactagggtgatctataaaagtgcagcttgagaagatttcatacataagaccagcgtccattgttctaccatagaaccagttcctttggtctgctttagaacagtgaggtatggctacgtcaagataacagagaaagtagaacagacagttgccatcctgattgtaatccagtggtgcctgtaatttctacctgcagagtcatctctttctgttaagatgctgtctccagaaagcacatgttaaaggacctatatttgatcagattacctggctcttgctttgaaacactgatgaaggacttgggacagaacaaagtaagctttgatggaagacaggaaaggtctagatagtgtttgcagattcaaatggctacagaggccagacaagtaaagcaaatgagtgagactggccttgtgtaagacaatggggaatgatagggaaaatggcaaattggaatatccatgccataactaaaaggaacagctgctcaactctagcagattgttgccctcaggaatgtgggtccagtgttctcagatgttcaatttttttcctcccaaaagaaaccccaaaattggatttttgtgtgaaatctctgcatttttaaatgttggtaaccaaattttcaaaccctgcaggccaacctaaaaacatcccttggccaatgaggcattggaaaaagtgttaataattgttaggggcccgatagcagtaggagggtgaaaacaaaatggtttgggaccttaaataattgaaatgtatctttatttatttatttatttttgagacggagtttcactcttgttgcccaggctggagtgcagtggcgcgatctcggctcaccgcaacctccgcctccccgattcaagtgattctcctgcctcagcctcccaagtagttgggatcacaggcatgtgccaccatgccagctacttttgtatttttagtagagacggggtttcttcatgttggtcaggctggtctcgaactcccgacctcaggtgatctgcctgcctcagcctcacagagtgtcaggattacaggcgtaagccaccacaccgggccggttgaaatttatctttaaaatagtgcacctttaatcctttttttatttctgtgtgtatcttataatgtgcatatcatgttagctcaagatcaagagtttatggacaagccaggagtggtggcttatgactgtaatcccagcaatttgggaggccgaggcaggtggatcgcctgaggttaggagttcaagactagcctggtcatcatggtgaaaccccgtctctactaaaactttaaaacttagctgggcgtggtggcgggcgtctataataccagttacttgggaggctgaggcaggataattgcttgaacccaggaggtggaggttgcagtgagctgagatcgcaccattgcactccagccaaggcaacaagagcaaaactccgtctcaaaaaaaaaaaaaaaaaaaaagtttatgaaccactagtttagacaaagaatagttgta

SEQ ID NO: 81 - DNA, 6216 bp, Homo Sapiens
acctccagatccacatggggctaggacattggcactggaccaaagaggccctttcctttgctttctctttgtctttttaatgctttgttgcaaagacctaggcggggagagagagagagagagagagacagagattgacccacagtcagggtcagggaattgaggggaaccaacccaattctctctccttcaattcaccaggtttgtatcctgcccttcctgcagatcagtgtcctgctagtcacctgggggtcaggggatggagtgaaggacaagacctccttccattgcagtgaagccacttggagaaatgtgtggaaaacagcaagacccagtgactctctcctcaccttctttccaatctcaggagagattttgtcccttcatccaccggcttctagattaaccacccacacccacacaggcgagagtttccctgaatattggaggtgacaggacatcaggacaaagtacaactattgtgccttggcccaatcactactttctttgtctggggccgccgctggctcctggctgcctttcgcacttttctccacccccacccctttctccccttccccctcacctggaacaccttccccttcctccttggctccttctgaactgccttcagagccacagactgtggggagtggccactgcgctcccaaggtgaggccctccaagcggggccgagtttgcccctcaactgggagccagcatgacctctgtgtgggctgctctctgcttcactgccccttcccccaatctgctaggtgaccctgggcccctttgtgccctctctgggccttcggaggattctttggggagacagtctgctctgacgccccttcccctgcagcaagcagcctggggagggaggtgaggataagtgaagtcaagttgttcagggggctaagcccatggaagggaagatgccacagagatacatgtggtcttgtgattgttgttttgtgctttttccccttttttgaaagctcaggtgactaggtgacttgagcttttaatttggtgacaatgtgggcactggctgagtccttaagagtacattgttgtaaatgccggtgacaacacactggggcatgggatccagagttaacccctccaggtcacagccaggttatatctccacaatgaaggggggaggtgggccatactttctcgccctaatgaaggtagctcaaaaacccctaggccaggttgtaatcctagccttatataaaaggaattctgtgccctcactcccctggatccctgggcaaagccccagagggaaacacaaacaggttgttgtaacacaccttgctgggtaccaccatggaggacagttggcttatgggggtggggggtgcctggggccacggagtgactggtgatggctatccctccttggaacccctccagcctcctcttagcttcagatttgtttatttgttttttactaagacctgctctttcaggtctgttggctcttttaggggctgaagaaggccgagttgagaagggatgcaagggagggggccagaatgagcccttagggctcagagcctccatcctgccccaagatgtctacagcttgtgctcctggggtgctagaggcgcacaaggaggaaagttagtggcttcccttccatatcccgttcatcagcctagagcatggagcccaggtgaggaggcctgcctgggagggggccctgagccaggaaataaacatttactaactgtacaaagaccttgtccctgctgctggggagcctgccaagtggtggagacaggactagtgcacgaatgatggaaagggagggttggggtgggtgggagccagcccttttcctcataagggccttaggacaccataccgatggaactgggggtactggggaggtaacctagcacctccaccaaaccacagcaacatgtgctgaggatggggctgactaggtaagctccctggagcgttttggttaaattgagggaaattgctgcattcccattctcagtccatgcctccacagaggctatgccagctgtaggccagaccctggcaagatctgggtggataatcagactgactggtcccactcttcccacaggcctcagagccccaactttgttccctggggcagcctggaaatagccaggtcagaaaccagctaggaatttttccaagctgcttcctatatgcaagaatgggatggggcctttgggagcacttagggaagatgtggagagttggaggaaaagggggcttggaggtaagggaggggactgggggaaggataggggagaagctgtgagcctggagaagtagccaagggatcctgagggaatgggggagctgagacgaaacccccatttctattcagaagatgagctatgagtctgggcttgggctgatagaagccttggcccctggcctggtgggagctctgggcagctggcctacagacgttccttagtgctggcgggtaggtttgaatcatcacgcaggccctggcctccacccgcccccaccagccccctggcctcagttccctggcaacatctggggttgggggggcagcaggaacaagggcctctgtctgcccagctgcctccccctttgggttttgccagactccacagtgcatacgtgggctccaacaggtcctcttccctcccagtcactgactaaccccggaaccacacagcttcccgttctcagctccacaaacttggtgccaaattcttctcccctgggaagcatccctggacacttcccaaaggaccccagtcactccagcctgttggctgccgctcactttgatgtctgcaggccagatgagggctccagatggcacattgtcagagggacacactgtggcccctgtgcccagccctgggctctctgtacatgaagcaactccagtcccaaatatgtagctgtttgggaggtcagaaatagggggtccaggagcaaactccccccaccccctttccaaagcccattccctctttagccagagccggggtgtgcagacggcagtcactagggggcgctcggccaccacagggaagctgggtgaatggagcgagcagcgtcttcgagagtgaggacgtgtgtgtctgtgtgggtgagtgagtgtgtgcgtgtggggttgagggcgttggagcggggagaaggccaggggtcactccaggattccaatagatctgtgtgtccctctccccacccgtccctgtccggctctccgccttcccctgcccccttcaatattcctagcaaagagggaacggctctcaggccctgtccgcacgtaacctcactttcctgctccctcctcgccaatgccccgcgggcgcgtgtctctggacagagtttccgggggcggatgggtaattttcaggctgtgaaccttggtgggggtcgagcttccccttcattgcggcgggctgcgggccaggcttcactgagcgtccgcagagcccgggcccgagccgcgtgtggaagggctgaggctcgcctgtccccgccccccggggcgggccgggggcggggtcccggcggggcggagccatgcgccccccccttttttttttaaaagtcggctggtagcggggaggatcgcggaggcttggggcagccgggtagctcggaggtcgtggcgctgggggctagcaccagcgctctgtcgggaggcgcagcggttaggtggaccggtcagcggactcaccggccagggcgctcggtgctggaatttgatattcattgatccgggttttatccctcttcttttttcttaaacatttttttttaaaactgtattgtttctcgttttaatttatttttgcttgccattccccacttgaatcgggccgacggcttggggagattgctctacttccccaaatcactgtggattttggaaaccagcagaaagaggaaagaggtagcaagagctccagagagaagtcgaggaagagagagacggggtcagagagagcgcgcgggcgtgcgagcagcgaaagcgacaggggcaaagtgagtgacctgcttttgggggtgaccgccggagcgcggcgtgagccctcccccttgggatcccgcagctgaccagtcgcgctgacggacagacagacagacaccgcccccagccccagctaccacctcctccccggccggcggcggacagtggacgcggcggcgagccgcgggcaggggccggagcccgcgcccggaggcggggtggagggggtcggggctcgcggcgtcgcactgaaacttttcgtccaacttctgggctgttctcgcttcggaggagccgtggtccgcgcgggggaagccgagccgagcggagccgcgagaagtgctagctcgggccgggaggagccgcagccggaggagggggaggaggaagaagagaaggaagaggagagggggccgcagtggcgactcggcgctcggaagccgggctcatggacgggtgaggcggcggtgtgcgcagacagtgctccagccgcgcgcgctccccaggccctggcccgggcctcgggccggggaggaagagtagctcgccgaggcgccgaggagagcgggccgccccacagcccgagccggagagggagcgcgagccgcgccggccccggtcgggcctccgaaaccatgaactttctgctgtcttgggtgcattggagccttgccttgctgctctacctccaccatgccaaggtaagcggtcgtgccctgctggcgccgcgggccgctgcgagcgcctctcccggctggggacgtgcgtgcgagcgcgcgcgtgggggctccgtgccccacgcgggtccatgggcaccaggcgtgcggcgtccccctctgtcgtcttaggtgcagggggagggggcgcgcgcgctaggtgggagggtacccggagagaggctcaccgcccacgcgggccctgcccacccaccggagtcaccgcacgtacgatctgggccgaccagccgagggcgggagccggaggaggaggccgagggggctgggcttgcgttgccgctgccggctgaagtttgctcccggccgctggtcccggacgaactggaagtctgagcagcgggggcgggagccagagaccagtgggcagggggtgctcggaccttggaccgcgggagggcagagagcgtggagggggcagggcgcaggagggagagggggcttgctgtcactgccactcggtctcttcagccctcgccgcgagtttgggaaaagttttggggtggattgctgcggggaccccccctccctgctgggccacctgcgccgcgccaaccccgcccgtccccgctcgcgtcccgctcggtgcccgccctcccccgcccggccgggtgcgcgcggcgcggagccgattacatcagcccgggcctggccggccgcgtgttcccggagcctcggctgcccgaatggggagcccagagtggcgagcggcacccctccccccgccagccctccgcgggaaggtgacctctcgaggtagccccagcccggggatccagagaaccatccctaccccttcctactgtctccagaccctacctctgcccagtgctaggaggaatttcctgacgccccttctcttcacccatttcctttttagcctggagagaagcccctgtcaccccgcttattttcatttctctctgcggagaagatccatctaacccctttctggccccagagtccagggaaaggatgatcactgtcagaagtcgtggcgcgggagcccactgggcgctttgtcacattccaccgaaagtcccgacttggtgacagtgtgcttcccttccctcgccaacagttccgagtgagctgtgctttagctctcgtgggggtgggtcaagggaggatttgaagagtcattgccccactttacccttttggagaaatggcttgaaatttgctgtgacacgggcagcatgggaatagtccttcctgaaccctggaaaggagctcctgccagccttgcacacactttgtcctggtgaaaggcagccctggagcaggtgtttttttggaactccaaacctgcccacccaacttgcttctgaaagggactctaaagggtccctttccgctcctctctgacgccttccctcagccagaattcccttggagaggaggcaagaggaaagccatggacaggggtcgctgctaacaccgcaagttcctca

SEQ ID NO: 82 - DNA, 6188 bp, Homo Sapiens
aacaaaacaaaacaaacagaaaaaaagaaagcaagctatggggtccaatctgagagaatcgagtgtgggtgtttatccgtaagagagcgaggggaaagaggcctcttaagccttcttaatcctgaaaatggggaggaggtcttttaagctgcagtgccagagtgacatgacctagttttctatttttagagatggggtctggctatgttgcccaggctggtcttgaattcctgggctcaagccagcctcctgagttgctgggactacagacatgtgccaccccacccagcttgacctggtttttgtgttcagaagatatctgttgttgttccaggtgccaaggccagtgctgggcacaggggtgctagagcctactgagaaatggacatagaaccccagtgtccatccttccatcttggagcctgtgcttctcaccccacacagccctgctgtctgggaggactgtctgccccttgaggtcatctgcccctggccactgtgccaggacagtcctgctgtgggtacgagccacagggcaagaaagaacacatctgggagctggaaggcctaatcccagggaaagcatgtagcctggggcagggcaccaaggaggcttccagcccccacattctaaggaaagaaacaccaggaaggtgtggccttaggcaggccccttttccttttcggatcactgcctgcctgtcactgatttctgtcctaaccccacactaatagctgctatatatatatatatgtattttaagagctggagtctccctaagtcactcaggctggccttgaacttctgggctcaagcgatcctcctgccttggcctcccaaagtgctgagattacaggtgtgagccaccacgcccggcagcaaccattttttagctttaatgtgcaccagctctgtaatcaagtgcatcctatatgttcctgctaattaactcaacagtcctacaatggtggttattaattgctgttttacgaaagaggaaactggggctctgagagtttggggaccgacccaaagcattcagtgcctgtggatgcaactgggatgcagggagccagtgggctgggggtgaggtgtcccggcaggtggaggtggtggggtacttacctccatgatggctgctgctggttggctgctcctgctggtgactggcgtcccacaggaggcctggggcctggcgatgatgcttgccggagcctgagggcccgtcccctgcggggctggggcccaggcccctctctgcagagctggagtcttcctgctcactcggctcaaactctgggatctggaacatgctctgggctgtgaggacaagatgttacgtagtcaaggcacagctggggccaacggtggccctggaaggcagaggcaggtacccctggcttcctctcccaccgtagcgcccccaggcccgccaggcctcctgggccctcatctgtctgccgggtctggcctggcagggagctgaggctgtcggctcaggacctcagtctcccctcagaaccccggtggacccaggccccgccccgcccgtggtgacggcgcacaggtctcaccccaagcccgatctcgaggcccctgacccgggcctgccgcctccctccagcaccccgggctccgggccctagttgcttgggcaacgggaactgtcagcgacctggcccaatcacctctcggaacgtcactcgggtaggtccagaggcggggtcaacccggcccggccccgcccccccgccggatccaaggctcctcgtccgcatcctttttcctccctccttcggccccggggctcacatcctcgctgcctcacaccttgggcgtgtgtgggagcaggagagggattctctggggtccccatttggaacctggagacccacttctgccaacaagtccttcagcccctctgggccttagtttccccccagtgaagtggggatagtgacagctcccccgggagccagtgaaaactttgtgaagggagtgattactgcgggcgaaggcgcttggcacagccacaactgaagctcagccgtcggatgtgattattgttgctattgttaccgctccgcctggactgggtgcccggtcggaaagtcccgctccccgctcctcctcccaggcgcggaagcttcgcgccgcccgcctcgggggacacctcccgcgccatctcgggggcactggagataaggaaaggaacctcctccctggctgggatggctgcccgggcgcgggaggagggccggggacccggtgagggaggaccgtagggcccgtgggggcttcacgcctggcaggcggccggccaggtgagcagggccgcgggcgcgccggggcgaggggcgggcccgcgcgggggattcggggctccgcgggttcaggcccgggggcggggcccgggggccatcttggctatgggcggaagttttcttcagagaccgagggacgggaatccgttgccgcccccggccgggcggcacgaccccgatttgggtataggagagaggagcgtgggaactggcggacccccatacaagtaaaggcgggcggcacggggcacggcccacccggggaccccctggatgcggcacggcccccgcaactcggccgccctcctgccgcctcccgtaaccccgggcgcccgccagcggcgcagctcgcgccaattctcgtacggtttcacgccgggtgcggcgctggactgcggagccagccgggccgctgcgcaatttgcgtagcgaacggcgcccgcgcaggcgcggagggggaggggggcggagcagcgggagccggggagccggagccccgggtccccacgacctgagccggctctcccatcagcggcctgaggacctggcgtccgcctcctccctccccttgaggctggagcgtggacgcggtgggggagggtggggcgggggcagctttcgagaattacgaggacaggaggcagaggccctccccatccgcattattggaggagagagagcctcccccagcttggggagggggagagcggggcattgggcgcccctcgcagcggccgctgccctgacccgacgggtatcagccggctctccccctccacccaggacgacatgaacgaccgaggccagggagtcctctccttgggcctctgcatccccccatccttggctctggggtaggcccagggaggagacacccccaacccctatccggtctgtcctggagaaaagagactgcccttccatgcccctgagtgaggggcctggggcccaggctgcctgtgttccccaagggcaagggtctctctgttgaggaggaggggcctgtcagccacaacttctttcctcctgagcgccccatctccctctctgcaccctgcaattcccacccctccgtatttatttccctggtcccgccgacagtccctccttgtctgtctccgggattcaggcctccctccctgacatggagagtaacctgtctggcctggtgcctgctgccgggctggtgcctgcgctgccacctgctgtgaccctggggctgacagctgcctacaccaccctgtatgccctgctcttcttctccgtctatgcccagctctggctggtgcttctgtatgggcacaagcgtctcagctatcagacggtgttcctggccctctgtctgctctgggccgccttgcgtaccaccctcttctccttctacttccgagatactccccgcgccaaccgcctggggcccttgcccttctggcttctctactgctgccccgtctgcctgcagttcttcaccttgacgcttatgaacctctactttgcccaggtaaccaactgtggtcccgggtggggggcgggaggtggcaagcctcaaggacccacaggagtgaagggcatctctgctcctaggtggtgttcaaggccaaggtgaagcgtcggccggagatgagccgaggcttgtaagtactcgggacactggtgggctcagcctccaggtcaggggcaggtgacagtcccatgtagatcccttcccacctctcagggctgagacaaaggcaacccagggaatgtctgtggaagatcttggaaaagttaaagcacctggcgcagatggctcagcagaggccttgcagatctgcaaggcacaggaataggaatgcttgtggtagtgtgagggagagggccccagtgtcatccaccatggagggcgagctggaggctccagcccatggaagcaccaaagccatatgcactcctgggtgacctggggccgcaatgccctcgtcatttgtacagtgtcttacggtttataaagagctttcccagccatcttttatttgtacaatttccctgagaggctactatcctcccttgagagatgaagaaactgaggcccagccaggtaagacagcaggatcaaggtcgcagagctggggctcagacagagacttctgactccagttggtgcaccttccgaagtaccatggctgtcagtcaccttctgacctttttgggcctcagtttctccatctgtaagagtggaggaacagggctcagactggatgccctgagttttgtcgacattggggtttcctgcaggaggtggggcaggtggtgagtgctgagggctgttgagggcccgcgctgactgtgctgtggctgcaggctcgctgtccgaggggcctttgtgggggcctcgctgctctttctgctggtgaacgtgctgtgtgctgtgctctcccatcggcgccgggcacagccctgggccctgctgcttgtccgcgtcctggtgagcgactccctgttcgtcatctgcgcgctgtctcttgctgcctgcctctgcctcgtcgccaggcgggcgccctccactagcatctacctggaggccaaggtagggctgcagcactgatgcccaggtgtcttttgggtctctcggcagcggttctcagggtgtagaggaagctgggagccttctctccctgagggtcctctgttgttacctgtgccaggggaccagtgtgtgccaggcggccgcgatgggtggcgccatggtcctgctctatgccagccgggcctgctacaacctgacagcactggccttggccccccagagccggctggacaccttcgattacgactggtacaatgtgtctgaccaggtgggcatacgcatgtctgccacctccttagtagccgtggcaccttggccccagctggcctgggccctgtcccactacccctttggcgtgactgcagactggcaccagcccctgccttcccacaggcggacctggtgaatgacctggggaacaaaggctacctggtatttggcctcatcctcttcgtgtgggagctactgcccaccaccctgctggtgggcttcttccgggtgcaccggcccccacaggacctggtaagggtctgctccctcttctgtggggccagtggagggggcggatgttgcaaatcctgggttggagtctggggttgggcctgggaggccagtgcaggacaggagtaagtatcgatgatggcttcctcccccagagcaccagccacatcctcaatgggcaggtctttgcctctcggtcctacttctttgaccgggctgggcactgtgaagatgagggctgctcctgggagcacagccggggtgagagcaccaggtaggagccgtggcactgcctcagtacccctgccctacccgcccaccccgctggctccatcaagctatgggggaccgagatagccgggtcttgccttccacccctgccatggcctttgcttccccatctgtactaggtgaggtcccctgggttcctattgctaaagcctccacctcttgcctagagatgtactttgtcctgggccccgaaggtctaggtcacaggggttctgttctaagcctgtcttcctcctgcagctcttgtgactgtggccctggtcactgtcctgagactgaccctgtttctctgctgcagtatgtcgggcagtctaggctctgggagctggtatggtgccatcgggcgtgagccgggctggtatgggggcagccagacgaagaccactcctctgctcttctcccaggtgccaggaccaggcggccaccaccacagtctctactccaccccacagacgtgatccccctccctcccccacagaatacccaggccccagtccccctcacc

SEQ ID NO: 83 - DNA, 6161 bp, Homo Sapiens
ctctataaaaaatgaatttaaccaagcatggtgcagtacacctctagtcccagctaccagggaggctgaagtgggaagattgcttgagcctagacggtggaagctgaagtgaactgtgcttgtaccactgcactccagtttaggccatggagtgagaaccttgtatcacaaacaaacaaataaaccaggagtgcaaatgaagacttggactaggttattctctaaagaagagggcaaccttgctggtggcagccagaatgatcaggctaagagcaaaaatgaaatgaggatggttgaaaggatacagccataaaggagtgtaataggctgtgtgtttagaatagaggagagaattgagtatggacttgtaaatggtgtggattcagactatgagaaccatattgactatgtgaaggcaagaggtgatcttgaagcgatagtgtcaaagttacagcatgagatggctgtgctagcttcttacatatcagcctatggctttgggaaaatcacttaacctctccaaacctcaatttcctcattcatagaatgaggataaaacagcataaggactggtgagaggaaaaaatacacatgtaaaaaaagcacagcatctaataactcctcaaaatatgttagtttttacctttttttttttttgagatagagtctcgttctatcacccagtctggagtgcagtggcatgatctcagcctcctgggttcaagtgattctcatgcctcagcctcctgagcagctgggattacaggctggctaatttttgtattttacgtctggctaatttttgtatttttagtagagatggggttttgccatgttggtcaggctggtctcgaactcctggcctcaagtgatccacccgccttggcctcccaaagtgttgggattacaggtatgagccaccgaacccagctagttgttactgttattgctgcagaaaagaccttgcttctccagtgaccataagggaagatggtaatacagaggcttggattggaggtagaagcaaagggagctagcagaataggagaattaggttgcctctttctggcctttggttggggcactctttaaaaaagtgccagatccaagagcccagggggctggctgtgagtgccctcatgtggatcagctatggtcagactgcttcacgcctgtgacctgccctgtataaatatactgccatgtataaataatggccccatatatatgtaatctggaaggataaacatcaagcttaacactggcaacctgcagggagggaagtggaattgggtgtgtatgtgtgtgtgtgtttgagaacctgtattttattactccgcacgtctttattgtttgatttttttcataatgagaatgagtttgtgtgttgggtaaaaaaaagaaaaagaaaaaaaccccactaaaatcaatctaattacaaaagaagatgaattaaagaaaagtaccgagagaaactgcttgtgatccaagtcctggctccctaatgcctggctgaagcccagcccacaaagagaacactgggttaaaggtcctggagaaaagatgggaaaggtttggtgtctatgtggtgtctgctagccccataagggtaaggcacctggtagacggttcccagcttaatgggaactgctcctgttttccaggcacacagttcagggctggaaaagttcaacaagtgcatggaacatcggaaacctcctgaaaatgctaaatttgccccgagatgtcccgaagtccggcatatttctctgggcagcctagaggctcaggagcccagcccagcccagcccaccgtgccctctcagccagcccttctttgccttcagcagccctccctcttcctgagtagtggccctttgcaggcctgcgtcccagccccgcccctctctctggacgcatctctgggccccatcatcacccggcgccgggccctccctctgcccccccctttctcctccctccttccttccctcccttcctccctctctccctccctcccagctcctgcaccaggaaacggcccggatcccggcagcggcctgacccgtgagatccctaacctggcaggcgggcggggttggagactggctgaggtgggggtaagggaggagctgggcctttgggctgcactagggggaaccgggaatagagatggtgtcggcaggaagcccttggccttgggtttcccgggaggacagtcattaaacatggattcggccacacagctggtagagcgttgggggcaggggcctaggcccagagctgcaaccctagcccttcccaggccagaacctgatccctggccttcccctcctggttctgatctccccctcccctttccagggctccacgctggccaggaggatgaaaggccccagctgggggctccttgccaccagtgctgtgtcttaagagctgccatcccggctgggtgagtgtctccttcctttctctgtctggagtaacccattgcgtctcccacctttctcttcagcccatctgctccccctcatcttgtgtctctgccaacatctttacatcttgcatttggggaggtcctaagacccttcctctagccaagaaggtgtggactaaggagacccgggggtgggggtgttgtaggggtgtcattgagctgacgttgtcttattgtgaaaagaatctaaagtatcctaaacagaaaatttacttgttttacatttaatttggcatattaggaatgtaatggccagccactcacagcctagtctcatatcatgacttaattcccttgttcttgcctctccctgtccagtgagtcctgagcatttcctctctcctcctcatctcactgggttggtcaaaccagaagtgctccttctgattctctcttcatatattcatgccagtctttcatccttgcctcttatagccgcccggatggcgaccccagcctcggccccagacacacgggctctggtggcagactttgtaggttataagctgaggcagaagggttatgtctgtggagctggccccggggagggcccagcagctgacccgctgcaccaagccatgcgggcagctggagatgagttcgagacccgcttccggcgcaccttctctgatctggcggctcagctgcatgtgaccccaggctcagcccaacaacgcttcacccaggtctccgatgaactttttcaagggggccccaactggggccgccttgtagccttctttgtctttggggctgcactgtgtgctgagagtgtcaacaaggagatggaaccactggtgggacaagtgcaggagtggatggtggcctacctggagacgcagctggctgactggatccacagcagtgggggctgggtaagaagcttctcaattgccgctctgcacatccttctgcaaagctggtctccagggggaagatgggggctctgattggaggctgaggcagctatgttgggaatgaggtacggggctgagtctccccgtctggatggaattagattgagagatgcctggactctgcactccagggctgccatgcagtcaacactggatgggctcatggtcccaagcagaggacagaatacacacccaaggagtgcctgcaggggaatgttgtcagggactttttacatctgagtcatggcgtgggaggtggggaggaccagggatgggtggtggtcaggcaagccttggcaaaggatgctagttctgagcagaatttttcgccaaggaaaggatggaattcactggaggcagagtgggcagatgaaccagtctctcagggtgggggtgcacctggggggatcagaggggcttgcagggagaagagctttggccagagaggagctgggtatggggtagtgctcgcagtggatggaactggaactcttcctctcctcttctctccactctttcctctcctgatatccctttctccttctttctctcctgcttcccttctctcccacaggcggagttcacagctctatacggggacggggccctggaggaggcgcggcgtctgcgggaggggaactgggcatcagtgaggacagtgctgacgggggccgtggcactgggggccctggtaactgtaggggccttttttgctagcaagtgaaagtccagggccaggtggggctaggtgtggctgggggccaggagagcaggaacagaacagagaaatgcccttggaagaagtggagttggtggatgggtgggcatggaacaggatgggcagagaaagggtagtgtgtgagggagctgagtaggccaggtaggcgattggaagagtgagcaggacacagaggggaggggaatgttttggcaagtttaggggcacaggagatgtagtcgttccagggctgggggaggtgggagggatcacgcctataggtgtgggcacatgaaacgacctggaacttgcttcacagccctgaggaaggtggacttacataagcagctgtattccattagatgagtgggatttagggaacgcagaaggcacatccctttggaatggaagcttaggggttctcaggtgatagggagaggtggctgttaacagtgggctgcttggacacgcgtgtgcatgtgcacgcatgctggtgtgcatgctgggctgcctggcaaatctggtggtgatgggattcctcaaggagaaaacattccctcttgcaatggcaagaactaggggcagttctctgtccctcctcccaacccctcctttcccctgcccttgtcctgatgcctcaaggcttagagagaaacattgtatccagaccgagggctctgctgcttctttccagaaagtgattggcaaggctttggagagaagagcagttctgcagctggccttgttccttcatcatcccccttccttgtgcattatgcacttgctgctgcctcctgggctctgatagaagggcagggctgttgagcctggatgggtggaggcttaggtagccggacctgcctgccaccctcctctcccactcaggcacaatggtgcctaaagtgtttccaatctctgggacctctgtacccaaactgaaactctaaattggggccctaactaattttccttttgaggttgtgggcataagtgctgatctagaatacagtctgggtcccacactgtgtctcagtgagactgttgatgccttgagatgaccatttcagatctgaatcccatgggtgtgagggtgatgggtactccaggactggcctatgctgtgttgtgggctttggttcggctttatcaggggccaggcatatgggttctagagtacctaccatgacctagaagcatttatgatttatttgaagccacactgtttgcatgggtgttacttgtctgtacctcagagtctgaggatgttaactttggaactcgcagtcctctagaacagcttcagattatggctttttcttttgaggaagaaattattcactccagatgcatgccctgagccagacctcactgctgcactttccaaggtgctaagattgctgctctccaatgctaactttctgacacagtgctctagaaccctgcctgtggtcctgagcactgatcaccttagctagaccatggttgactcttcttggagattttcacttggtcctagaatgtggcaacgtagttgtgctcgccagaacgtgggaccaaattggcctcaggtgttgagtccagacttctgcttttgagagagggctgcactttttcatggtatttctaggggaggtggtaggctgcatgtgccacttggtcttgttgtgagtatgctgacaccagaaactcagagccagcttgtggcaagcagttggggtggggggtctctgacttgctcaggacaaactaggccagtggttttcaaactgcttggcagagccctgaagtttcctaggggttgcctcaggagtccttggggagatgaagggggtggggagctgagcaggctgggcaatttgccctcaaacagaacagctccccttgtagctgtcttacatattggggttcagggtaagattttatttgcattaaggggtttgctgctgaaaaaaagttggaaaaccactgactagaccatcggctccaaattggagtctgtgcttccttccccaggtatggagcacactct

SEQ ID NO: 84 - DNA, 6195 bp, Homo Sapiens
atccccaccttctagaagagtctggcacatagtggaccctcagtaaatatttggtgaatgaacagactgctgacaaaacatgctataattttatctctattgtttttagttcaggctgttcaaacaggatccatttgtgcagtgcagaaactccaatacaggttcacagtgaagtcctattctggcaaaggttccaggatttgggattaccaaatgtaaaaaaagagtaaatttacttcccagacactcactggctgatcaggcgagggcctgggatacatcaaatgcaggtaagcaagaatttcaagtcattatccctgtgcatgcaggcagtaccagtgccagcaataacaagtcagcttttctggcaaatccatcaaaattaaatcttaaacttttgaaaaaactaatatgtttattatgctcctgttagcttagaggcttaactatctgtgggggagggcctataattatgatcaattacttatgacttgaaggtacttataaaagcatctgcccttttaagaaaccattaaagaaccaggcttaagactgtaaaactaatcccaggggcaatagtaaatcacaggtttggggacccaactttgacaactctcccttggaaagaaaagaattgctgtcaactgtccttatttcctgaccctgtctgagcaaatattcgcagcctctaaaatccagaattcttagtctggccaagcaagtcatggggaccaatggttgtttcaaggcagaggcagaagagaagaaacaggaaggaaacaaaaagggaatgaagatctgtagctcatgagggtgacatcatcaataatttcctcaagtatcactgaatttcatggctcgtgactgagagtcttttctgacatcttacaggctaattatcctcaaggatcttcttggttccagagcctgtaatgtctgggtttgaatatgatttgttctacaaaaaaggtcaggtgaattgacccctccctgtgaagctgctccatggcaagagaccatcaatctgctgaaacgcaaacaatcctttagatatctgaagtactttcaaatttacaaagtgctttcacatacgccatctcattttattctcacgactttaacaggtaggtgccatcatcaccttaacacgtaaaaataattttagaaaacaatgcctttgtcttcagttcataagaatatcctcctgaaattcacagtacagaatccaagtcatgggtcagttagaaacgtctagaaacacatcaatctcaggaggataaatcaagagaataggatggatcagacaaaatctacaagcacaatggcagaaagtgtgcctctggtataagaatggcgtaagctttgtaaacaatagtgttatacaggggtgcctctgtagtacctctacgtttggaaggacactattcattcatatacatgataagcacccttaactggatactccataggtaacagacaaaataaaacaagaacttccgtcttaaaattgtagtggtggaattcatccttcgggatgtattaggtgattcccctaggacgacagctgagttacagggggctaaatataccctccccttttccctccaatatcacaaagagccccaaaaacggattttgttgtttttaacaaataaaatacacatgaaaaaaagtcatctataggtttttatatataatctcatcttctaaaacactcattctccttcactagctaggccgaggtataatgcggtcttaactttataaccatttactgccttatttatatatttatgattctttgatgccttctagcttgagtctaaactgcgttgggaacaaagcaccgcacaaatcaccagcctgggataagaggagacaagttaaaacctcccaagaagattctgtagatatttggtctctctgagtctgtagagagtttggtatttcaaaggtcagtcttgggtctctccactttgatgactaatgttaaattgtttgactttttacaaaaatatttagctgtgcttatttacatcatttcatcctcagcgcacacagtaggcatgtatttgttgaacagaagccctaaatggatgagaaaaaagatatttctgctacacattttctcaagatcgagaaaggtaaaatcacaacccaatttgcagaagtttctaggcattccttttcaatgtaaagctatgcatctctgtttaaaaaagaaaaggatgacacaaccaaacaatgtcaaccacacaatggggaaattccaggatcactaagaaaacaccattatcctaagtcacacattttcatttaatactggttaccacacaggagagagtaagaactgctgtctccccacccactcgcacaatccatctgggaaaagcatgggcagaacatttatgatctaaccataccacatcttggactcacatttaaccctttggagaattagtctaaagagtatgtccgcccagagatataaagtaaaacagacacagggataacagttttggaagaaatttttatgacgctgtttgagattgggcatcagcactcaaactccttagaccaccaggagtcattcttactacgcaactttaataaagagaaactgagagtatgactggcaaaaatattatgatgtttctgcatcttgttaacctgatttacacttggctccacccataaagttcccactgattatcacacggcatcctcattctccagtctcacctactctgtctttcaaaaattccccaacggcatggccacgaaaaatatgcgggggctagcggggcatgtctcaggttggcttatcctgtccctaaaacgcacccacttcccccagaccctccttcagggtgggcagggagaaaacgcttctaagttgcacagctgcagggaagcctgctcaggtcatgtttttttgacttgtctttcggctcgctgtctggcaaggtcaccggctctggctcgcggctctgtcgacaaaacttaactctcactctgtaagaccaacaggtcgcgcaggacctccccagtcgccctctgccccgcacctttctgggcctgaggattcccggctcggccctccccgcgcgcgcgaggccccagatggcgagggcgcagctccctggctcacctgaccacgttggggtgctcgaaggtctccaggtgcctcagcaccgccacctcgcggatggtggagagcggcatgccctcctcgccggtctgcacccgcacgcgcttcaacgccacgaaacggcctccgttcttcaagtcgcgggccttgaacaccttcccataggcgccctccccgatctccgccacgcattcgtactgctggtcagcgcggcacaggccgtccttctccatgccgcctggacgccgcccgccgcggcgccgctggggcgggcggggggtgcgctcaactagctggcggccgccgctcgcctactccggggctccccggagatcggtctagctttacttgctccccgccggctcaggcgctcgggcgctggggctttcgccgctgcagaagctggatggagagacctccccgcggggctggcgtaaccctggtgccgccgccgcgaaactccgcctgcagagtcgccgccgccgccgccgccggaggagcgagccgatccctcctcttccctcctcgaagcgaagtcctcaacacagacacgattacatagcctctgcccaagcgcgtctcagtccagaatcattgcacctaaaggaggagacgggaggataagaagaaagtgcaatcagacagcccagaagccttcctcggggttcctccagactcccctcctcctcctttacgaagcctccatcgctaccctccgcgcgctcctgccctctcccaagccgcttaatccttcctggttcctccgagaaaagcgaagttacttttctttccctgcagggctgaagccgtcttcgcgcggagaggttgcaggggcccctcggggatgagcgagcggcgcgggacgcagtggaacgggagggggcgtgccgagcagcccagagtgtgccgggagcgcgggggaggggaggcgccgggcacgtcaatgtcacggcttaatatttatccctatatcattgtgttgcgccgctaccctccccgcctcctgaggcccggacgtgcagggagacggggtccaggggtgccggagggcgttcaggggtcgcgcacaagctggagcggaaggactgtgggtccatccgtgtggggccgcagaatgtgggtgggggctcccaggaccctgtaacccgatgctgggagtgtgcgagaaggggtggtcagacatctgctcagaaattgcttcctttctttctactttcagtttttctacgaggagacatttaaaaacgactcgcatacacaaatggtctttttggggtaaaggagtctcggttggaaacggaattctctctccggctgggaggacctccctggtggaaaccttgggaagaccagccatctggtcggggagggttggggcttatcgggggtgggcgagcgagcggtcctgggggaggggagacaccgtcccccacgggatcccaagggtgggagaaaggggtgttcgccacaatttcgcttgtcgtctccttaaagaataacttcaggaaggggatagcataatcgcgcctcgtccttaagttttaaactgatttcgacctgagcaaaactcaacctccctttcaaagggtggggggtggggggttaaatcctgcgcctccaggggtgagagagaaggtctctgtcctcggggcccggactcgcgaaccttttcccattcccaggacctccccgctgtaggtagcagaggtggctgccccattccccctccggctaaaggcccggtccagtctgcagccggacgcccccggagccctctgcacaacaaagcgccagagtagggtaccctaactttccctccccattcagcagctatctgggacctagggggcctccctcctccagggccgccgcggcctcggcaggactttcaccacgacggccgcatgtccggaattcccggggcacctcggaattacctgcctcgcaaccgctggcccgctcgccttttgccaggaattaaacaaacggcgcgacccccacgatgagcgggtggagcggaccgcggcgagagcagagcttctggcactcactacattcagaactttccttaaaagccgaggaaagagcccccagggactgcccgggggtctgagccaggtcgagggccacacaggtagccggggagccgccgccggccgcccaacccgcctgtcctgcatccccccaaccccctcccgctcgagtctagccccgggctccgcagcgaaggaagcgtcggggacgtcccacccccgcagggaactgcgcctgctgcccccgccgggccccgcactgccctggctctccccccactcgccccccagacggtcggcttcggcggagagaaacgggagcagcaatgccttttccccccctctcctccacttttttttgttgttgttgttgctttcccacgctggctgaatgtgacttgaccccatttcaaaaaaagtttgacatagtgcttcaacatttccgcattcctccgcgactacaaaggctgcagccgcctccttctgctttctgtctctgctctctgtcttcacactcaatgaaatccttcatgcgcctctcccgaagcctgccaagcaccacaagggtcgccaccagcacagcgacaagaggccacaccggggaccgcgactcccgcgtgtgcgcacacgcagatgcgcccatatgcacacggacgggcgcgctgcggggaccagggctgctcactgcggggcgtgtgtttaactccaatattttaaattataaaagtaaacttggaaactacagcaaacgtgcgtcttcgcggggctccaagcctgggcactggccggctgcgtgcacttttctgtgtataacacgcccgcaggaagcctgcgttaacatttatctcgtggaggggaaggtggagcccacacccacacctcagcgagctggagagggagttttcgagggggaaatgcaagcacattctccagcatggagtccctagaggcagtgcattttaaaccctaaatgtgaattattatgtgagtgtccgagtagagttccagttc

SEQ ID NO: 85 - DNA, 6243 bp, Homo Sapiens
ccagggttgtgtgtgaccagcagatgtgttggaagtgatggtgtgtcacttctgaggttaggtcattaaagacgcagcggcttctatcttgtgtgtgttctctttttcttgggccactcgctctggggaaagccagctgctggggcttgaaaacacacacgcctgggaagaggccgcactggtgagggacggaggcctccagcccacagctgtgggaacgtgggaatgaaccttttaggaagtgaatctttcggccctgctctagcctttagatgactcagtcctggcagcatcttgatggcaacttcacaagagagcctgagccagaccacccagcctggcctctcctggattccagacccgcaggagccatgagtttctttgttgttttacacatcaaagttttgaggcaatttgttacacagcagtatataactaatacaccagctgtagggctttgggcacgttccttagcctctgcacccccgtttcctccctcgtgccatgagcattgtagaggcgagtgaggaacacgtagacgcagcacagtgccacgcacatgaggcagctttccagcccctcccgggatggttgtggtcattttcttgcccctccctggatggaccgtgacctcacaacgtcaggccaagttattgcattcttggcctgaggtcatccattggccatagacagaggttctcggcaggaaagggtgagataaagagaggggtcagtctctttcctccagcccgggtcgggagaaccgtgctgggccaggtgagacatccgctgtctgtgcggtgtcctgggatgagccactggacctgacccatggggagatttgtctgtgtcgccagagggcgaggggtttcctggtctagcttgccttgggcttggccaagcattctggctgccactggggcccccaggacaactgagaactgtcctttcttctttgaccttcagctgcccctctctcccctgtcccctggtgcctgctcagatgctttcttcttgtgacccttgacccttggcccttggcccctgccccgaggctcctccaccctgggctccgtgttctagagttcactgtgtactagttcctcaagctgtttgtccttcactgcttccgatttttctgtgcattactcaagaactgcatgggcatgtgtcagtataaaaaaaaataaagttggccgggcgcggtggctcacgcttgtaatcccagcactttgggaggcagaggcgggcggatcacgaggtcaggagattgagaccacggtgaaaccctgtctctactaaaaatacaaaaaaattagctgggcgtggtggcgggcgcctgtagtcccagctactcggagaggctgaggcaggagaatggagtgaacccgggaggcggagcttgcagtgagccgagatcgcgccactgcactccagcctgggcgacagagactctgtctcaaaaaaaaataaagttggccgggcgtggtgactcacacctgtaatcccagcactttgggaggcggagacagacagatcactggagttggagaccagcccctggccaacatggtgaaaccctgtctctacaaaaaaatacaaacatttgcctgtgtgtggtggcacatgcctgtagtcccagctactcgggaggctgaggcaggagaatcgcttcaacccgggaggcggaggttgcagtgagcagagatcgagccactgcactccagcctgggcaacagagcaaatttccatctcaaaaaaaccaaaaacccaaaacaaaaaaacacaaaaaaacattatcgacattaacaactacaaggcgcccggctaattgtatatttttagtagagacagggtttctccatgttggcaggctggcctcgaactcctcacctcaagtgatccgcccgcctcgacctccgcctcccaaagtgagccaccgtgcccggccgtgaatgtgacttgatagcccagatttccttccgtgaacgcttgttagttgtgaaactagcaaagttgcgcctctgagtttacgcagagccggctccggaatccgagttccgggttcgagcacagctccgccgctacctcgggcgtgaccttggccggagcctggtcccctctgagcctcagtttcccggtctgggatgccggaatgacagctcgccccctgccccgcccagccccgcccagccccgccccgcaggccctgggattggttcgcgcgaggtccccctccccaggcggggtcgggcctctcccgcccgccaggccccaacccggaaatgcagctggagcggaggcggagcccactaaggccgcggcggagcgacgatgggcgcggccaatgggcgcgggcgtcggctgcggcgcgacggaagtcctgcccggcgccgcgcgggggcggggcggcgccgggggcggggggcggcgggcgacggggcgggcgcaggatgagggcggccattgctggggctccgcttcggggaggaggacgctgaggaggcgccgagccgcgcagcgctgcgggggaggcgcccgcgccgacgcggggcccatggccaggaccaccagccagctggtgagcgcgcggcggcggactggacgcgccggtttgttaccctgccgggtccggcggccgcccgggtccggcgaggcggggcggcccggggtcccgagggccgggtgcctccttacctgcagccgggcggccgggccggggatggcgggcgccggccgagggcgctgcttggctgcggcggggagaccgggcctgggttgcggcgggcggcggcctggccgggggcgctgacagacgcgcggagggcgggggaggccgggaggtgtcacccggcccagcggggtggaagtgcctggaaagtttgttttcggcttggcgcagcctggagccgagcctccagggttacctttcggttctgtctgtagaggaaccgccctgggcttccacctggaacggggtccttggcgcctccgcctgcgagagaagcagaaggtgcaagttcttgctgaaagcacctgatgctcctgggcccccttttccagattcttgatgacagtggtcgggaaaactcgcctttcacggcccggccaaggggcatttgggtgcttttgctgcccgtggctgtgctcagcgttgtgggaagcccctgggaggccgaatgtgcaggatcaccgaggggaaagtgagcttgacaggtaggagggattttaggggaaggaccaaaacaaaccacttgttgggtgaaatgttttgctaaaagtgtcgctggtgtttctatattttctctctatcgctaaaagtatccctcgtgtttttatgttttccatatgctaagttctacagtctggggacgacggtttaaaaatttatgccttgtatgcgatgtgcagtgggtgatggaagaacgtctacatggctttaacatttgatttaaaaggcaaatattttaaatgaaggaaaacccaagaaatttaattgatcccgtgtcttccaggatgcggcttttttttttttttttttttgatggagtctccctctcgacgcgcaggctggagtgcagtgatgcgatctcagctcactgcaacctccatctcccgggttcaagcgattctcctgccacagcctcctgagtagctgggattacaggcgtatgccaccatgcccggctaatttttgtatttttagtagagaaggtgtttcgccatgttggccaggctggtctggaactcctgacctcaagtgatctgcccgcctcgtcctcccaaagtgctaggattacaggcgtgagccaccacgcccggcagatgtggctttttgataggcgttcttgatctttttttttgtggggcggggagtggggggttgtgagtctgtttgagaacctgaggaaaggtatgggccctcttctgagaaaaaggcagagtgacgctgaattttgtaactacgtcaggaggctcttgaactttctgcagctcactcgtggactttgtagagatgcgtgttaaggaagaaggttcagctgagaaaaatgttgaagggatgcctttcgctatttcgacatgtgtggctgtacaccagagtggcccgggtaacataaaaacatgaattaggcggattggccaggctcagtggaggctggggccgagagttatgtcgaagtttgtgaggttaacctgcacccagtgacagtcatggcgaaatttgtgaggttaactcgcacccagtaacgctgttccaatgcaaggtgtgtatttggtgtcatccacgggaagaggaaagagcaaattttctcatggccttggcagttccacatgatggacatttcatatctgcagttttcttcgcatgagatggcttttttgcacaaaaacactggaatccagtgagcaagaatgatagaatgcaagatggatttccacatgaggaagtgtcacgaacgagcgttttgcatctgtcagctggattcccccatgtgtacgtatgtgagaacatgccgtgtttcctgtctgtaatggtagaggcagccctgatcctggattttcacctgaggatggatagatcttcagggttcaagtgggtttgcatctggactttagggtggccctgtaggccctgtgtgagaagcccccttcccagtgaactttcccttgtgtgtccgcgtggacagccaacagggggagcagtgcgagcgtgaaggcagacagtggcctggcccagtctgatgctaagtgggccagaggcagtgagtaccatttcttgatctgactactcaagacaggcgcttccctaggtactttcacacctcattgcgaggtaggtgttgttcccattttacgggtgcagaagctgagctgcagaggcgttaggtacctgcctcataagtggtagagactccagtgtcaccctgcccctcacgttcggagcccctgagggagggtctgccgggcagctcagcccagcactctgtaaggaaatcttcagtgccactgcccaggatgtcttcccagggattgggcctgaatgtcttgaccatgccgtgctggaggtaggaggggtgtcttcatatggaagaactgtacatatttctttggcagatggctgaactctgtgaccccggggcctgtttcagcctcctgctgtcagaaagcagctgtttgggaagaggctgtgattcggccttgtttgagggccgatactctgaatgggtgaggcttgaaatcctccctttggaacaaagaaacatgtaatgattttgctgaaggtagaattgggggactaggcagagtggcctcctgccctccctagggtggttctgtcttttgcaaaggtggctgcatccttaggggaaggtgaggggagaagcagggagcatggagagaagtggctttcgattttctctctccttttggggagttcctccttatgtggctggtctggtgcatagtgtgatgtattcctgtacgcaacgttgccctgacagccagtccaagctgagtctagagctggcaaggtgagctcccagtggtaagagggaagtggtttgttctgcttttctgagatgtgttcttatgagaaggatccagcagcagcctgcagagatgtggggcctgaaaagaggccttgggcagctcttcttgacaggtcttggccctctagactgccttcagcacagttttggggagaaacagggagtgttcctttttcagtctatgcactcatcccctgagccgcctgacccagggtttagatgctccagggcagctgattgacaccggtgggagacggagtctggcaagcaggtgatgaactgggaagcgctgcagaaatgagggggcaagcgtggccagtcccttctgagaggatgtgtttggaagagagtgggcactggcgtggcactttccccttctgaggaaatggacaggatgccacgtggtgctgcagttctgtgtggggcaggttgtggctgcagagaagccctgggtgcagaaacagtcccccaagcaggtgcgagggccagggtgctctatgctgctccacacctgctgtgcgatgacatgtggccactgggctgcccagcacagttgtttagaaagcaggttcaaagggcagtgtgctgggaggaagtgctgctgtggaaactgcaagttttggacatgagttgctcaggtcttttcagccgtgcattcttctacagcagaattgcattattcacttgctcagtg

SEQ ID NO: 86 - DNA, 6220 bp, Homo Sapiens
aacccagacagaatcagagaaccagatggagacctaaggagacaagggagagacacagagagaataaaagccagagtgggggccgggcatggtagctgatgcctgtaattccagcactttgggaggccgaggcgggtggatcacctgaggtcgggagttcgagaccagcctgaccaacatggagaaacaccgcctctactaaaaatacaaaattagaaatacaaaattagccaggagtggtggcacatgcctgtaatcccagctactcgggaggctgaggtaggagaatcgcttgaaccttggaggtggaggttgctgtgagccaagatcgcgccattgcactccagtctgggcaacgagagcgaaactccatctcaaaaaaaaaaaaaaaaaaaaaacccagaaggggaaatgtgcaatgaaagacacagatattcggggccttacagtcagagaccaaatgagggatggtcaaccaagggcacagccactgggcacagggtcagggtgggaggcacgggagggctctgaaaacacagccacacacccttttaggcccatccttcccattctgtactctggcacctcaatgctagctttttaggacctaggactacccacactaaagccaagcccggcccaaccaagacagatgtttggtgggtggggctgcctgctggagcaacaggcctctgcaggccctggaggagaagtctagagaggtggctgcctggaagagagcaggcaggaccccctctcttaagcaggcacccccaccccatcaggtgcccagatgtcagtgcatggcaagggtggccctctgccctccagacctgggtgagaggacttgaaaacctgaggaatctgctcccatcaactgacttccacacctgcctgaagggaactgctggagggcacaggtgccaagtgggacccacccaaatgtggcaatgggtttgtatccagccaccgacaggctgcatgacggtggcaaagtcacttcccctctctggcctttgtttttccacttgtaaaatcatctttatggtcacttccagctgtggcacttggctttcattccagttgaccccctagctctgtgtctgaccctcccctgccaaatccattgctcagagtgggaaaggagaggagagggactatacttcctcctccctggggccccctgcagagcatctgggaagcaaggcttccctacatcctccatgcacccccttagagttttcaattcctttcctcgtgatcctgccaactaagacactgtgaccacacagagaaggtggggagaacgcagacattttggcttctgcagctttgaagttctttttttttttttcctctgaagttaaaagaatgaaactgggagaggtagtaaggggcaagaaaggagagtggaaatggagagaaaagggcagctctgagaagcagctggggagggaggcagatgagaatgcaccccccccaacagaacatgcagtcttggcccagctgtgctgtgagtgggcagctgggctggcccctcctctggtgctgccaacccgctgccaggcagaggggaggcccagaggagagggaagctgggcaaaggggatggaaggcgtccagcccgaccttaccaaaccccttgggcctcgtgggaaggggcctcttggagagggggactgaggctctagacaggatattcactgctgtggcaaggcctgtagagagtttcgaagttaggaggactcaagacggtccctccctggacttttctgaaggtagaaccagcctcataagtaactaggctgggtgaacgggggcgctggctagtttatggatcacagtcggctggtgaggccacgtgcctactgtgtggccctgggtggccccgggcaagcccctttccctctcaggacttccatttcttacctgcaaaattgtggagagggggagggctgaaacacatgactgccaagattctttccagttcctccgtcagggttgagtttagatggccggagtaaaagaaggagggaggtgctgcggtggtgggggtgatcttggcttcactagaatccccagttcttcccctctctacagttttgtctctgaggtcacaaaacctgtggcccccaagacacacatgcgcacacacgcgcgtgcacacacacaccccacacatttattttttaatctaggggctcaaaagatgacacgcgccagagctggaaggcgtcgccaattggtccacttttccctcctccctttttgcggatgagaaaactgaggcccaggtttgggatttccagagcccgggatttcccggcaacgcccgacaaccacattcccccggctattctgacccgccccggttccgggacgctccctgggagccgccgccgagggcctgctgggactcccgggggaccccgccgtcggggcagcccccacgcccggcgccgcccgccgggaacggccgccgctgttgcgcacttgcaggggagccggcgactgagggcgaggcagggagggagcaagcggggctgggagggctgctggcgcgggctcgcgcgctgtgtatggtctatcgcaggcagctgacctttgaggaggaaatcgctgctctccgctccttcctgtagtaacagccgccgctgccgccgccgccaggaaccccggccgggagcgagagccgcggggcgcagagccggcccggctgccggacggtgcggccccaccaggtgggtgacccggtggcgcgtcctcggcggcgcgccgagaggggacactctactgccgccccggcacctccggcacccggagctcgacggccgggcgcagcgcggggatcagtccccggcactgcgagggagttggcccagcgcagacgagggacggggggacgtggggacaggggtcggggatgaaaggcagaggccagggagggcgccgtcctggcacgcctcggagagggagcacctgtcgggctggacccggggaggcactagtgcacagatgggggagcagccgaagaggggagcgcccaagtcctcagccctgtctcctgaacagccccagccacgtgcccgaaaagccctagccgtcgagtgggagccgtcgtggcgctggcctaacttcgggttggaatatctccccttcccagaaaccgggcccgaggtgggctgggggatccttgcagccctctccagggggcctgtgggcctcccgccgtcaagtttctctttcagtttctggccgtccccctcactagggaagctccggtggggcgaggggagaggaagacggggagggcacctgcctctgcagagcaccttcccctccccttcagcgggttccttgttggaggggatgggcggccctccactcctcaccatctctgttcccgcacaggaaagctatctgtgggaggggaggggcctggcctggccgcggtccagggataggtaggcatggcaaggccaggggcaggcccggttccttggcctctgcagaggagagcgcttcagcgctcggctcgccctaggtgaacggccatggcgggctggatccaggcccagcagctgcagggagacgcgctgcgccagatgcaggtgctgtacggccagcacttccccatcgaggtccggcactacttggcccagtggattgagagccagccatggtaggcacgtcccgccctgcccctcctcagagggtccctaccatccaggccctttggcctctagttttactcatggtggtttggtgtgactctggtcctgcctgtccttctttgtgcggaaggggtggtgcccctgggaaaggggaagcctgggaggacagagaatgtttttagactcggatgtctgtggagctgctgggaacaagtcttgtgggccctggagtgccctcggtcatgagcctggggtttccactttattccagctccctgacctccttgcccaaggaggtgccacagtaggtttttctcttctgccctgccccaagggatgccattgacttggacaatccccaggacagagcccaagccacccagctcctggagggcctggtgcaggagctgcagaagaaggcggagcaccaggtgggggaagatgggtttttactgaagatcaagctggggcactacgccacgcagctccaggtgggtgtaggctctgggccacctacggggaggaagcatcatcttgttccagcatcagaacccctgggttttttcctggcctggccactgactcaccatgtgaccacgaacttattgggaacttttcttcgatttcccccaccccctctttctaaattcgacctgtcggatttctttagcatattgcaaagcaagggtgggaggtgtttgttgccaacagagagagatgggtgaactggccttatggaagcagcagaagggatggagggagactgagtcaggattcctatgttggagaagggaagaccagcagactctagaaatgaggccaccagacctccctcttggggtcttttaaaggtgagagaggagccatcccagagacaagagctggacacaagggctttgaattgagggtttagaaataagatgtagcttctttacttgaggggagtgggtatggaggaagagagggagtttttgtggaagcaggaaaggggtgtgggtagtgatgacagtcaagcacttattggaactcacgtatgtttcctagagagcccttcaatacagacagcagggtgccagggaaatacaagtccatcccagaagagggggaaaacaggagaagcctgaggggaagcaatataggaggccaggggcaggatggtgggaagtaccttgaccttggcatcagatgccctgagtctggagtcatctgctctctcacttggttgcgtctggacgagtacataatgtctgagcatcagttttctcatctgtgaaatggggatcatagtttctgcttatgtcctagagtttccatgctgttagtgccttgatcccccaccactttttggcaccagggaccggtttcatggaagacaatttttccatggaccgggattgggcagggaggtggtttctggatgattcaagagcatcacgtttattgtgcactttatttctattgttattacattgtgctatgcaatgaaataattatagaactcaccacaatgtaggatcagtgggagccctgagcttgttttcctgcaactagacagtcccatctgggggtgatgggagacagtgacagatcaccaggcattagattctcttaagaagtgcataacctagatccctcgcatgtgcagttcacaatagggttagcattcctatgggaatccagtgccattgctgatctgacaggaagcagagttcaggctgtaatgcgagcaataggcagcagctgtaaatacagatgaagcgtcactcacttgctcaccgccgctcacctcctgctgtgtggtccagttcctaacagaccaccgacctgtaccagtccatggcccaggggtttgggacccctgtgttacagtcaaaagatacggtagattggaagtgcttcataagactgggtatgatggctcacacctgtaatcacagcactttgggaggccgaggcgggtggatcacctgaggtcgggagttcgagaccagcctgaccaacgtggagaaaccccgcctctactaaaaatacaaaattagccgagcgtgatggcacatgcctgtaatcccaactactcaggaggctgaggaaggagaatcgcttgaacccgggaggtggaggttgcagtgagctgagatcacaccattgcacctttagcctaggcaacaagagcaaaactccatctcaaaaagaaaaaaaaaaaaaagagaaagtgcctcataaactgtgggtttttaattcgctccaaaccagatatgaagatcttggaggggaagatgaggatgaggaacagagatatagaggtgtctggggatagttcctgaggctccctgggaaaagctgaggcagaggctgaaggagaggaagggctgggcatagcatggggctggcatggctggagcagaggatggcgctggaggctactgttggattctttcagaaaacatatgaccgctgccccctggagctggtccgctgcatccggcacattctgtacaatgaacagaggctggtccgagaagccaacaatgtgagtgtcccttggg

SEQ ID NO: 87 - DNA, 6228 bp, Homo Sapiens
actctggtcaggagggtcctccagttcccatccccatgggcagagccagttgccatcctgggttcagcagaaagaggactcagaatagaaaatctttttctcccatgttggtcacttactcaaagattttgcccaactggtcggcttcagagtttccacagaagagaggcctaaggtgagaagggatataaggtagcagtcattttcaaagatatcttagttgaatggttactgcttagtggctcaaaataggaagtatagggaataaaggccaacaattccagcactttgggatgctgaggtgagaggactgcttgagcccaggagttctagatcagcctgggcaagcaagaccttgtctctttttttaaaaaaaaagaaatgccaggtgcagcggctcacgcctgtaatcctagcactttgggagtctgatgtgggtggatcatgaggtcaagagatcgagaccatcctggccaacatggtgaaaccctgtcattactaaaagtacaaaaattagctgagcatggtggcgtgcacctgtggtcccagctacttgggaggctgagtcaagagaattgcttgaatctgggaggtggaggttgcagtgagcagagatcgcactactgcactccagcctggcgacagagcaagactccatctaaaaaaaaaaaaagccagtcatggtggcgtgcacctgtagtctcagctactcaagaggctgagatgggaggattgctttagcccaggaggtagaggctacagtgagctgtaattgggccactgcactccagcctgggtgacagagtgaaaccttatctcaataaataaataaataaataaataaataaataaataaataaataaaaaataaagagaataaagggatatgaagttcctaattccagaacatttcagagctttctgctatgggcaagttagtagtacgcaagtaaaagaatggggccagatgcagtagcttatgctactttgggaggtaggggtgggaggattgcttgagtgcaagagttcaagaccagcctgggcaatatactgagaccccatctctataaaaatattaacaaactagccaagcatggaggtgcgtgcctgtagtgtcagctagttgggaagctgagatgggaggatcacttgagcccaggaggttgaagctgcagtgagctgtgatcatgccattgcaatccagcctgggcaacacagcaagccctggtctcaaaaaaaaagaatgggcaaggtatggatgtggtttatgaacaagcgatttggggaattcaaggtagtccagggtatgtgggtcccatactttcgacgaaacatctctgcaaagatacagccaacactccacatgtccacaggtgttgcatatgtggactgcagaagaacttcgggagctcggtaccagagtgtaacaacctaaagggaataggaagaatggatggggaccccatgggttaccatgaaacacaacttgcttgactgaacacatgaagcacatgacttctcaattgctacgggcaatcactctcctactcccaaccagaacccattttggtaccatctttctactgaccacgggtgtaagtgccatctggtagctgtagattctggccaggccaaagtcagccagcttgactgttccaccacttgtcaccagaatgttctctggcttcagatctcggtgaacgatgcaattggcatgaaggaaatctaggcctcttagaaactggcgcatcagatcctagtttcaaaggggaggtacagatgcactggaaactaggcaccatacctgaaatcccagaaggttctactacaaaggtcccaatccacctctcaatgcctaccaaccccactcaccttgatcgtttcggctggcaagcctggtgggggtgccttgtccagatatgtccttaggtcctggtctacatgctcaaacaccagggttaccttgatctcccggtcagttcgggatgtggcacagacgtccatcagcctgaccagagtaaatgctcacttttcaatcccctttaacccaacatggcctctcattatttcctcagggtccccacttctctacagatcatcacaccccacctataggctgtcttttccctttactccccacgcccaaccctccaccaccttctcaccggacaacattgggatgctcaaaagcctccagtcgcctcagtaaagccacctcacgaactgtgctgatgggaaggcctcctccacctcctcctccattggggactctcacactcttgagggccacaaagtggccactgtggggatcacgggccttgtacactgtcccataggcaccgacaccaatttcagccactggctcatatcgagaggtagccattctcagatcaagggagaccctacaatcacagactcctatcaccaaaagtcgcttacagagttaggatggtatgagcctgcagcaacaaagggactcccaaaaaaaaagcgcaaagaacaccaccagcatcccatcccccgctcccagtcttccttggggccggccccagagataacacaatgactcaataccaacccctccagccacgtgaggccctgcaatagaaaacgctttttcctttgggacaatcgcgccccgcacaaagatcacacatgacacatgccttgcatcgaagatcctacacctcagtccctaaaattatactttcccatgaccacaaaggccccacttcccgcccttgagcgacccttccataaccagctcgcgaaacgaacgcgtggaaagctgtgaggggggcgggcactggttctcattcctgggaagggactgcacttacctcacgccagcccggggtgctgtgggggcggcccgttatcggggccccggagccggttcctacggccccatacacccgagctcggtccggagcagctggacgcagagggcccgaccatagacacaggccgcaagctagagaggccccctcacccccaccctcaccatgtgaccagctgccaaagaggcgcgcggaaactgggagggcggggcgaacgccggacgttctgggcacgtgaccgccacccatgcgctgaggggcggacaggaggtgcttcgactgggaggagggcgaagagtgtaagggggcggaggggcgatggcagccacgtgatctgttgctatcacacgtgaccgcttgacattgctctgaggagcagaggtgtggctacgcggcgggcacgtgactggctgccacaacccccgctgcagggggggagcggtgagggggacaagagagggtggagcccgaggcggtgccatggcaacctaggccacccagagcccaactcccggctgaaggattgtctcactaccggtctgaaggctgaactccagtctcactaccggtctttcagcctgtctgcattggggagggggtgggagttggggtaccagaggtgatgctgtcaccttttcgctccaccatgagaaaacatactctcatttgtgtcattgtttcattcattaattctacaacattttactgagtgcttgcttccagtgtgtatgtgggtttttattttgtttttggtgtctgtcactggccctttaaagtagtggtacgactatctataaagatgtagccaacaatggggtcttctacaatagggagtaaacaatgcccatttgagggcaaaactacgattaaaggatgacggaaggcagattaatacagtaatccaacaggctcagtgacaaggtaatcctctcacttttccaacttccaaacctccctgggagtgttaatgcaaagacctgaggccatctggcagagaagttattgatgagcaggagacaggaatacttgaccttttaagttttttttttttttccagtaggaaggttctatgattatgtgatatttgtatgtgtgcatatatgcttctatgtatatatgtatgtatatgatattatttatcacatcatatataagacggatacaggattgcacatgtgcaagaaagttaccaccacaccccctgcaccctccagaccaccacaatgaatgaaaatgacatgcccccttctgcaaaccttgtgactactcatttggagttattgtgcttccctctttttccctagtgccgctttcttagcacttagcactgtccagaacacacttgttcccaaatggcctctgcccagacacctaggtagacacaagtagatttctcctactttgttttattggctccaaggtctttatctcccagccctttgggggtatgggagtaaaggaggaaagcggttagtgtctcatttgtgagaatttgtctaaaatctaaagccattttattaccctatttgccactccttccactctaacttctgttttccttaaccatctggctgagaatataagagttcaaactagaagatgaatataaaccatgacttagagcaaaatagaatacatattaatacagatgcctcctctttccatcctgatacttgtagccctgggcccctcctggcaagggcagctggaacactagtaagaaaaacctcaaggactgaactgactaaggggctcaagaggtgaatgttttattggctaccttgctaggggtgggtgctttgtaagccttctggaaggctaagataattgtctgtgagtttttcaaactcccttcccacaccagcattccccacttcagcctcaccttccacataagaccttcacagcttactgtctttgcaacagaagacgtcctctctgtctgcttgggtcccagcccctttttctgattcattcattagtccatccaaaacatttgaatacttcatgggaacattactgtctctccatcactttctattgaggaaccttaatttggcagtctgtcccaggctctgtcccctcccttcttctgttaattactctttcactaattaaattttttcccagtatgtttgacccaatgagctcccctggaatcccttttccctcagctttgcaaaggggaggagagggagaatgtaagtgtaagaaagaaaaaaatgtgatgggggtagaacttggcctcagagggaagtctccataaaaggaaaggggtaagtgtgtgtattgttcacttcagtgtagtggaggtgagggcaggagagtaccaggaaagacactcccatccctttagcacgcctacctcccctgctccctccctcacctccttcacacattacaatcacaggcttctgtttctcagacaatccgattccattccttacacacctctctttcccagtccccatcgatcacacttttcagccctttgggtaaagtgtatattgcttgagtcccacccctgcccatgtacctccctcacacctccgacacttgcacagctctttctttgcacattcccattttgcacaagcctcaccctccctggtacacctgcgtcatttaaccactcaccttccatgctcacccgctcatcccccactcccagacacacacctagtcaacttgtgtgcacactccccttccttggccactccccttcctccaccctcctcgggatcccacacttgcccccgcccctgggacacctgctcgtgcggggcagggcggggatgcgcagccgcggccccttctcctctccccctccccgccccgcccctccctccatccttcacccgctccccggcgcccgccccgcccgcccgccactccgggggggtctccgccgccgccgccgccggaaggagccgccatttgccaccgccgagcgcacgggccgagccaagcctgatcccggagccggagggggactgggaccgagagaacggcgatggggggcggccccgccgcaggaggacccgggcgcgtaaccccgggggcccggcccgctccagacccagacccgcggggtgcggcaccctgagcccccctccccgccccctgccctggccatggccgcccaccccgccgcccccgggccgccagcccgctcggccccgcaagcaccggagccccggcggtggcagcagtgaacggctgtcgcaggccccgaagaccccggcccggctcggctctctagcgcgcgcccccttcccggccttgtcctctcccctccccccgccgctagcgagccccccttgcacgctgccccccgcccccggtgtccggacgatgctcaagtctcggctccgcatgtttctgaacg

SEQ ID NO: 88 - DNA, 6139 bp, Homo Sapiens
ttccacctgaagtcagagatctgggaaggccccttagctcagtgcctcctaagaggcagaaggaagagcaggaagattgggcagaaccaccagaaagagggaacctcggtaggaagtagaagctagggtgggtcccaaggaaggcatttcacagtctctgtgtaagagcctcattctcagaatgcttttgttgagtaactgggcaattctaccaacctcacctccaccccactgtccaccttacacccccatctcctactcccccacacccacttcattctattttggccttcaatcagcctcatttcctgatgctgtactcagtgaaccacttgcagaaagacagtgtcacacacaaaaattgcttctagagaaggtacttggaggttctggggttggagggctcctaatataagaacagtgtccatgtgttcaggtggtctcttctggggcaccccttagtactatgagcccagggcagagcctggctcaggaacagcaagcaggccagccctggtcacggccttgctttttcaacttcaagcaaaatatttaacttgcataccctttacagctcacccactttctcaaagattcattcatatttaacccccaatgtcctgtttatagctctctggattggggggtacagggtgtacaagggatagaaaaatggaaagtaaggaactgtccagaaggaactggaacaatgatgactccctccttctttccatgcttcagagagactgggggaaaaacagcctcacccagatatccagctgggattgaccagggactatgcctatcagcccaatcccacccttttatcccccatcaggaaaaaggtgcccacatccatggctacagccatgtgtcttacagaagggtaagcatgatacgttagactagagacttagagtctcaagctagagggacttcaaagaataccatgtggccaggcacggtggctcacgcctgtaatcccaacactttgggaggctgaggcaggtggatcacctgaggtcgggagttcgagaccagccttgccaacatggcaaaaatctcatctctacaaaaaatacaaaaattagccgggcgtggtggtgtgtgcctgttatcgcagctactcaggaggctgaggcaggagaatcacttgaacctgggaggcagagattgcagtgagctgagatcgtgccattgcactccagcctgggtgacagagtgagactatgtttaaaaaaaaaaaaaagaaaaaaagaaaaaactcatggcaggcagagtgacttactcaaggtcatgcaggattgggattagaactgtgttctctggacttcactccaatgtccttcctcaccacaccaagctgcctcacacactcccatctcctccctctcacaagtctagagcacctgagatgctgatccaggcatgaatgggctctgaagtccatagacctgtgctccaatttcagctatttactgtgggcagtcacttaactcctctgaacctcaggttctcagtaaaatgtggatagccaaagtaactatctcaaaaggttgctataagtgttacattagccaggataacatatcaagtgcctagaacacagtaggaatttaataaatggtagcagtcatttattttaggtggtaggatccccagacctgaaaaatagtccttgcccagcaaagccaaaagaagggaagagaagtaggtgccagcagcccccacagtctttcatttcctctcatccagtcccaggccccctcagagctcagaaggtgatacaggtggtcagaggaacccagtgaccagagcttcggggagagcaaggcaggggggccaagccaatcagaaaggggagggagaaggtgcagggtgacagccaggctcctgccatggacagggagcagtgagtcaggtctgcagaggtaagaggagcagccgtgtgggtggggggtgggggtggggtgagtcacagcccagccctgcccagcctaggaggagagggccaggagaatccaggctgttcaggtcatgggcaaccccagagggccactgggagaggatgaagtatgggagcccaggctcagttttggagtatgtgcttgatttatacaaagtagagagagtatccaaggaaagctcctgggaatgagggagaagggcagctgaggagcaggtggaactagaacaggtgggcatctgtccaaccaaatatagtcattccagggtacagtgctgagtccttgctctactctggataatctcctcaggtttggaggcaggagagctggcaggctctggactctgccctgtacctgtacttggccacagccaaagaggctggttggaggatcctacacagccctccccatttggagtctcctcaggaatgcaaggtgctcagtaagctgcaggtttccggtagcattcacagatatccagcattttaatacagccccctaggggctcagtgctcaccattcacagcctcatctagggcggccaagagctcctcattcccctctgtttccccaatctggagacaggtggatggaggaggccaacactgcacactttctagagatgtgcctgggcatctccgcatgtgttacctctattttatatataatagtcatttgatatgggaattagaactggcgcccatttttacatagtagctctagggaaagcatctcaaccattccttgttcctatcacccagcttacctaagaagaacgtaacaaccccagacaacacgtctgattcaatttgccccggagtacccagaagggcagcaacccagcaggtgaggcaatgacaagagagagagagtgggacctatattccaggatcccccagtgcccatcaggccgatcagcttttccccgaggttctccatgaataccctcaacccacagtattgcccaaacagcaagaatcttggatctgcttattcttcaacagcccaccaaggtccaaggatggggggcctccacacccacctctcaaaaggtccagatctgcctcttgcaagtcacggactttccggtcccggccgcctcctaggggtagcagctggtccgtggatacagtgggagggtccgggttgctggttccagcagctagccctctccgaagccgctccaggctctcgccagtcaccagtgccgagagaactgcgggcgagaggccaggccgcatcagacacccgcccagacccctgaccaacacgcaccgatgccgacgcccgtccgccagagcgcaagggccccaccaagtggcccgtgccgggtgcgctgcggcgaccttcccccatgcccccagcacaacgcccccatccccccgatctccgggggcgtcggcagccctcttacctgcagccagaaagagcttcagcaccaccgacggcagcagcttcatggtcccgcaccgagaggaggcggcgaggcaccagtcactttcgaagcggcggccactgggcgctggcaccagagctgggcggcggagctcaggagattccgccgggcaccgtctgccgcccgcctctgcgtgcaagcctggccgggacccaggcgcagctcgctcttcttgagtgtcttgtcttgctcactcagcccgcccgcgcggccgcccgaccccgcgcgcctaggtcaggccagccagcagcgtggcccgcgtagctccttcggccgaatgagcgctgcccggctcgcggccgggaataaggctccaggaggcgcggaagctccgccccgcccggcgccgccccctccctcctcccgtgctgggaagctcgcccggctcgcggcgccggcagcgcagcccccgaccccgcgggcgcggcggaggactgggcgggaggagagggcggcgttcacaatttttgggaccaggccgaggcagccgcggcctgattgtgggtagggctactgaccggcaggtggcggagagcggttcctacctttccccaaacgcctgtcactctgcagccttgtgactgactgctgagctgagttctgttccgggcctggcctcttgcttcatctaagccccataccaggggtctccatccctgtcaccctctaagtttcagaagcccaccttttggcctaccaacacggcaagtatcaaataataattaattcatctatcatttaaaaattagacacgtgaatgccagccgttctcataaacccgagataaccagagttgaagttgcaggcacttagtatcaatccagcaaaagcaaaggaagttagtactctcttagtctctggagtggcttcctcccatcttccctcaggggacattaggatttttgaactatgggttgtaattcccaggcttctgagattggagagacacaggttgtgaaacaagccttattcttttccttgcctttgactgccacctttttcctcaacataaaaaatgagccaccctcccataggacccagctggctaacctagattgctgtttcacagacactaggtgtttctcttccaacccatgtgcttttgcaggggtcttctggagtcactgtcctgacccaaagaaatgagtgtctcagtaggtatttcagtttccagggacgtgctggggagagagttgtttgacacagggctgggttggctttcagagccctgaaattgtgccagatagagcacttgccggattctgcctgtgtgtagggataaaaacaggcctgctatttatacacagtctatcccactgtccctccctatccccacctttgcaggggtcagtctggccctgccctcttaacttgctccagtaacctaggcctaggtttccatagtgcactggaatcactacagacctgagtttgaatcctgcctttgctacttactgtgtgaccttggacaagaaacttaatttcactgagcctcagttttgacgtctctcaaatggaaaaaataataacaataataataatgactactttgtagggagctttttgagaaatgaatgcgggaacacataaaagtagttagtatagtgccaggcacactataagctctcaataaatgtgacccattattattgttgctgttaataataatcactaagcacttgaccactctatttccttagaggcctcttttctctcacttctctagatcgcttgccttcccctaggccatatctgaggctttatgatatagttgggctggtttcagacagaagctcacctgtcacctatttggctaagagccactgttagattatccttttgggtgatgagtatcgggcctaggacctcagtgcatggtcaccgcccaagccatgactttgccctccctcagcagctgcctggccacctgcttccccaaaacaaagccaccttggggtcaaggctctccccaggggagggtggagagaaacacttcctgacacatggtcaaatcaccccctttcccccaccctcgccagagtcacaccctgctctcttgccccagcctgcctttctcccttcacatgctctgtccttccgccttctcacccccacatcagcctcagtcccattcatggggcaactccaaactttcatcacacctggagcctcaccccagctaggtttgtgtgtcagccaggttttacaggaagggcctgaaaaaagaagataaaaagcttgaattggatttgggacagtcacttcccctctcagaatcttggatgtctctgagcaaagaaaaggaatcacaattcatgctgaggcaatctcattaactcaattatatcataaacattaactgaacatttttggggggcactggggacatagaaataaataagacagcccaggacctgctttcacagagcttatattctatagtagacaggcagcacattaaggaaataaacaaggaaaaacatatcctatagtgataactgctaagatgaaagttaaaatacaatgatgtgctgtaggataatatgttccagtgcccaggatgacactttaaactgattagcaaagccttctctgagcaggtgacatgtaagctgaggcctgaatgagaagaagaaatcagatttgggatcatctatgacaaaagcattccaagatgtgcaaatagtgcaaagactctgaaatggaaaaaagttgg

SEQ ID NO: 89 - DNA, 6237 bp, Homo Sapiens
cctgtcacagagtccacatccaaagaacccaacctgtgacagcaccaaatcaaaagagactcaggaggctgaggcaggactgcttgaactcgggaggcggagattgcagtgagccaagattgtgccattgcacgccagcctgggcgacgagagagaaactctgtctcaaaaaaaaaaaaaaaaaaagagagaaaacatatcaggtaggggtattttacaaaggagagaggatatacaataaagtgttcatacatacatgggaagcaaaacagcactgactctggggccagactacctgggtttgaatcctgccttttagctctgtgcctcagttttttcatctggaaaatggggataataagagcacttatagggctgtaatgaggaagaaatgagacaatgtggataaagcagttccatagtgtttactatatgtcaaccactgttctaagtggtcatttaataaacagctgtgaggccaaacccacaggtcccgaggggcagttgggctgggactctccccagactctgggcatgggcacaggtacagtgtaggccagggcatgctgaagcatgcatgttcacagaaataggcctgagcagggctagcatgggtgacgtcacaggcgtgtgcttgtgtgggtgctgggctgctcctcccagacagcgcagctgcacgtattgccattcacacccacgcacccatatatatgctgagctgggggaagcccacacagaccacaccctctgcatgccctgtttttcctgcacctcctttggtggaaggaggcacctgaggcctgggatgctggcccagaagtcccaggaggaaatgggtcctgttccctgattacaggcctggcaacgggctgaaaactcaagctcttgttggcagggatttcttgagcccctagaggtccagacccagaggcaaaagtaaaagcaaggaagccttaccctgcatgttaggaagctcccaaaaaaatggagaaacggatgtaaaaagtgcatcagagcccacaggctgccggagtcagcacagtaagctcaatgagggctgcagcacttaagagggtgcctcctgtacaaaacaggatcagacagccagagaggggccccattcagcccccgtctgccttcctggtctcatcactccctgtcccctcctcagtcaggaaactctagctttgtaaccctaaattcaacaacctcttcctggcctcagggcctttgtacatgctgttacctctacttggaatgtacttttctccaacccacctttaataattcacctcgccatcgactcacttcctttagacctctgctgaggtctgaagagatctcgacccaatgtttttccttctagccctcatcataattgtctttatgtaacagagtgtttatttaatgtctgaactcccagagagctggcgctgtgtctctcttgtgctcctcatgttgtcaatgcccaacacagagaagagcagggtccacagaacttcaagcctaagccagttcaagccacactctgtgagcactcacgttctgctggattccctgtgcccaaggccagcggtgagcatgcctcccctcacccatgctgattaaccagatagcctccatgcccactgactactgaccaccaggacttacctaagccagtggatctcctgtgaggcagaaaactcatggagtcaggccgacttgggttctagttcccacctagtcatgttatgtggctttggggcaaattgtagaacttctctgaatctctgtttcctcatcagtaaattgtggaccatcattcctgattagaagataattatgaggatcaggtgtgaccacaggtgcacaccttcagcacagggtctacgctagctccgtcccgcccacgtaaagacctgccactaggtggcagtccatctcagctaccccaccgctccttactccacagaggctggctaggacaaagggtctcaatgtcatgctgaattctgagcttcttaggggacgcacttgaggaaatcaacgttaacacacaagtttccactacagcaagacaaagtcagaagcagcagccccaggtcactatccagctgagtgggttgcctgagcacacgctcttacaaactctagtctagtcctactatctcacaattcccaggaagcctggctctttctctggcatcagctggaagctctgttgggcttctcacctctgaaatgcagtaagttgtcctgctgtgcctggcagccgacccactgcctggctcaacatgtcagacaggctccaccgcgaccgtgggtgtcctcaattttggcggtgctgacaagggtagatagattgcaggggtgagtttcaagaatggcttcagaaagacaaagagtatgaattatattccataaccagaaaaaggccttgtggctggagaatggagagtgaaggatcacttgtgagagatgaaactggtgagatgggcaggtcatatagaacctgctaggccaagcagggagtgtggattttaggtgcaatgggaattcacggagggttttagcctggatgtaggggatcatgatttaatttcattttaaagatttaaagcatgataaatccaggcaaaaccaaactgatagatccaggcaaaaccaaacaaggtgagtagtctgggtgacaggagatggggccttcagcttgtgggctgagtgacaaggtcttgatggattggaggtgaggcaaagggaggaatcaaagttagctgcaaggtttttgaccttccaacttagagaagtttagcgccgcgttctgagaaagtgaagactgtggaaggaatcgtttggggagggaaggcgagctgtctaagggggggggatgtggaacatgcagtgggatgctggggcctggaacgtaggggagatgcaggtttggagtcaccggtgcctgtgttgttgggcaaagccaggggaaaggtcaggtcgccttgggatctggcctagcactgagtgcagaggaagagaagcttctgagatcgagaggcagcggctacaggaggaggaagaaagcaaggcggggaaaaccaaagttcaggagagcatttgcaggagggcgctgcggggtagggtctgagtcggagccccgaatcggactcgagtcctgtcgcgtggggacggagcgtgcagaggcccatgcgagggacagacacaaaggccctgggagctgcaggtcagaccactggacagcgcggccgcggacctaacgcccctgtaaggggtgctcacgcttggggggaactctccgaaagagaggaccactgaaagccaccctggcagcaggggcggaacagacagacgtgggtctggccgtcgccagaactgcctgcggaccagccccgcgctgccgggggggcgggacatgtcggctgtccatcagtgcccgcgaccaatccgcaggcagccccgcccccgcccctcccgggagagggcgcgcggaggacccgccgccgccggtgtgaggcggcccgtcctggctcccttgtccgggaagcccgcccaggtaactgagtttggccgggcattcccggaggacgcgccatcccctcacgtcccgtcccggtcgctgcatgggcggtgttcgggacgcgggggctgcgtctgtgcgggaccgcggggtagcggccgcccgtgcgagtacgcctgactgacgcgccggccgccgggcctgcggcctgtgggcggggctgccgtgcgtgacagggccgctcgtggccgccgggctgtgtccggggccgcgtgagaaagctctgcgggactgagggctgggtgggtcgaccgggaacggcgcgcgctcccgccgccatcgcgcctccgtccccgcctgcggcctgtctgggggtcgcggggcgcaggcgcggcgggccgacgggcgggggtcctccccacgggtgcgcgggcgcctttgttcccggcgccgaagcggggtggggcctcagggcagccccgccccgccgcgctgaggccccgccccgtgtccgcctgcaggagccgccgccgggtcccgctcgtctgccgcctcagcctcagccccaacctcagccgccgccgttgcgcttgctcccgggcggtcctggcctgtgccgccgccgcccccagcgtcggagccatggcgggcgccgcgtccccttgcgccaacggctgcgggcccggcgcgccctcggacgccgaggtgctgcacctctgccgcagcctcgaggtgggcaccgtcatgactttgttctactccaagaagtcgcagcgacccgagcggaagaccttccaggtcaagctggagacgcgccagatcacgtggagccggggcgccgacaagatcgagggggccagtaagtgcgcccacttcctgcctgggcccgccccgcgcgggggtcgtgggagcccggcccgactgcttgcaccccggccggccgccccagcgacttgggcaaactttcgggccctcccagactccctccgggccccgcccccgcttcgtctcgggtggtcactgggggcggggggcatccgggtcctcggtcacctgacaggacaccccccctcccccagctggggggagtgttccaggcgctttgccctgaggcctaaaaatcctcgcgggctggagacctgcggtgcaggcatcgggccccccagaccctgggagtggtggcggcgtcggcgaggggagctaaggcagtggcccccaccctgcacgggaacctggggcctgaccagacggtccccgcccactctttatccagaaagagcagtctgtgaaactctccgggcccccaggctgggctcttatttgcaaaggaatctttgggttccctaagtagaacttaggcagatgttgggtagggctggtcttggagcagagctgggcctactcatctccctctgggggagagggaggaaggtggtcttgtttggtttggagaagcctgagagaagccagtggctggaatttttttttttttttttctgctacttttgtcccaaagctgggttttggaggcctatgtgggtgggcagacactcaatgccagggcagggactccccttgccctgggaagcacgttcccaggagatgggccccataaaggcctgccccagcgccttggagtcaggtattcttctcaggagtgcagctagtttgtgagtctagccctttgtcctctgtccggtggcttcagggagcgggagcggcttctcttagtttcctgccttttcgccttcccaggcctgagcttggctgcttttgcgctggtctctagtgggaggagggagttgggggattttgaaaaaccccagatctttgagagttgttccacttagcgcgtgcctgtgctgtggtcggatgggcactctgctctgccctccattcccccgcctctcagtgtgaagagatggtgtgtctgcaactctagactgggttgcttcttgcagggacccccggagactagggttagagagacccaggctcagaaccaggtctgtgtgaaggagggagatcaggaagtgacaccccaagggggggtcccacaaaccttcttgggtatggtgtgcatgtgtgtagatagttgaggagattgggaggaaggaaggtcttgtggtgaggcagccaaccatcctcagctacaaactccagatctgacacagatctaatgcagctgctcaacttagaaatggcagcccccttcctcagtgcccccactgaccctgtcagccattgggagaacattttagtgacttgagagcctgtggattccaaagtaaaggaagaatcgacactgcaaagagctgagataaccctgggaacatcactcaggcatcaggctccaggcatggtccccttccttactccctatgctgtgttgagttggtggcactggctggaagttctcagagatctcctgggtaacagactgcattttaaaccacgcatattagcaggcaataaatgtagcacagtggttgatggcaagtctggatttgaagcccatatattcattgtgtgtttcccggccagttacttaccttctctgagccttgatttcctcatgtgtaaaatgggggtaataatatatccagtatatatggttgctccaggatcaaatgagacaattcatataaaacatctagcattgtctgacacataaatgtttaataaatatgagctgttattagcaataacattaacaatagacc

SEQ ID NO: 90 - DNA, 6200 bp, Homo Sapiens
caggtgatcctcccacctcagcctcccaaagtgctgggattaaaggtgtgagccaccaccacacctggccttcaattcactttttaatgtttattattttactctgatactaaaaattatgcatgtttaacatgaataaggacacacttctacacacacatgcatacatttacatctatgcctctatattaaaaagtatgggggaaagaaatggggagatgtaggtcaaagaatataaagcagcagatatgtaggatgaagaagtctagagatctaatgtacaacatgaagaccatagttaataacattgtattttatttgcgttttttgttaaataagtagattttagctgctcgtcatactttacacaagcctttatgtgacggtatagatatgttaattcacttcactatagtaaccattttactatctatatatatcccataacatcatgttacaaacctcaaatatacacaataaaatttatttttatttatttaatttatttatttatttttgagacggagtcttgttctgtcgcccaggctggagtgcagtggcgcgatctcggctcactgcaagctccacctcccgggttcacaccattctcctgcctcagcctcctgagtagctgggactacaggcacccaccaccacgcccggctaattttttgtattttttagtagagatggggtttcaccgtgttagccaggatggtctcgatttcctgacctcgtgatctgcccacctcagcctcccaaagtgctgggattacaggcatgagccaccgcgcccggcctattttatttatttttgagacagagtcttgctctgttgcccaggctggagtgcagtggtgcaatctcggctcactgcaaactctgcctccctggttcaggcaattatcctgcctcagcctcctgagtagctgggattacaggtgcccaccaccatgcctggctaatttttgtaatttagtagagacggggtttcaccatgttggccaggctgatcttgaagtcctgacctcaagtgatcttccagctttggcctcacaaagtgctgggattacaggtggtagccgccactgcatccacccagaataatttattttttaaaaaactatgagttcaggccgggcgcagtggctcacgcctgtaaacccagcactttgggaggccgaggtgggcggatcacctgaggtcaggagtttgagaccagcctggccaacatggtgaaatcctgtctctactaaaaatacaaaattagccaggcatggtggtgcatgcctgtaatcccagctacttgggaggctgaggcaggagaatcacttgagcttgggaggtggaggttgcaatgagccaaggttgcgccattgcactcaagcctgggcaaaaagagcaaaacgccactcaaaaacaaaaacaaaacaaaacaaaaacacccccccaaaaaacaaaacaaaacaatgagttcacactgatacctccaattccaatacaatagcgtaaggtattctcccttcccatacttctaacgtcattctaccacagtgagaaagctggctctgtcatgcttaatatatttagtgacttaatcaaccatcctgaatgcaactaacctcccatctaagcttctaggccttccccacttggatgccttgttctcccctcttgggccctacggctaagactttgtgtaggactgcctcccaggtgttcaagccctcttcattttctcaggttcctcagcctccttacctgctaggtcaccaacacctggctgtggataaccaggtgtagatgtttcctttgttctgtacacgtttcctttgttctgtacacctaatgtctttgacacttagtattttaggatgggaaaggggaagaggaacactgaatgtgcacttttaaatgggtattgtgcctcttattaagctctttattcacatcttatttctttagtaattcacagaattggaatttttggattaaagttctttttttttttgagacggggtctcactctgtcgcccaggctggagtgcagtggtgtgatcttggatcactgcaacctccgcctcccgagttcaagcaattctctgcctcagccccccaagtagttgggattacaggcacccgccaccacgcccagctaattttttgtatttttagtagagatgggtttcaccatcttggccaggctggtcttgaactcctgacctcgtgatccacccgtctcggcctcccaaagttctggaattacaggcgtgagccaccgcgcctggcctggatgaaagtttttttaaagggagtcttgctctgtagccctggctggtgtgcagtggtgtgatcatagctcactgcagcctcaaactcctgggctcaagtgatcctccagcctcagcctcctcagtagcttggacgacagctgcacacaaccatgcccagctaatagagacgggggactcactatgttgcccaggctagtctcgaactcctgggctcaagtgatcctcttgcctgggcctcccaaaattgggattacaggcgtgagccaccgctcctggcccgaaagagtgtttttaaggctttaaaaaaatattgccaacatggtgaaaacccgtttctacaaaaatacaaaaaggatccgggcatgacggcgagtgcctgtaatcccagctactcaggagactgaggcaggagaatcgcttgaacgtgggaggcagaggtggtagttagcggagatcgcgccactacactccaggctgggcaactgagggagacaccgtcttaaaaaaaaaaaagttcccaagtctaaaaaaaaaaaaatcatcaatctgctctcaaaaactgtcgcaacaatttacaatctcatcagcactgagtatccatttccttgcacccttctcagtagtattaccattaaacaaacaaaatttatatgcgtcagtttgttgggctcaaaggagcctctcgacaagtttcctattccccacgctgcctctcctctggacacaggaaggggtccttttccttatttattttgttatttcattttcgtcaacacggctcggcttggggacaggggtcgggggcaggccggttaccgcagaggtggaggccgcgcggcacctggcctggagagctcaccacacagcgacacagacttcttctcagctgggtccacctgcttgcctcggggcgacagagggcgccacggcgtccgcgacggaccccgcccccaggcagtgcgccgcgctcccgtgacgtatttccgcgtcatctgccgccgaggcttgcccccattggttgtctgcgaggcaataggggcggagccgagtgggagtgtggaaagcgccgcatcccgggtgggaggcgaggcttccccttccccgcccctcccccggcctccagtccctcccagggccgcttcgcagagcggctaggagcacggcggcggcggcactttccccggcaggagctggagctgggctctggtgcgcgcgcggctgtgccgcccgagccggagggactggttggttgagagagagagaggaagggaatcccgggctgccgaaccgcacgttcagcccgctccgctcctgcagggcagcctttcggctctctgcgcgcgaagccgagtcccgggcgggtggggcgggggtccactgagaccgctaccggcccctcggcgctgacgggaccgcgcggggcgcacccgctgaaggcagccccggggcccgcggcccggacttggtcctgcgcagcgggcgcggggcagcgcagcgggaggaagcgagaggtgctgccctccccccggagttggaagcgcgttacccgggtccaaaatgcccaagaagaagccgacgcccatccagctgaacccggcccccgacggctctgcagttaacgggaccagctctgcggagtaagtatggggcgggcggtgaacctcggggcccggctggggaggcccgagccggggagcaggagcgcgcgccaggctccgatctggtttgtcacgtacgtctggggctggcagggggcgagaaactcccggccgccgaggtatcggtgactaagcactgattgtgttcctgactcagaccagttagcggatcccgcgggtctccattcctctctgtaccccttttcccgaccgttttagtggttcctggccactgtacagtcttctcccaagaaaataaaagctagcacgtctcccctgcctcctcccagttctgttctaaatgtgatcatctgggagtctggcctgtaacggggagaggaggctaatgttttggaaagaattaagatcgcatctgtgcttttgagaccagctcagggtattaagtgtggagcatcatcctcaccttcatgcctgacacctgtggggcctgagtgccttgttgcaggccaactgcctggccagcgggggcgtgctggaagtccgtgtggacttcgtggcttttccttgctgactttggaggttcctggtacttggccttcctgggaaattgctcaagaaagcggctttcttcttcatcctactcttcattcattcattgaacaaaccattttctcactaatgatttcctagctttccgtacttcaccaggagcccctaaactcctgacctgaggcatgaacaccatgacctagaaaccacatgctaggtgctccatctctgcagcttccagcgttgcttacaaacgagcactttatttcattaaataatcatgagtctgtttcctgggggtttctgagctcccacaactctcttgggttctaggtaagggacaagactatgtgagggaaagctgcttagctagctagagaaatagccagaaaagattaggttattattatttttttgcctttttttggttgttgtttgcccaaccttcaataaggattgggttcttaatcttttacctgcacactgcagactttaggaagctaattgatgaaatcagaataggcttggaccttatgctctttggtgatttctgtaacctcccttcctttctctagatttttagaaaattttattttttaaacttttatacagatggggtcttgctatattgcttaggctggtcttgaactcctggactctagcgatcctcccaaagtgctgggattacaggcatgagccactatgcccagccaactttctctagattttaataacccggggacctgttggcttgatgacttgttccatccctgtaatgatcacaaggtcgatggtggacctgtggtgtgtgttcagctgtgtttttcagacctgctcccaacagactctcttctttagtcccctctcaatcctgtggggtctattttgcataatactgacttgtataggtagttggattgcattattgcattgcaaacatttgttctttttttttttttttttttgagtcggagtttcactcttgttgcccaggctggagtgcaatggtgcgatcttggctaactgcagcctctgcctcccgggttcaagcgactctcctgcctcagcctcccgagtagctgggattacaggcatgcgccaccatgcccggctaattttgtatttttagtagagatggggtttctccaagttgttcaggctggtggcaaactcccgtcctcaggtgatccacctgcctcggcctccgaaaatgctgggattacaggcatgagccaccgtgcccagcccatttgttcagttttagtatacagtgtttcaccctcttaaaatagactgaaagtcatgactgttgttaggacaagttttgaccacagtggattctggctgagtgttatggcctcattatcctttcctatttgatttggaagtggatactgagtagaagtacctgttatcattctgttgtaatcgtgataccacaactgtattctctcaaggaggaggaatttcattaaaacagtaaaagcaggatgagaagaaactaccccagatttggtggcagaaaaatttggatggtactgggagagtctaaacagtggttaaaaggtaagggctctggagtcaggctaagtttgaagcctagctctgttgtggttttttttttttttttttttttttgacagtctcgctctgttgcccaggccagagtgcagtggtgcgatctcggctcaccacaacctccacctcccggcttcaagcgattctcctgcctcagcct

SEQ ID NO: 91 - DNA, 6198 bp, Homo Sapiens
gtccttaggcctaatggaaaagtcatctatttttcatatgttgccacagtaacagtaacaagaagcatcacttattcctataagaaaagtcccctttgcaggggacattgagtatttatagaaagatcactttatcctgaggaacccaaaatctggaaaagcaaatatggaaaactcagcctctaaggcttccatatacagctttacagcccatgttctaagtgaacactccctaattatggctgcccaatacggaaaacatgtgtcctaggaaaacctccactgtctactctgaaagacatcacgtccaggtaatagagaaaagaaacgtcttctttcagttcccgtactggtccctcagtcctgacttaaacagggaaggtgatctatttcgcctctgcccatccttaatgctacttcatttcctatgacatcattctttaggtccacattcggtccttacttacgggagttgccataaaaataataaagcttatctctggattataaaatccatttttgtatcataagatcagttgcattttgtgtgcagtccttatttttttttataaatagcttccatatttaccatctcatttgagtcttacaacagcctgtgaggtgggcacagttttattattcccactttacagatgacaaaactggaacttagtgctaacttccataaacaactgatcgttgaatactaaaggagatacaaaaaatttgcataaaaaattaaataattaaataattaaaattaaaaaagattaaattaaaaagaattaaagaattcatgatgtctaaaagaacctccagggccgggcacggtggctcacgcctgtaatcccagccctttgggaggctgaggtgggtggatcacgcggtcaggagatgcagaccatcctggctaacacggtgaaaccccgtctctactaaaaatatatttaaaaaattagccgggcgtggtggcgggcgcctgtagtcccagctaatcgggaggctgaggcagaatggcgtgaacccgggaggcggagcttgcagtgagccgagatcgcgccactgcactccagcctgggagacagagcgagactccgtctcaaaaaacaaaaaaccaaaaaaacaaaagaaaacaaaacaaaaaaaccctccagatttgcttgaatttgtcattggccaaatcatattcaccagaaattacctaggtaggtttttaggttgggtgatatttttcgaaggaatggtaaagagcatggagatgagataaacgaaaacctacaaactctcccagttatacaactcacataacctgcaatgatgtctggaattctatggggcccaaagtaacaacaacaatgatgatgatgataagattaagatcttactacataccaggcacccttctgcatacattaaatatattcaacaaccctattaatatccccattttgcaggtgagaaaaacaaggcatagaaaagctaagtaacttgcccaagatcacacatcttgctccgtgaacacagaggaggaaatgtaactggaaatgccaagcccccgtgcggtctgcctgccagtgatggaaacctgacatgggagggcagccaccacaggaacctgggttatgtttccagtgttgccatttgggcaacagtcttcacattctcttactgaaaacattaatcaatgctcaggttccaagtaatcaaacattaaccgagactcctaacagccagttccttctcagactagccccacggaggtttcctagatctcgggtagcgatggaacactggttgattctcctggaactgccttcaactatttaagaaaaatcagaggggaaagcagctttgaaggaaatgtgcaaagtaaagctatatgtgggaggcagcagttctagtaaacgcacagaactcacagctgtgatttttcttttaaagacatataaataaaaaggagtcctcactggtgtaaattactcctgccttttttttttctccacttttttcaactgctcacattttggaactgtgtgagcaagtttttacatattgatcaatcttttaaagtttatacatcattttcttaaagaaggaaacaaagatcaagctgaaaagaacattcaggcaaaagagaaaaattacatgatgaatgaatgcagtctttgtgggcgagaattctgggatgggagtgtggggtgtagggacagctttcaaacacttactcaaatgtgcttatcttcatcatttcctgcctctaatttttaccgaataaccaccttgagatcccaggaattcaataggaaactcaatttaacaacaagttccagggtattccacataatctctctttaaggcaaagtcccaaaagagagatgggactataatgaccacaagttaggtgacttttcatattcacattccttccacgttcttcgacaatcctggtccagttacttactgtggaccctgtgtgctttactttcctctgctatataatgagaataatattaacaccttctttatccggttggtgtgaaaactgcatgaataaatgtaaagcacttggactgtgtctgacacagagtaaaatgctcgaatagcatcagctgttattactactactacttactactattatttgcaaaaacattacaagggataattatatccaggaagcttcccttgtattggtaatgttttattgctttttctaaaatttaaatcagagcaacagtcaatacatgcacacaaaaaaggcaattcttcaaaaatgtgggggaaaagcctcccatacccatgttacctgctggtgagtttcaggtaagggtgtagctgggagcatccggttccaagactgccttgtatttctcttacaggatgcctccccttctgctgcggtttttaatcagcgtttctagggcaggcttgcaggcggggccgcgaaccccctgtagttgtacacggagctgggtgaggctgcggctctgggcatttctggggaggagttccatggctttccacagactctaaccaccctgcagcgagccgcatgctatacgggttaaactcggggcatatcgaacgaacaattcacttcacggaagactagcaataaccaggacacctgcgctattgatcagctatctcaacaccagagagacccaccagcacaaggggcaagaattggccaggaggcgcgcggcgctgcgccctcaccgcgtccagacagacccttgaacttcaccgccaaaaaacgcaccgctccgcagacccgacccgggagaggggtttaacttcccctcacctttcccatccctccttcatttccaaggacatactcaaaggaaactggcaacactcggtctagggtttcgctcctgccctcggcggacaccgaaaccacttctcccagggaagttaattaaaggaaccattaatccgcccaaaaatccaaaacctacccccaaagctcaagagctctgaaaagagatcgagggcgcctctgccgatcttgaacatctctgctcgtcgctggggcttagaggtgggcagggggtgccaaaggggcgcaggcaagacccggccagagggttagacgccggcccccgttccgaggcggcccagtctacacgccagcgacgccggctgagccgggcttggaggcagccaggtaagcaggtaggtgtaggcatgtgtctgagcagacacacagctgcggcggattaaagttcaagcccgttcacactccgcttccccttcccaggtgttctcacgcacggcccaggcagccactttcccggggaagcctcggcgctcgaccggacagtcccctctttgtcattcttaatgactccccttgcctcccaggcgccaacccattgagactactcgcttctctccactctcccaggcgggcgcagaaacccccggaaaggggaactcggcggggaccgggggaagcagggtgtcgcgcggcgcagggggcgccgcagccggcgtacgtacccagagcgaacagggcgagctgtccagccgaggggaccattttacgggcgggcgggcagcaggctctccagcctcctgccctacctgcggtgcccgagtggcggagcggcgccgcggtgcgggggaaaaagacgcagactaggcagggcctgcccccggcgcgggagggcggagggaggaccgagcgcctctctgctggcactcgccccgcagcgctgcccgccgggcggaaataggaaggcggctaccgtcacctcctcgccactcggcgaccggggcacagctgacccccccctcccgccccgatgggggtgcccccctgagggcacagagggtgggggtttggggtaaggggcggggacgctgagcgcaccgagcagggcgcgggctgctgggcggggcgacctgggatcccagagcctggcggcgcgagccgggcacccgggccgacgaaaaggcaggaagcgcctgacttcagacaccacccccgactgccagcgccgtgcggcagcggactccagcgtgcggggtcggcgccggccgcgtagccggattgtcctgggccgcagtggcggcttccaggctctaggcggcggagcggagccgcccgggcacccgttacctacaccgaggggccgctcctggggcatctctggggcggggaaggctggaggctggggacgcagccaggaaagggacctgtgagtttcgccggccgcttgccaagacttggctcaaggaaagtggtcccctgaatcaatgaagaatttgttaaaccaggtttcccacctgtgccacagttcccatcaattctggcaacgcctgccgccttacctcccaggcaggccacatcgttaagatcagtcttcgtacttctggcctgggactgataaaaaatgggtctctgtgacgaatctggttatatggcaccaccagctgaggccaaaagcctgctagcctgccaccaagtgtaccccgaaagaggggtgtgtgggcccgagtcacctgggtggtcctttcaggatttgtggctctgaggtggcccctggtgctggaatttggggaggtggaggggatagagggaagacattctgggcgaagagtggaagatccataggttcctcggtgaccctcatggggacagtacacccgggagattcatgttctccaggtacccggagctcacggactgaccctcttctcctgcctcctctggcctacgtgctccgggtagatccactttccttgaaggtgggggtgggggctgttgggcctggggaatcttttgctgtttacttggggaggctcaggctctcacggttgacctctgcccagtttgtttcatgtaagtagagcaacctagtttcaagaaggaagcaccaggccattggtctcaacatttgggcaggaagcaccagtgtaaatcattcctttcaatagatttgtcggagcatactttgttcttttagggtaaatcttttccttggtccaccccatgcatgtacaaggcacacatgcacttcctttagtaggttgtccctgactcccacttccttcaggttgatcttgacctgctctggtggtttccctgtctcctccctaaactagtctgctttggctacagaaggggaggaatcaggggttcccccacccttctcctgttccccaggactagagaaggacctgactccttgcttcctactggaacacgcaaatcaagctcactgtggctgagggatggctgcccagccggctgagggtcatgttcagcagtttctgcttatctgtcccctacccccaaagtcagaggtggagggaagtagcagaatcaagtcaatttccttcatgattggaaaatattttaaatcaagaggtaacttgcaggccaggcatggtggctcacacctgtaataccatcactttgggaggctgaggtgggtggattgcttgagctcaggagttcgagaccagcctgggcaacatggtaaaaccccccatttctactaaacatacaaaaaattagccagacatggtggcgtgcgtctgtagtcccagctacttgggaggctgaggcacgagaatcacttgaacctgggaggcagaggttgcagtgagccaagattgtgccactgcactccagcctggatgacagaacaagactctgtctcaaaaaaaaaaaaaaaagaaaaa

SEQ ID NO: 92 - DNA, 6222 bp, Homo Sapiens
ctcgggaagctgaggcaggagaatcacttgaacccaggaggcggaggttgcagtgagccgagatcgcaccattgcactccagcctgggtaacaagagcaaaactgcatctcaaaaaaaaaaaacaaacaaaaaagtaacacagtcatgactattgtctatggttatgactattgcgttcattctggaatggcagagttcagtgttcggaaggaagattacctggctcacaaagtctcaaatactgtgtaccgcttggctctttaagtttgccaacccctgggttggtggcgggtgataatgtaaaaattaatacaatggcagaagaatgaatgaactctgaagaacattctttggaagcctacaagaatggagtagaagaggatggatgagcagaaaggctcacacttggaatgccagtgtttatttaacacactaaggtaaatacatatcacatataaaaattgtcctataatacagccagtgggggaacataaaaataaatgcataactttttaaaaggttcatcctaatgtggctctaaaattaccttgtgtatccaagagtctacatggtatgttttggaaaatgccaggttatggtagctataaactgtccaggaacatgggagtgtatgcgtatgtttgcgcatgcgtggattttcggaattacaaaatctgtttgggagaaccgtgttccactgagttgacctctgtagcctttctaatattgctctgtttgattaacagattcccttctacaccccgataggaggagtctactttaagacttcaccaggttccagcctgtcccctgcctcccccgaacattgcctggttccaggctcccagggatggcagctaccatcttggctttgaagagtggggacatccggaggtagccccggccatggtggtggatgaagaggaggtagatgggaccaaggacccagaggtacatggggggtacccagacccctgctgttctcaggaagcacaggctcagcaggctggtggcggcaggttcaggctctgtctggttccagacctgagggaacacaaagaggacccttaggatggtacaaggcaggggtccccagctcacctgcccagggggccaggcaactttttggatctttaacatttacacaaaaatgtaccaagtactctttggaatacctactaattctcaattcctttcatcctgacattaaccctaggtagttgcaattatattgatttgcagatgaagaagctgaggaccagagaggttgagtaactttgctgactttacccagctgaggagtggaagggctgggatttgaacccagggaactgggccatgtggtctaggagacctgggctccataatcattgctaggcatggactgtcagttaatccttataacaactccaggacgcagacagtactgtctccatttcagaaaccagcagactgaggcaccagtcggggaactgcctcccccagggacacacaaatgggaagtggcaaagctgactctgacccaggcttatctgaccccaaacctcgttcgactggtggtcttgatgtatgatttgtttttattttttattattaattaatttatgttttagagacagggtctcactctgttgcccaggctgaagtggcacaatcaaagctcaacaaagcttcgaatttcctgggctcaagcaatcctcccacctcggcctcccagagtgctgggattacaggcataagcagcctcaccaggcctggctaattttttttttttatgttttgtagagatgggggtctctctatgctggtctcgaactcctggtctcaagcaatcctcctgcctcagcctcctaggtactgggattacaggcaagagccaccggcccagcttgatctgttattttcatctcagcaggtctgctggtcctatctaaccctagaagaaatttgaagtttagtggacgtggcctcttcaattctctctccgctgtctttttactcctcctggtttcacaactcaccggctgtgcaaactttaacctctctgtatctcagtttccttccctgtaaaagggggaaaacgagactctacctctatgagttgtattaaatggattaatagcagcaaagttcatagcagcatggcacaaggttgggcacaaggctaggcacagagaaagccctcagttcattgccagtttattgcttcaactccctggccctcgaaatgctggcagtttgcaacccccacccccactccatgaactccactccctggagtcctttgctaagagcaatggaaaaagaaaccagagaggtaagggctctccgggggtaggagggcttgggggacccactagctttatgcaaagaagagtcaaagcccctagtagctgggaggtctggtggccccttaaatagagctgggctctcggctgctggcttggtgaaagaaatccaacccgctgcagtgagggggccggagtaagtctcctcgcttcccgggtccaggaatttgggggtctctcctctccccagtatcgcagcccgagagatctgcagccaaaccaagcctggaaaaggagagtggggcgcgatggggggcactcaccccctgccccgcgcagggctcagcaggcgcggccatcggcgccttctgtcgtcgtgggtcccagcgtctgtctgtcgctaagtctctgggcagactgctcggccgcgatcctgccggagaagaggcggggctgggctggtcgggctgggctggtccggctgggattcgagctccgggatcgggaggccccgggcaaggtccagctgcgcggcgggagtgaggccacgggaggtgaaaacaggcgaggtgggggatgggggaagagaggcgctcggggagctgggacgggcaccgggttggggggtcccggaacccctgaaagttcagtgacacctccatagttccctcttccccctgcaacaagaatcactccagacttcctaaacactttggacccagcaatttccaggagttcatcctgatgagagaactgaaaggtgtgcacacgttagtaacaaggaggcctggtgaccgcctaagcgtccaatcgcggggaccaccgggtcgaggccgagaggatggagaccgcgtcacaggcacctcgctgctggaatggagggtggtggggagaacttagaagattatgcaatgggctggcagggctatacccagccgccctggtaagcagaaactcaagaaacctctagggtcctgttttctggtcgtatgatcccaggagtgcacatgggcccctcgggtgtctgaacagaagggcataggagggagggccgcagccctgcagtcttactctgctggtgtagcggtcacctgccaactcccaccccaccctgcaccgcgggctcctgagtcggcagattaagcattttataaattctattttaaatacgtgttttaaacttgtcagatatttgtcttcatttcagtccctgcgcctctacctcttgctgtggtcgcttatttaacactggggggctacgttctgctaagtcccagggagagactgttcctaatatccgagggagatattattcctaatatcacgctgggtgaacaccacgtgtgtacagcctctgatacgattggtaatatccaagggagatattatcctaacatcccagtgggtgaacaccatgtgtgtaaacgctgtggtattattagaaatatccaagggagatattactcctaatatcacagtgggtgtacatcctgtgatattattcgtaatatctgaaggagattttactcctaatatcacagtgggagtacacactgtgatattatttgtaatatccgagggagattttactcctaatatcacagtaggtgtacaacctgtgatattattcataatatgctagagatatattactccaaatctcatggtgggtgtacactctgtcatagaattcgtgatatcctagggagttattaccgctaatatcacagtgagagtacaccctgtgatattattcatactatcctagaaagatattacttttaatatcacagagggtgtacaccctgtgatattattcataatattctatgaagatataactcctgatataaccgtaggtgtataccctgtgatattatttgttatatcctagggagatactacacctaataccacagtgggtgtacaccctgtgatatgatttgtaatatcctagggagatataactcctaatatcacagagggagtacaccctgtaatattattcataatatcctagaaagataatactttcaatatcacagtgggtgtacactctgtgataatattcgtaatttcctagggagatactactcctaatatcaccttgagtgtacactgcgtgatattattcgtaatatcgtagggagctattgcttttaatttcacagtgggtgtataccctatgatattattcataatatcttaagaaggtagtactcctaaaatcacagtgcctgtacacactgtgatattattcataatattctagggagatgttactcctaatctcatagtgggtgtacaccttgtgatactatttgtaatgttctagaaagatattccttttaatatcacagtgggtgtacaccctgtgatatgattcgaaatattctagggcgatattactcctaatatcccagtgaatttacaccatgcgtgtacacgctgtgacctcccagaaagatatgactcctaatatcacagtgggggtacaccctgtgctattatttgtaataccctatggatatcataatatcacaatgaacgtacaccattgtgtacatgctgtgatattatttgtaatatttttgggtgatattacccctaatgtcacagtgcgtgtacatcttttgatattatttgtaatattctgtggagatattgcccctaatatcacagtgggtgtatactctttgatactattcgtaacatcctggaagatattatccatattgtcacggtgggtgtacaccctgtgatattattcgttatattctggggatatactattacccctaatatactgtgggtgtaccccctgtgatattattcactatatcttggagatataatattacccctaatatcacagtgggtgtatactttgtgatattattcattatatcctgaagagatattatttcctttaatatcacagtgcatgtacaccttgtgatattatttgttatatcctggggagatactactatattactcctagtatcacagtggctgtacgccttgtgatactattcattatatcctggggagatattattactcctaatatcacagtaagtgtataccctgtgatattattcataatatcctgggagatattacccatattgtcacagtgggtgtacatcctgtaatattatttgtaatatcctggggagatattattactcctaatagcacagtgggtgtacaccctgtgatattattggttatatcctggggaggtattattattcctaatatcacagtgggtgaacattctgtaatattattcattatattttggggagatattaattcctctaatatcacagtgggtgtacaccctgtgatattattcattatatcctgggaagatattaatccctctaatatcacagtgggtgtacaccctgtaatattattcattatatcctgggaagatattatttcctctaatatcacagtgggtgtacaccctgtgatattatttgttgtatcctggggagatattattatgtctcatatcacaatgggtgaacaccctgtgatagtattcgttatatttggggaagatgttattacccctaatatcacagtggtgtacactctgtgatattattcattatgtagtggggagatagtattacccataatatcacagtggatgtacaccctgtcatattatttgttatatccttgagaaatattattattcctcttatcacagtgggtgtacaccctgtgatattattcgttacatcctagggagatattgttacccataatatcacagtggatgtacaccctgtcatattattcgttatatccttgagagatgttactacccctaatatcacagtgggtgtataccctgtgatattattcatcaaattttctggagatattattacccataatatcacagtg

SEQ ID NO: 93 - DNA, 6214 bp, Homo Sapiens
accaaatgagacctcttataatactctatttgtttctggaaaatagatgacctctaactactggcttatttataccccgaatttttccacaaaagatttggaacagctaccctgatataaaacgaagcacatgaattgtatccacctggctttgaattatggctctgccatttactatttatcatctttgtaccttttaaattctgagatttggtttcctaatctataacaatggggaccataatcctaccctgctgggtcacaggaaggataaaatgaaatagtaatgtagcacagtacctggcatacagttggtgctaaataaatatgttttgtccttccttatccaaatgcattccagatagaaaaaggataaggtggaattctaaacgatattgttttcctatcacactgatacatgccaagcagaaatgtggactgatcttgagttgcaattgttaatgtttgtatgtaaaagtcaggctcaaagcaaatttaatttctttccacaagttcagtactttgcgaacattttattaaccttttagctatattatttaatgcaaaaaattttctggggaaaaatatgacgagctcttgcatactgtttttcacactacccatctaaaggattattaaacatcataaatttggctttttaataaaatatttatagtattagtctggttaacaattttaaataaagttcttgtgattctgccagtcttaaaaacatgatttcctttctttctttccttttctttcaacatatatcaatgtcttttccattgaagagcagcatttagttcaggttttacaagtatgatccaagtcgcaaaatactaagcaccaatcataagcactattacaactctgcgtgcgttaaggagaacaagcaaaattgttatacagcagcggaggtgactgggggaaaaagtgaaaagcgatttgaactgatcccccgccctctccattataccggagaatgcaagtgtcccgcatctcaagattaaactgagcctcggttttactgacgtaaccagtaaccctatctacttctcacactgcggaggccggcagggcagcggctgccgccaagcacaccactcatcagagcctgccccgttccacccccgcgtttcagtcatgctttccagaaatggggtcactcactcagtaactattacacacacgcagcctatcatcctgtaatcccctaaagtccgctgcggggagagaaggcagcaaaaagtcaagaaggaagaatcacagacgcgccaccatcaggaattgattttccactccggagaggagcggtgataccttggaacgggtcttgtctggattattttcgcagaccccgagttgttctgggataggggcggttcaggaaagctcggtgtagtgatgcgcccggggaaattctgttttgccctgtttgggtatattgtttgggttttgggcactaggatgggtgactcagggacggtcaccagatcccgggcgaggaaaaccagaaagccttttacggcggccgctgatctccttgaatatcaccctctcacctccatggacaggaaactcaagttaaactcacagggacgggggtctagctctgcgacctcagaaacggagggggtaggggaccttaggcttccgctttcttctttgcagcagcagaaaccgctgcggcagacgagggggaggcaaaaccctgcaccccctacccgaaacccccacaggtcgccgccgcccgtgccccgcgcgccggtctccccgcagcagcccctccctcggctggactcgagagtccctgctccccggtgaacccgatccctacccctccctcatctcccaaagtcgccaaggtccgggaaagcccccgacccggctgggccaaacttcccaactccccgccggcccccgctccgcctcccgcttcccccacgcaaagttgattaaaattggcttcttgcaaagccccagcgcccactccaaaccccacgcgccaccacactggcagccccccgagcgagggaaggaggtgagggtgaggatggaaggaacagacagaccggccaatagacccaccccaacaacccaaaccaaaaccctgagcccgggggaaagacgcgagcgggatcagaacgggccgagtggccagctccggggagcgaagcgagccggcgggggcgcgaggaggagatgcgccggccccggccgccctgctgcactcacctcagcgctgtcggacgggctctccacagccatcttctgccacgggtccgccagctgcgccagcggcatcttcccccccggcccgccgccttcaccgcctcctccctccccgcccgccccacggccggccccgctccgtcgccgcccgagccccacggcagcggcggcggcggcggcggcggcggcagcggcagcggcagcggcagcagcagcagcagcggcggcggccccagagagggctcgacgccgacgccgaccgcccgaaagccgcgcgcctggccagagacgcccgcgcgctgagcgagagcctcgcgcctccgctgggcaccgggtctcgcccctttcttcctctcctccttccgccgccgggactacggctccgccccccccgccggttcccgcgcccgctcccagcagaacagcgaccgccgcgcgctcccccacttccgctcacaacatggcgcctaagcgatacctgtctctcaaagcgaggctcggccgccgccaccaccgccgcgcgcacccaggggctgggctagtggaagacacgcccccggccgctgcgctccgctcctccctcttcccacccccctccttctgcgccccaacctcagcttctgggcctcgcctactttcaggaagggcgagcccaacagatctgggggcgtcggcgggaggcgggggaaagaaatgggaaaggcaggaggggcgaaggctgggagcctttcaccgccaagggtccaaggaggtcggaggctccttgggaatgagggagaacagtggtccccgcccagctggggagggaggtgggcaaagtaccgggggcgcagtcccgagccaaggacccggggaggggtgcggagtgtcttttcggcttgtctcctccgggggtgcgtgcgtgcggacgcgcctagtctctgggcgcatcccgtaatggcccaagaccctccctcttcagggtcacatgctgggaaatcacctgccccccatctcccccgacggaggcaagggaggcttcgtgcctaggagcctcctgggggctcggctcccggtttgattcaagtcttttcaagttgacgctcttttgttaaattgtggctatttgggattaattcctcttgtattagtcgcttcccccgcaccgcccccagcccaaattctcctccccaagtgcgcagagctctcggccttcagctgcgaccctggaaccgctgccccccgccccacgtctgctacctaaatcttcaagaggggaaaacagggaggttccttaaggctgtccctctcggtagaggttggagaattatttaaaaatatcttgtaggcaggagcgcggggttcctgctcctctgttgactttaaataagagattagatttaaaaatcaggctggccgtgggcggaggaggaggaggagggggacagagggaggggaggggttctgactcctcctcctgcccaagatggggaagccctggattaaggaaacccaatgccccgacggcgacggagccccacaggacggcgagagctttggggggaaggcctgggcgtccggggtgcgtcccaagaggactcgaccctgtgttcactgcgccaggagccgctgcgcgctaagtgcgcccgggcagaaatgtgtaaaagtcgcagggctgagtggaaagctactgcagcccctggctagtcgcccagcgaggggaagagaaaaagcaaagggagatctccgagccggcctgtcccttcaaaccctcaggccgtggcccaggcatcccggtcttcccacgcccagcgaccacggcgcgtccgctgctgcgctcccagcgcacgcctattaacagcttcctttcatcctcccgggacccagacacctggagaaccctcgcctgcctccctaagcaggtgtgaggatgagattagagccccaaacccagccggccaggtctgcgcgggcggtgcgaggtttctcgctgggcctgcgagaggcaggtgttgggctctttctgctgccttcgccagcgcgccccttggcacaggctcgaggccggggaacctcgtggccatttagggaggctccaactgtttagggagcctgagaaggcggcaggaagtcctcgttgcgcgccttctcccgaagctttggactcagggggaccgctcaggttggacaacatctgggcagactcaacgtggtctggggaagaaggcgaatggggccacttggctcttgcctttgtcacttcccttcacatgctatattcaggtgttgcaaatccaacctgggcccaaactcagctaatttggcagcaccttctctgtgtaattcccgacggtaaaacgtgcttgcagaagtttggaggataaggagttgtgtactattttgcatttatgtacaaaatgctttattcatttacattgcagagtcacatgaccactccttatagcgaaaagaagttcgttaattcggttggcttaaagtaaattagctccccctaccctttgatcaattatttcagttaacattcttgcattagtaaaaacatacatagttgaagagagaccgttatgtggctaacactgttcagtgctaattacccccacgcaaagaatgaatattttaaaataaagcaaattgtatgccattttcagtatcaacttttattcatctctgttaaccttgagaaccagaggaataacttttaaaacagagttacctgatctgtaaaagtaatgtgagcggtggtcacgtttcagtgaattaagcattacatgaactgttaataatgggttaaagtggccgggtgcggtggctcacccctgtaatcccagcactttgggaggcccaggtgggcggattacctgagctcaggagttccagactagcctggccgacatggtgaaacccggtctctactaaaaatacaaaattagccgggagtgcacacccgtaatgccagctactcggaagactgaggcaggagaatcgcttgaacccgggagacggaggttgcagtgagccgagatcgtgccattgcactccagcctgggcgacaagatcaaaattctgtctcaaaaacaaacaaacaaacaaacaaacaaaccagttaaagtaccactaccacagatgtcttgcacagaggatcaatttgataagtatttatgaattgattgaatttatttagaagaacattattcttccttttgccccaaaagcaaagaaaatgattttttgttgttaacaataaactttttctcttttatttcttctattaaatccaagagcagtgcaaccactctctttggttaggagaatttggaaaaatcaaatgaggctggaggatttttcttgaaggtggtagcaaaaagagttacttgaacatagaagctgatattgccctaagcaggattacttttcccctctgtttaacaaaggaaaactctaagtgtagctgttcaaagaatagctgcctcagatcgccagacctgcatgggttaatacggtggttagtagccacacatggctactgagcacttcaaatgaggttggctggtcaaagttgagatgtgctgtaaatgtgaagttctttctagatttcagacttagtaaaaaaaaaaaaaaaagaatataaagtatctcattaataattttttatattcacaacatgttgaaatgatatttttgatatattgggttaaataaaatatttcattaaaattaatttcaccttttaaaaactttttaatgtggctactataaatgtatacttacatatgtggctttcgagacttttatgtattcctacaagtcatataatgttaagtgatatcttcagattccaatgtctttttggcttccttagtgcagaatcagcagaaagggctgattcagttacctactgatccccaccctccccaacaaatctcccagtcagaaccaaaatattggaaagttcttacttgaaactacagtagagcgaaac

SEQ ID NO: 94 - DNA, 6127 bp, Homo Sapiens
ttggggccgggcttggtggctcgcgccagtaatcccagcactttgggaggtcaaggcagacagatcacttgaggtcaggggttcaagaccagcctggccaacatagtgaaaccctgtctctactaataatacaataatcagccaggcgtggtggtgagcgcctgtaatcccagctactcaggaggttgaggcaagagaattgcttgaacctgggaggcagagattgcagtgagccgagaacgcgccattacactctagcctaggtaacaaagcaagactccatctcaaaaacaacaacaaccaaaaaaacccatccagattttagggtgactagggaacctctagtgtgtgcccctgtgtatctctgtatggtccaggcagagtttgggtggggctctctcactccaattgcatcttcatgtgttgtgtgtctgtgtctactatatacgtctatatgggacctcactttgggtctatatctgtgtcattctttttttctttttctttttttgagacggagtctcactctgtcacccaggctggagtgcagtggagcgatctcggttcactgcaagctccgcctcccgggttcacaccattctcctgcctcagcctcccaagtagctgggactacaggcgcccgccaccaggtgtggctaattttttgtatttttagtagagacgaggtttcaccgtgttagccaggatggtctcgatctcctgacctcatgatccgcccacctcggcctcccaaagtgctggattacaggcgtgaaccaccgcgcccggcctttttttttttttttttttttttttttttgagacagagtctcggccgggcacggtggctcacgcctgtaatcccagcactttggaaggccgaggtgggcggatcaggaggtcaggagatcgagaccatcctggctaacacagtgaaaccccgtctctaccaaaaatacaaaaaattagccgggcgtagtggcgggcgcctgtagtcccagctactggggaggctgaggcaggagaatggcgtgaacccgggaggcggagcttgcagtgagcggagatggctccactgcactccagcctgggtgacagagcgagactccgtctcaaaaaataataataataataaatataaaaataaagaaaaagaaggctgggcgcggtggctcacgcaggtaatcccagcactttgggaggccgaggtgggcggatcaggagttcaggagatcgagaccatcctggctaacacggtgaaaccccgtctctactaaaactacaaaaaaattagccgggcatggtggcgggcgcctgtggtcccagctactcgggaggctgaggcaggagaatggcgtgaacccgggaggcagagcttgcagtgagccaagatcatgccactgcactccagcctgggcgacagagcaagactccgtctaaaaaaataaaatataaaaaaaataaataacgaaaaagaaaaagagacagagtctcgctctgtcgcccagtctggaatgcagtggcgccatctcagctcactgcaagctccgcctcccgggttcacgccattctcctgcctcagcctccccagtagctgggaccacaggcgcccgccactacgcctggctaattttttgtatttttagtagagacggggtttcagtgtgttagccaggatggtctcgatctccagacctcctgatccgcccgccttggcctcccaaagtgctgggattacaggcgtaagccatcgcgcccggccgtccacttgacgttttgagtgtccctgtacgtggtcttgtctctgtgactgtatcccatttcgtgccccctatttgtggtaacaggggtcatgcgatggcatgactatcttatgtgtctgtatgtatctctgtgccaccacaatcaccatggaagaagtgtggctgtgtgacaaaacaagccctggtgtgcaaaactgtgtccctccctgttcctgttttttttttttcttttgagacggggtctcctgtgtcgcccaggctggagtgcagtggcacaatcgctgctcagtgcagccttgaattcctggcctcaagtgatcctctcgcctcaacccccacatacctgggactatagacacgactataggcatgcaccaccatgcccagctcattaagaaaaaatatttttgtagagacaggggtcttgctatgttgcccaggctggtcttgaactactggcctcaagcgatcctctggccttggcctctcaaaattctgagattacaggcctgagccactgcgcccgtcctattttgctggatggggttgctttatcaggatgtatctgccacctacctatgtatgaatatggctctgtttgcgtccctatcacaaacgctatgtgactgacgtgcctgtgtgattgtctgcgtctccatccacgtgtgtccgtgttcgctgcgaggctggctggactagaatgggttggtgccaagatgtggcaggtgtatcctgcgtccgtgtgacactgtgggtcggggagtttgtttgtgactttgtgtgtagggggcgggaagtgggagtcaaagtcacagaggacagcaggctgcgcggacgcagtgatgtgcgcagagggcctcccgccccgccgttcccctccgggaggcgccctccccgcgttgcgggggcgcgtgcgtcgtgcgtgacgtgagacacgacgggggtcgctgcgtgcgtggaacccgacgcggtcgtgcgtgcaagcgcggggggtggaagggcgggagctctgcactggctgcgtgcgcgcgtgcgtgggcggtggcgggggctgggcgagcggaggcgcgcagggcaggaccagccccgccccggccgggaccttggggcgccggtgaaacccgggagggggcctccgttaaccccttcctgcccgatccgaaacttgtggcccctcgaccgagcgcccgggggcttccccagcgcctgacgggagggcagtccctgttgggggagggacctttcccatggagctgagaccccccccccagttgccatgggaaccagagcttcccgcgtagccaggcgcgtgtttcctttccccgcccagccatcctgcttttcctccagctgcctagtctactgacaatgcgcttcccgctcgtgatcccgggagaagggggctggggtcagcgtcgcccgggcgtgcgtgactcaggccagcccgggggtcccctggccgcagctggcctcgctcccgcttctccgcccccgtgactcacccctcccggctttccccgcgtgtgactcaggcccctggggagggggctgcggagtctgggacccctacagacagtggggccgagaaccaagttctggggacttcgctctccgcggggaaggcctcccccaccagcgagcatccgagggccagcgactccccttagcaagccagaggcgccccccccaactccgcctctgaattggtagaccccccacccccacccctgcaaacctccgggaacccagcccccaacccctcctcccagcccacaggaagttttggcagagcccgtcgcggcgatgaaacggttaaagccgttttcttattcatttcatccaggggcccattttgactcagagcaagccggcgcccccctcgagcctggcctcctgggggcctgggtgcatactccaccccacatgtaccatttttagagaggggaggatggcgcttggtgagctggctgggggtcttgggtagcatatagagctgggttcaaatcctgtctctgccctcattgctgcctggacctcagtttccccatctgaaaatgagggatcattatgtccagcttgttgggttgttgtggggattaggtgaataatagatgggaaactctgcatccagggttgagcacgggagccagaagagggctcctcctgtttctcaggcctgggtgtcagggtgcccagcagaagcgagtccttgccgggcaggccatgccccacccagacactctaaggccatggggttcatcttgtccaccccctgcccgaggcaggcacccaggaagtgagaggcggggcaggaatgaggcacaacctgttgggcccgtcacctccccgccccccaccctcattccagtgccctgagagggcccccccacgctgcagccccacccccgccgccctggacgcctgggtcctgacccgcgggtggcccgagggaggggacgtcggatggagactgtgtctcgggaacatcctgtggactgctggctggacagacggaggagggtcagcccctcccggggcagggcagacattgactgggggcagagtaaacatggcccagggtgaccagacagggggcgggcggggggctgtaggaatgtacacacagtcaccccgagagagccagtccagacacacaaacccctgtcaccttggccacagagagactgccagccagggacacacagacagggtcagacatacagctgggtaagatgatccagcaatgactgtcacacatggacacagtgacagaccagaccctcaagcaagagacacacaccgtcaaacacatgaacgcatccactggtcaaaaatacgcaggcaggccgtgtgcggcggggataaatcaacccagcacataagcatgatagacacaaacacacagagactgacattcaggtgagaggcacacagcaaggcagacacaatggcgtgtgacacacatggagacaaacacaataggctagaaacataggggcaagacagacacagagtgaactatatgtgagacaagcaggcaacatgtgcatgctgataggagagacagtcactttcagcaccagcaccccgagagccacacgagagatatgcagacacaggcatgcactatcagatcctgacacgcaagagaaggcaacacacacacaccccagatctccaactcagaagatagagacaagacaagagagacaaacctagggacagagatgatgtgttcacagtatggcagagagtccctggcaccctggcccaccactgttgcacacacatcagagatgctcccagggacaccaagccgaagccttagaggtacacaccatctcaccaggaacacacacatgtgggacctggcaacagattgggtagatctgggcagactgacacattcacagacatggtctggccagacagtcacacccagtgcagagaggcacagacaggccacagtgggacattcataaacacatcggcacagaaagaccatgacaaaacctgtttgcacacacacacatgcacacatacaaacggagatcagtaacaggcaacatacagatcagccacagaacacacacatggaaacaagccacagacctcacacacagagaccacacacacacaccaaacacaaaccagccacagacctctttttcacacacacacacacacaccagatcgtatacacacatacatacagaccagccacagacctctttttcacacacacacaaatgcacattacagatcgtatacacacagaccagccacagacctcttttacacacacacaaacagatcatatacacacatacagaccagccacagaccacacacacaaacacacatacacaccgacacaagttagccataggaactttgaaacaacctacacgtacatacatctagaccatgtgcaacccatcctatagagctcacacacacacagagtggaacagaactctacacagataagccctacatagacctttgcatccagggctgggcacagaagcgggcagagggctactcctgtctctcaggcctgggtgtcagggttggaccagcacacactctcacatgcaccctataggccagtcacacgcttgccccctggaccttgccaaggttctgtgggggcactggacaccccagtctgtctctgccccacagagatcctggcacttcctctctccaaacatcacccccacttccctccctctttgcttttgccacttcccctaggaggcctagctcagcagcctctgctcctgctggggtgggggcctgctataaagaggtcacccagggtcttggtgatgcccaggtcccccaaggcttcaccagca

SEQ ID NO: 95 - DNA, 6108 bp, Homo Sapiens
tcccaactctaagggaaaaaaaattagaaacagtaaacacactagtaaagagacacccattctcttcaactaagctcaaatccagtgtatacaatagaaaggttggttttttttttaaagactttctagaaacaatttcagtttgtcccaagtattaaaaactccacaattttaaagtggacatcatttcttctactaaattttactaaataaaaacttaccaaacacttattctaccaatgatatattccatctctgcctttttataattaactaatgggttagctggtgttattttaaagctccatgaagttatccagttaaaacaatgttataacttaacttcaaacacaaattccctgggtactgaaaatgttctaaaactagatagtggtaatggttgcacaatgcagtgaatacattgaaaaaaaacacactgaatttatactttaaaagagtgaatttcatgtcatataaatcctatggcaacaaagctgttagtaaaaaacaataacaaaaacaaattctccaccctgtattactaagtcttacctagtttttacctgaaactctattctaaaccactgcttgcctggctaagtctaatcaatatgctgtatcaactcaggtcacttaaaaacaaaaaacacatacatacttctccaaaatgtttcccccctctaagaagggtcacagcctcccagagacaagctgagaaaacacctttcatactagcctccaacggaaattaaagacgtgtagccgtgtcgccttctggattccataaatccctggctatcgctgtgacttaaaactactacttctgcagcacaaaattctaaccattataatgcaatttttaaagtgtcagataaaaagagaacacttactaatcctctgaataaaaaggactaaatctcctatgcaaagacaggtttccagtccaaagaaagcttgatttcttgcctttcagaattctggttcaagtaccctaagttgatatagctgttacttatctttaaaaaaaaaaaaaaagtcaccttgtccaatgacaaactacaccataaagaacagcggctcaccaagccagagtgcagcaatcacgtcattgagacctcattaaggctaaactataaacagacctggcatctgccagtgtccccagtgttgagctgtagctgtagatcagagtaaccttcttacgggaatcacgaaattctaaccttccccttcaagggttccctagcttagctgattatctggaagaggaaaagattagtactacctttttaaaaggtgggggttggggcggtgagcagtttgaaacagaggaggtcactggaactcatccacaatatgaaatgccacatcaagaagaacacgaacataatcttaattatctaagcacccatgataaccaaagattctttcaaccacttttatttcaaaggatgaagtagaatcagtggagcacaggagcagagagaggcagggacaaaacgacttccctgttatgacacaaataatgactgttttgtgcctacagtgactgctgtggtagacactgctaaactatcctaagggactaagttattctatgtatgaagggtgtggggaacagtgttccattatctctaacacactcatctctactttcctggaaaaagaggcacaatcaggagagcaggcaggcccaaagtaggcacaaagttactgtctgtggccttgaacataaggacaccatcgtctgtgtatctggaacataaaagagggcaccccacgtggaggccggcgaagagctgggaatcctgacaggtttggaaagaaacaaagccccagtctgaagcaagcaagcaagcaaggatggatccccaggccagccattttactgatactatttatatttccctatcttctcgtgtcctcctttaaagttgttggaatatcttttttaaatgctcacttgcctcagctatcaagagaggaagaaagagaagggatttttgtttgtaaaaaacaaacctgttgtccagacatgtacaagggtagaagcagaataatcaacgtgggagaaccccaaagaagtgcccaatagggttgaggccacttagtcagctgcccttttttaccaagattctctttccactgataaaagtgtagacactctccctgcacaatgatactgattcaactgcatggcaggaggagagttgcacgggattaccagactggtgtgtgcaagctgcagtcatcccaacactcatgagtaggtttccatcacctccaggccctcaagctgcacgaggaagacaccacgctaaagggatacgtatttaccacacccactgtaatccacttgttgcgtctccaagcagcctcacctttcatacacgctgcggaccacagtaaaacctagccatctcctcctccaagacctcctgaaactttccccgtcgttcctgtgcccacctgcctccagcctctccgtctgtgcagaaaccaaatggcccctgtgtgataaacacaaagccacccgcggctctgtgtggcagaagcgaaaagagcactggatgaccgtggagagatctgggctgcgttcccggcacagccacggctttgctgcgcgtgcttatgtcacgtacctccatttacccgcttgcaaaaacgaaggggatgacttacttcgaaggtcgctggcggctccgctgcgggttgagcagggtgccccgagccacccgctgcacagcctcccaggtgggcgtttctctcagacccgcttcgcctgggatgcccgggccctagggcgttcccacagcccgctccggcctgcccaggcgagcgcgacccacacccacggcccgcgggcgcagcgccccctggcggccgcggccagggacgtagcccgcgtccctgcccgctcatcccgatcctacctgcctgtcttccagcacacgaccccgtcaccagaccccgggctcacaggcctaggaggcggcggcaggagaccagggggaggccatacgccgttccccaagtctccagtgtcccccgaactgctcgcagccctggccacatcccgccacgccccgaggaaatgcaaaggggtgatccccgtgacaaccgagctggagggcaggggtgcggcagcagccatcacctacctgcgcccctgctccaggacaaccgcgccagccgctcaaccacgctcccgagcatgagccctgcagcaaaacaagcctttatagcggcatcggccgccacaccgcgcaagcgcgctgcacaaagcattcccaaggctgaagggaactgtagtcctccttccgagtgcccagggctgcggacgcggcgaaggactacatttcccagaagcgccggtgacatcccgggggcggtgcgggctgcccctcttcccaccgagctcccggctctgttccatccttccccgtgcctctgcgagactgtctggaatcttctcaggggtcgtgttccctgggggaggcagccgggaggcttaaccgtggccctgtgttcgcacacagtgctgttcgtaggcagagcagtcccaccctgcgtggccgtgtagctgccagaaaagatcgtgaaggtcatcgtagcccgcgtctaacccgttgagagtcgtcaggccggccagccccagttcttatctgttgtggcagatacgattgcttgctcatggttcgaccctgcagtctgcgcagataccgcctttctcactttaacaccaactgcccatcaatgtctcgctgcctggtctctagataataaaatgccaggatcacagtcttagaagtggcaagagccttagaaatgttatgctaactcatcttcttctttttataaatgaaactgaagctcccagaaagattgatccctttatttctctgtttcatcggtaccttcagcatcattaaataaaagccactgttgagttcttccctaccttgtatccgatgctttacataccattcttgtttcctttaatctccattacagccctatgagtaggtattatgagtttttttttttttttaaggagtctggctctgttgcccaggctggagtgcaatggcgcgatctcggctcactgcagcgtccgccttccgggttcaagcagttctccttgcctcagcctcccgagtagctgggattacaggcgtccgccaccacgcccggctaattttcgtattttttaagtagagacagggtttcgccatattggccaggctggtctcgaactcccgacctcaggtaatccgcccgcctcggcttcccaaagtgctgggattacaggcgcgagccacctcaccccgccgtatttttttttaattcaaagattaaaaaagaagaagaagaagaggaagaggaagaaggagaaggtaaagtgacttgtccatctttataacagctagctagttagctagtgtgaagacactactgtatcgtaaagcagcatattcttgcgcacggattgatagaccaatgcaatagaataaagagcccccaaacagactggtgcatccatgtaacttgatctgtgacagaaaaccttacgaatccgtggggaaagcaagaagagtcagtaaatagtactggaacaattggttatacatatgaaaaaacaatcagggattaccgcttcataccacacagaaaaaacccatttcaggtagatcaaacgcttaaatgtgaaagggaaaacttaaaaacttttagaagaagataggaaatatctttatgaacttgggagtaggaaagaactttttaaacaagaaacaaagaataaaggaagaaagattgataatttttgccatattaaaagatggcataaattgaaaagataaaccacaagttataactgacaaagtttttgaataataaatattcaaaataatttctaagttcagtaagaaacggcagataacccaataggaaaataggtaaatgacatgaacagacagctcacagaataggaaacttgagcagccactcaaatatgaaaagacacccaatctcattcataatcagggaaattgatttttttttttttttttttgagacagagtctttctctgtccctcaggttggagtgcagtggtgccacctcagctcactgcaacctccacctccagagttcaagtaattctcctgcctcagcctctggagtagctgggactacagacaccggccaccgcacccagctgatttttgtatttttcgtagagatggggtttcaccatattggccaggctggtcttgagctcctgaccttgtgatccatccacctaggccccccaaagtgctgggattacaggcgtgagccaacacgcctggcctggaaatgtaaattaaaatagtaatgagataccacctcaccaaagattctagtaccttccaacaatgcctcaaacactgtaacacccaaaactgcagatctgatatcatcatattttttaaaaagcttctaaatcccgctgaaatacttcatatatgttgattatagtttgttttttattaaaaaagaatagatgaacaccagacagccttggtggcaggcttcaatacactgtagtactgtcttggtctgtccaagtatagtctgagtgaaagaattatacttacaaaattaccccctcaaaatgtgtttgtgttgtgaactgtttagaggggcgatacttcccaaccctcaggcaagggggctagagaatctatgttgcagtgtagaattgtgtgtcttttcttttctttcttttcttttttttagatctcggctcactgtaacctccacctccagggttcaagtgattctgattctcctgccttagcctccagagcagctgggatcacaggcatgtcccaccacacctggctaatttttgtatttttagtaaagacggggtttcaccatattgtccaggctggtctcgaactcctgagctcaagtgatcggcccacctcagcctcccaaagtgctgggattacaggagtgagctaccgcgcccggccagaattgtgggtatttctaaataatatttatgttgtgtaatgtactaaacatattcattaaatatttggtagagatgcagtgga

SEQ ID NO: 96 - DNA, 6187 bp, Homo Sapiens
accacctcccccagcccaccccaacccccgagtggccctggccctcaaccccacactcgaccctgtgaccgacacctcctcactgacatggaaatggagacaaaccccagccttccacccctatcctgggtccagtgctggcctttcaccctccacccactggctccaagtcctaagaacccatgccaccccaacctgagcctcccccacggcccatctgacagcccccacaccagcctccaagctctgctgtctcccgcagactcatgtcccgggggccatgctgctgtaccccggaccacactcctgtctcacccaaccttgagcctttccagagctcctggcagtggaagacagacccattcccagagggtgacagccccaagtggtcagggcttgggtgggggagcccggaggaggcacctgacacagaccaggggtccaggcaagcttctgggaggaggggacaccgaggcagagcccagggctgaggaggaggaggagaaattccagcagatgctggggaagccgggctttagtggagaaaatcactcctgtgaaacgctgggggctttttggttttgggtttttttttttcttcctgccatctagagcaaaatggcaaggttgggatttgaaccaatgtctgtttccaaggcccgtgctcttaacccctctgctgcctccatgtgaaatcataagagttgtggagccggtgtctgggtgtggcctggcatgaggctggcctggcctgagcccgtgctgggcctctgaagccagccttggagcctggactctctcccatggtcagtggggaccaggaggggccgcaggccaaggggaactcggccaggtttgcatccagcgggtggagatgggtgtgcctggggactcaccctcccggtgcccagcccagcctggcggggagaagccccaaggcccacaagttggccatagacacaagtgcagcctcaatgtggtagcccactgaggggtccgtgtggtccttgcagggtgcttttgaatgctttgacttctttgcctccactgagaaagtgacagacttcacttccaaagccgtttctggcatctggtgacagaccagctggaggcgagtggcagctgcctccacgggcagggcactggctcttctgggccacaggccgcacccgacccacctcagctccacgccctgcctggctctgtggccacttgcatgtaggctttgcccccaccaaggtgtctccaaaaacccagcccctgcctggcttgccagatgtgaggcctgcctgtgactgtcccagcaggaggcagggcacttgaattcacacatggggccttgtggccagcactgtcctggggccccataggcacttgtgtttgctgcccttgaccgggcctcaggcctcccaggaccttctcgactccctgttggtttttttttttttttttttgagagacattcctgctctgtctccctggctggagtgcagtggcgccacctcggctcatgcaaccttcgcctcctgggttcaagcgattttcctgcctcagcctcccgcgtagctgggattacaggcgcccaccactatgcccatctaatttttgtatttttagtagagacgggttttcgccattttggccaggctggtctcaaactcctgacctcaggtgatcctcagcctcccgaggtgctgggattataggcgtgagccactgcttcttgcctcaacgccctgttctaacagcaaagtctggccttgtgtccaccttgacttcctggggcccctgggcaaggcccggcttcaggcagacagccacggccaggagagacagggcagcggcagaccacggattttgtgggatcagtgttttctacacgttacaggcaggcctctggctggaggatgcctggcagccccaggcagggtccgggtttcgtgggatcagtgttttccacacattagaggcaggcctccggctggaggacatctggcagccccgggcagggtccttgtcagcagggcccacgttctcagctcactgtggcctttgcacagacacctcactcactacgtggtttagcaaaagttcactgagcccctgctgtgcgccagatgctggtctaggtgctgagatggagcaggacccgaagcagacaggaaaaaacaatccctgcccagagcatgcactaggcagagccgggagcagacagatgcctgtgtgctctgtatcagctgctgttaggtgctctaggtagaatgcaggcagggcaggggccggggagggcaggggctggcattttagatgatgggaggccagcagaagcctcactgagaagctgagttttgagcaaagacctgaaggagtggagggagggagccacagggaccctgagagctgatgttccaggcagagggagccgccagcggagaggccctgggcgcaggggggcgggggtgggggagacacccgtgtgtctggaaatggaacgggggcagagggggcctgcaggacacgactcagaccacagagggtggggaccgggtgactcgggatgcactggatgctctgcctggtccccatctgcatttgcatttgccacccggctcctgggacccccttgccctctactttgggaccaggcctttctgactctccctgtcccccactccttgttgttcatgggagcagagagtgtggttttggggctaaggaacactggcgcccacatgggaggaagtgccaggccaggccctggccccagcgccctgtcatttgcagccctcggggctgattatggggtgggtcaatttctgcccttcctcccccaaacccctcagggcaggactattccaccagtgtgaggaacaggagaaaaacaaggggggcctctccagggtcccaccgagcccagggggcagcagcctggccatggcgatcactcctctggcccctgcagctgtgtccccagggaggggaggggctgcactgcccatgccattgtcactccatggcatctcttcattgcgtctctgtcttgtctctgtgtgtgtcgtgctgtcctgtccctgcgtgtcggatgcacgtcctgtgtgccccactccttgctgggcccccacccaccattgcctgggaccccagaccatcgtgcggggcagcaaaggtgccaaagatggggccctcacgctgctgctggacgagtttgagaacatgtcggtgacacgctccaactccctgcggagagacagcccgccgccgcccgcccgtgcccgccaggaaaatgggatgccagaggagccggccaccacggccagagggggcccagggaaggcaggcagccgaggccggttcgccggtcacagcgaggcgggtggcggcagtggtgacaggcgacgggcggggccagagaagaggcccaagtcttccagggagggctcagggggtccccaggagtcctcccgggacaaacgccccctctccgggcctgatgtcggcaccccccagcctgctggtctggccagtggggcgaaactggcagctggccggccctttaacacctacccgagggctgacacggaccacccatcccggggtgcccaggtaacccatcccccgccccagggcccccactgtcccctgcccgttgctcctctgtccccaccttccagccccgccccaccaccgtgcatctcatcctgaccacccatgtgtctgtcccatcgctgggtctctctcctgcttagggagcagagctgctccctggcacccatcactgacagctacctctcttctgtttcagggggagcctcatgacgtggcccctaacgggccatcagcggggggcctggccatcccccagtcctcctcctcctcctcccggcctcccacccgagcccgaggtgcccccagccctggagtgctgggaccccacgcctcagagccccagctggcccctccagcctgcacccccgccgcccctgctgttcctgggccccctggcccccgctcaccacagcgggagccacagcgagtatcccatgagcagttccgggctgccctgcagctggtggtggacccaggcgacccccgctcctacctggacaacttcatcaagattggcgagggctccacgggcatcgtgtgcatcgccaccgtgcgcagctcgggcaagctggtggccgtcaagaagatggacctgcgcaagcagcagaggcgcgagctgctcttcaacgaggtgcgggcgctgctgccctgccgccctgctggtcctcccacccctccctcccaccctccctcccctcctccctcctctccctgcactcctccgtgctgggccaggctcccctcctcccctcactcttctccctccccaggccgtctcgtccgccccagctgggtccctgcctctgtcctcacagcaccctcacccacatctctgtccctgagccccagacccagggttcctcgggccactgacccccgacccagtgtcttccaggcccctcgcacccactgaggcccgcctgggctccagggtacagtgtcctccagacctgcccctcctgggttccctgtgccccgccctggcctccactcctgggtgtccctcggcacagcccacacaaccaccaagagtatgtttctgacgttcaggcccaccccctccccgtccctccttagagaccctggcagtgccccgtagcaccctgacgataggaagcccaggtccctttgccgggtgtgtgaggcccctctcgaccccgttgcccatcacagtgccgggctgcaccatggagctcctcgcctgggttcctcatcctcccgccgacacacgcctcttctctcatccttgcccttgtccgggtctcagccctgtgattgaacgctctcttcccacctgccccccagcactagcccaggactgacctgagatgggcgtgtgcccaggggggcgcgcccccagaagggaggcgtgggcttcaagctggctctgaggcccacgtggctgtggcagtaggggagggcagtccaggtggccccagtgagcacaagcttaatgtggaactgcagggggagccaggggggtggcggtggctgggtctggcactggcagccctcccgcctccctccaccactgacccagcccctgcacaggtggtaatcatgagggactaccagcacgagaatgtggtggagatgtacaacagctacctggtgggggacgagctctgggtggtcatggagttcctggaaggaggcgccctcaccgacatcgtcacccacaccaggtatttctggggcctcagacccctcctgtgacacgaccaagtcccctccagaccactaggggtggggccacatctccaaaccagctgtgctccgggcccctgggatggggtcgtgtcttccattcctcccactccagagtggggtcgagtggtctcagattcctcccactgcaaggcagggctgcgtccccctcggcaccccggggtgctgtccagctggctgctcaccccccaccccaccccgcaggatgaacgaggagcagatcgcggccgtgtgccttgcagtgctgcaggccctgtcggtgctccacgcccagggcgtcatccaccgggacatcaagagcgactcgatcctgctgacccatgatggcagggtgaggggacgggcggcggggtacgggggcggcaggtttccggctgcggggcttccctgcctcttcccatcccctgtgagggtaggtgagctctgacccccaggtctgtgtcttgaggagctgggaacttcgtccctccctggtggagcagcccagagtcaggttccagctcagtggggactctgtgcagtgggagggcacaggctggcgggggctctgccatcagcacaggacactgggcccaggggcagggatctgggcagacagcgcagcccccgccacaggcttcttcctccactgaaaagctgctccctgcccagcacccagggcggtccatggaccccagtcctgtcttccatgctttggactgaggttccaaatctgaggctgtgacaattataacgtcgggtggacatgattttctgtgagagagggcccttgacttgaatgaaatgcttgcagaagtggatgactccatcccctcccccaaggaagattaagccacaccattagtccaggcag

SEQ ID NO: 97 - DNA, 6233 bp, Homo Sapiens
ttggcctgcagggggtgaggcaggggcatggagtttctggacggacccccaccgacttgggggctctcaccccactcacctccccagtggctggtccattgccaacaactaaccctccccacctttttttttttttttttcctgagacagggtctcagtcacccacgctggagtgcagtggtgcagtcccagctcactgcagcctccacctcccaggctcaagggatcctcccgcctcagccctccaagtagctgggattacaggtgcccaccaccacgcctggctaattttgtatttttggtagagacgggcttccgctatgttgctcgggcttgtctcaaactcctgagctcaagcgatcctcccaccatggcttcccaaagtgctgggatttcaagcgtgagtcccacgcccgggctctccactcctttctgcggcgctcaggtgaaacctgctttgccctccactcccagggcagcacggcctccggacccccaactgcccagctgtgcccaccagctcctttgctggacctgtctccatgtgtcccttaagcacccaatgctccaccctcatctgtcccaccctcatcctagggaccccctctacacccaggattggcctcgtccacaggccctcccctcccaggccaatgtccagccctggcctctgcttgttccagacaggacccctcacccagaacccaaactgcccagctgcccgcccacgagacactctggaaggtctctggacacacccctcctccaccagcactgccctggaccggccacccccagccggaggaccctgccagagcagactctccagtgccttcccacagcagcccctggagctcccgaaaggaaaagcgaccccctggtcccccacctgcagagcctgtgtcccatccgaagctgcaccccgtacccctcccgtgtcaattctgccgacaccctctgcccaggggtcccaggcctgcagagaccccctcccactctgcctgtcaaacatggagcgtcccagacccgtgcaccttgaggatgacgcggtcgacctcagagcccgcaggcgcgtacaggattttggggttgctggtcatgaggtgcacgaggaggcccaggttccgctgctccttgctcgtgaagcccagggagctcatgttgccccgccgcagcgcctcgggttcaatggtgctggggtaggggacagggggccgggccaggccgttagggggcagggccgcgagagtgggaggggcatcgggatggggcaggacttcggggcacagggcagggcgccaaatgagacctccagagccagagcctagattcagggctcacgccctgcccctggctgtcctcctcacccccattcccctgccgcccacctaccggttgttgccacacaagatgggctgcaggccggcccagagctgtacgaaggctgagcactggccctgcagcgtgtccggggtggccagtgctgcagcagagggtgcgccctcctcagcggtggcgttggggcccatgactgcccctgccccagtgccattggccgccccacccgcaccactggctgggggtccgggggtccggccagtgcaggcaccctggggcagtagcagggccagggccgacaggacatccacatcctgcagaaccttctgggcatccagcaggtcccccagaagcgcctgcagcctccgtgggggtggcgcctgtggcgaggagtccgagccgttgggggcatccaggcccagctgaggggaaacaggcacgtgggcagtgcggggtgagatggactgcaggtgggtgataggtcaggagtggagcagggagacagcagcagggagacacaagctaggggtgctgggagggagtctgcagcctgggtaacgggagcccaggacaggagctgggatggtgagcaggagtggggcaccagccatggtgccattggatacccacccacaggcagcatcccacgcacagcctgggcccaggagccctgagctctccaagcggtcccagcccctccttcaactcaggcagcaagcagcgcagcgggcagtgggcaggcagggcctcacctgctgggagaccttggccacgtccagctggttccggagctcagcagacagcccagagaagcgcctggcacgcgcagcagcctgcccactgcagacagcatcccggtagccctgcagggctcccttctgactctcaggcacagtgaggatccggcccagctcccccgagcccggcgtgcaggtgagctgctccaggagggcaggagccagcagcagctcctgggatgggcacaggggtccgtggagccacggcaaggactttgtccccaaccactagggcctcaggcctcaccctgccccacccactggctggctctggggctgcctgggtcccacgacatgcctctacccctcatgcctgccatagacccctgggaccctccccctctcccaggaggagctccaagtcaccaaaggggccctttcctcacccacggagcagaagcacccccagaggcaggcagcactccaggcccatcccacacatggatgccctcacctccatccggaacaggggattgccccctaggcggctccagggctcctgacccttgtggaggccagactgtgaatccagggcagatgagggaccaaagagcaggtggtagacctaggaggtgtgggggaatggctcagatggggtgtggggggcgtggctcagatggtgggggcgtggctccgatggacgtgtgggggcgtggcttagatggtgggggcgtggctcagagagtgggggcgtggctcagatggtgggggcgtggctccgatgtaggtgtgggggcgtggctcagatggtgggggcatggctcagagagtgggggcgtggctcagatggtgggggcaaggttcagacggtctgggcgtgactcaggctgagcatcctgaggatggctcagcaaccagggggcgtggctggggcagaagggagtggccagggctgggagctgtccctgccttacctcgggcgggtccacacgggcggccaagagtgcttgggccgtgctattgggcagcgacaagttttgcgtcaggaaacgccagagctcctgcgggtttctggccaccgagtccagagagaaggaagacactggacaggcaggaaggcgaggctgagaggccgctgcaccttggcaaggtgcccccacatgcgctcggagccgagcccaacaccacagctctgccactgcagcctgtgcgtggctgggaactcagtgcaggtggaggggcccagagtggatgtgggcttcagcccagtgacagcagagctttgcccgcagccctgccccccaacttccctgcacagggcacacctgtggatctgtccaggtggctccccgaggtgcccgggcccgcactgagggcctccagatgctggcgtagggcctcgagctctgagcccaggctgggccgcgctgggtcaaacaggttgccttcctccaccacgcggtccaggcgctcaagcagctgcgtgaccctgcaccatggcggatgtcactcactggatgggctggggaggggtgggtgctccgaggggcgggtgggcactcacgtggagttggcgtactgcaggaagccgaactcgtctcgctggccgtccgggcacagcgattgcatgacaggcaggatgccggcagacgtcaggggcgccgctgtgtagaaggctggcagacccacgggagagggcagggtcgggggtgaaaggggagagagagagagaggaatccagaaggggagggagacagaggccgagaggagaaatttagagaaagtcaggaaggagaagcagcgttagggagaaggcggcacagagccctggccccagctgggctacaggccaagcgttctggggcgaatgactccagcaggtcagaggtcaaagagccactcaccaccccttctgccataactcccagagcattcctttcctttcagccagtgcaggcccacatgccctggcactctccccccgaaaacgtttcaggtgtggcactgcctacagagcccaggggaggacaaaggaccccctctgggcagtgacctctgacctctggccagctggttagcagagtgagtgcaagagcctgaaggagtatgaagggagagtagccaggccgctccagccccagcccaggccagcccagcctcagcccagactcagcccagaagccgaggcaccccagccctagaaggcaaggccaggcagagagatgccgcctcagcttgacccaggcaccagctgtgcctttaggtggccgggcctttcactccctaccacctcccacttcactgcctgccaccccccatctggagccagctgttcctgaggccggcagggggcccgggagggctgttaatgcaagcggggagggcgctcaagccaggacggcccatgggccccccgcagctgctgcccaggccagccaggaggaggtggccgctcacttacagactgcatgccagccgaggacaagagaccatgcggggagggagggggatcaaaacagaacagaggagaccagtgagtgcccacatcaccaggaagaggcgttggcatcatcattcgcggccacaggccagccccgacctccacagcccagccaggaggcacggcccaggaccacacaggggagcaggcaccgcacctcagggactccgggagcaggacacccgtgtgcagatgtgcacacacagcgcaggcgtgcgaggtgccgcgctcccccggctgtgcctggggcctcctgccgcactcaccttccttcacggagatggtgggcttcttctgtcgcagccccagcaggataaagaacagcaccagggggatgaagatctcgaaggccaggacccactggaaagggtgggcccagtgagggataggacagacctgtgctcgcctaggccctccccagcctcccatagggctggcccagcccagacaggaccacgtgctccctggggccagggaaggtgggcacaggcccttcggaaccactgaaggtctgagccccttccagggcactgagggtaaggattgtctggctcagcaaatcaggtttcccgtccccagcccacactgggcctacgtgccctctgaggagcctcagggcctacagggacaaatcggccagcttgtggtctactctgacccatgtatatcccagctcatcttctccctccccacctccagggctacctgggcaaaatcttggggaccatctgagccactagccccgcctacacttcccacactgccccgggttcaccttcctcccacttcctccccaccaataccggggcctggggagatgaggaggcctggttgagaggcttggcctgcgcccagggccctgagcctcggagaagacctggtaaggggtctaacagccccagtccctgaagcaaaggcacctttttttttttttttttttgagacggagtctcactctgtcacccaggctggagcacagtggtgcgatctcagctcactgcaagctccgtcccccaagttcacaccattctcttgcctcagcctctcgagtagctgggactacaggcgcccgccaccatgcccagctaattttttgtatttttagtagagacggggtttcaccgtgttagccaggatggtgtcgatctcctgacctcgtgatccgcccacctgggcgtgagccaccacacctggcccaaaggcacctctttctgccctgtcccctctcctgacccggggcagccagtcttgggccttggagctcagtttccccaggtcggctcctgctaacccaggctgggcaccaaggtgagccctagtgggacctgcgtggagtgagaaagaggtgctttgctcacttcacctgaaaaccaaggactttaccggttcttgtgtcccagcccccagctcagggaggaggaggagcttgagccagctaccctccagagagccctcggcagaccagccctctctgagacccacaggacagaggggccctgccctccctagcccgagggcgagcacccagctcggaggcatcctttgtcctcatccccatcccaaaacccttcagagcccccagtgtgctgtgtggcccgggccgagtccccggtccctggggtgggggcggctgctgtgtttactgtgcttggacaata

SEQ ID NO: 98 - DNA, 6233 bp, Homo Sapiens; identical to SEQ ID NO: 97

SEQ ID NO: 99 - DNA, 6205 bp, Homo Sapiens
aaaatgaagaaaatgctgtaatcctaagggcagagcctgtggatgaactttaacatacccacagatgtgtaataccccactcagatagagattgttgttttaaaactatgattatgattgcctctagagtgatatttcttgtcttcatttcttctccattggcatatagcccattcatgaaatgggaatcatgttgggtgaaggcttatgtgtcacatctgagaagactttagctgggagggttgctcttggaatttcaaggaggttgtgtaaagccacaggagagaaagtcatacttgcttcttccccaggtgtggatccctgttcatcagtgggtatagccttttctctgctccacacctgagagatacaatacatgcctcagtggctcgtgtatcattgtgagtggcttcgtgtatcagtaaagaggggagatgtggtttgaaaaagctgttcaggctattccattgttcacttccacagtaggtgaggtgtaaggctcactgatttaccttatttccttcattctgaaacacgatccctcgttagatccctcatgtgcttaatgggatctatactggttattccccatttgctgagtgccccactagatgcgctctctacccttctttgccattctctgtgccctgggaggccaaccttagtggactacattgatcagcagccccctgccatttggccagagaaggaggtaggaggtgggagagatggtctggtatttcttgaccccaactcctccctccctttcagcaggctatctctggcagtggctccttccctctacctgctggatggcccctctttcatggtcccaagctcactaggctccaataacatgattgcctcctcttttcaaccctagggatggtcatcatttcctgctgttactaggctctaggtgcctcaagttccctcttaactctgcccatacctctataaggaatttctccattaaagcatcatcctttgaaccatctgggttaaagtctgtttcctgatggacccatgactgattcacaggtctttggacaaaaacggcaacacttgcatattcaatagtcatcgattataagatacatctggctttcagaaatgttacaatatcatcaaaaagtatggcttactataaagaaatgatggcaggttcattcaggcatgatggatatagaggacagtgtatcattaagagatgtaagttgggcacagtggctcatgcctgtaaacccagcaatttgggaggccaaggcgggctgatcacttgaggccaggagtttgagaccagcctggccaacacggtgaaactccatctctacaaaaaacacaaaaattagccgggtgcagtgacgtgtgcctgtaatcccagctacttgggaggctaaggcaggagaatcacttgaacttgggaggcagaggttgcagtgggccgagatcacgacactgcactccagcctgggagacagaggaagacactgtctccaaaaaaaaaaaaaaaaaaaaaaaaaaaaaaaaaaaaaaaaagatggagtttgctcctaaacttacaaggttggaagcatggcaaacagcaaagcgctgggtttaaagtcaggtgagatggctttgaactcaggctctgacacttacagctggaaaattttgagtaggctgctgtgacactctgcacctcggcctcctttctggcaatccagagtcactctgctgtctatatccctttcagagatgtcatgtgtaaggacaaatgaggcgatgtgtgtgaaagggcttcatgtatccggtgctgagatgtgtgggccagcacagctctgagggggcagctattctgggattcctcatctctcaggggccaaacactggccaggatggacaaacaaggagaccggcaaaagtaaggcaagagaggtctcagagacccagagaggcaatgagaagacagctcacctacccttttcttcccagctcatctacccttttcttcccaccccagcttccctcttccccttcccttccctcacttgacatggcctcttctctaagctgagggatgccgctgaggctatttgttcagtggagaattaaggcgcacctctaagtgtaggataaagtcatgcaccagataaagaccatgcctttcaagaccagtaagagagagacaaagacattccaacaggaggcaggtcatgccatgtcctggggaaaaagaagagcctggtgtcggagaatctcagctgcactcctaacagatcactaactcactaaccagttcccctggacaagttattcaatctcactgtcttcttctgcaaccagggaataatacccacctccagcgtttgctgtgagaatttcacagaacaagccctgtattcagcatggtgcctggctctgattttagcactcaataaagggtcacctctatttttagcattccagggagccagaggaccctttctaactggatgattctggaatgatttcccaaggagagggcacttggagactgaattctctgtatggcaggcacagttcgctgaggcactcgctcaaccgggggaggtcagtcccgcagcagcaccagggcacagcgctgtgtgtccggcgctggggggactgaaagggggtgagcgggctgcggaacgcaagcctcccggcgggcagagggagccagcacgagttctggagtaggagagggccgggatcaaagcgctctgaggcaggccagggcgcaccaaagggaggctagtgaattgcatcagcacagattccgtgatgctctgcagacgtctccaggctgctgggctttacgggaacccacaagaaaggaaaggaccggggagctggcagggcgagggcgggcgagggcgcgagggtgcgctcgcccgcgcgctcccggcggcgcctggccggggctgggcgcgcccgggactgcggaggccgcggaggaagctcccgctccccttcccccgcctctttccccccgcgttactggaaggactgtgtgggagagacccagaagcacccggattttcgaccgccaggtgggggagggcggggcagcctctactgctcaaaggaaaaccaaaagtgcgtctgttcgcgccgctccgacacgcggttgctactgggagggctcaggcagggcgctttggccgcgcctccctttgcagcccccaagacttggctagggcggcctgaggcccgcgtggcgcggggaggggctgagaaccgagtgggaaaatgtcacgatttcttctgtgcccctcccgtccctacccccacccccagttttctgagttttgctgctgccgctggggaaggactgattcgttttgcgtcaaaggactgcatttactcagtcctgctgggagaggcgcgtaaacacccaggcaagccaggacgcagggatggggagggggaagaaaaaagcaaagcacccacggccggcgcgcgcgtccgcctgccccacacccctctcctgggcctgcggagttggggactctgtccagcgggcagcagcggaggtgcgaggagtctggctggcctcgcctcgtcgcgcacgcgcgcgcgtccttggggatagcgttcaggacagaatgtgttttatagctgtaaacaatgaccccgagtattgtttgggattaccgtatcttggggcccttggggcggccagatgccgccagccgtcccggaaatgccagcgctttatatagagccccaggaaagcttcgcgttcccggctctatttttctctgctaccaacacccccactttgcagataaggaaactgaggacagaagttgtgtgacggtgcacagcgagttgtcagcaatggactctcaacacctcttaacattgggtcctcataaggaccctgtggggtacagatggctggcgctacttaagaattgggtaaactgaggctaacacagaccctggaccaaaacctaagttccctgacttccgctacagtacttctccattcacacacaccatcatctcagcggaaggattggagctccagagcagagaagggcctaaggtcatgtctccaaactccttcactttataggaggaaactgaggcccagagaggttaaggaattcgtccaagatctcacagctcgtaaatagcgtagccgggcgttcctgctctaaggtctgtgctctgtaccctgcgccgcgcccctcccagccccgcccagcgagggaggaggacccaaatgtccggcaacccgcgccctgaacttcgctccaaaacagctgaagacgacaacgttggggcacaccctctcgctggctttttttttttttttttaattcgtaacagtctggagtttgcttataaacgcccgattactcttattagatgcgtcctaattgcccggcgtatagggcggccggaatgtcttgactggttaatttcatcttcaaggctactcctaacgaattaactgtaggaccgaaaacatgaaaaacaaaaaacaaaaagggaaccggtaggcagaccgccacggagggaaaaataggcaggccagccccgcccggcgccgtgccccgccaacacccggccgcagggcggcgcgggcaccctgcgcgcccggggcgcccgctgcactcggcggcgccgcggagggcgcctacgaccgcgcgcagccgcgccctccctgcgagcggctctgcgcgcccggctcccggcctcccggtggcgccgcaccgaaccgcccgtctcgccgtcagggctgtgattattttctaaaatccggaggcgagacccgcgcggccgctctcggggccccgccccgagccccttcccagggcgggggagaggccgcagcgcactcgggagcgggcgagggaatccctctccctccacgtcacccgaaagcgaggaaacccgcactcgcgtcctctaacgcaaatgaccatctttggcaacgtgcgccaatggaacagaccaagggcgctgggcccggggggtgagcgggggactggggagggccggggctgcctcggcgcctccgaaccgtgcgtggcgcccgctcccgcccgtgccaccgcctggcttcctcgcgcggggtgcgcggttggcgtcagcgcggccgggagccggggctgggaggggagagctgcgcccgcctcctcccctcccgcgcctcttcctcctccgcggcctcctccccccgcctcctcgtgcgctcctccctgcaaggtggagtctggggttgacgtgagtgaatccacatggtacagggctggagaataaagagtgtgagttgaactcgtgccattgtagtgactcatctcgggcagagcgctagggctccgagcgaaccagcgagcgagcgaacgagcggcgctcggcggggacagaaagagggagagagagagagagagagagggagaggcgcggccgggcgaggcgggcccgtccgggagcgggctccggggaaggggtgcgggtctgggcgccggagcggggagcggggccgcgtccctctcagcgccagctctacttgagccccacgagccgctgtccccctggcgcgctcggggccgcgggacgggcgcacgccgccttctcctagtcaagtatccgagccgccccgaaactcgggcggcgagtcggccacgggaagtttattctccggctccttttctaaaaggaagaaacagaagtttctcccagcggacagcttttctttccgcctttttggccctgtctgaaatcgggggtccccagggctggcaggccaggctcgctgggctcctaatcttttttttaatttccaatttttgattgggccgtgggtccccgctgagctccggctgcgcgcgggggcgggagggcgcgcgcaggggagggaccgagagacgcgccgactttttagagggagggatcgggtggacaactggtcccgcggcgctcgcagagccggaaagaagtgctgtaagggacgctcgggggacgctgttcctgaggtgtcgccgcctccctgtcctcgccctccgcggtgggggagaaacccaggagcgaagcccagagcccgcggcgcggccggcggacgaacgagcgcgcagcagccggtgcgcggccgcggcgagggcgggggaagaaaaacaccctgtttcctctccggcccccaccgcggatcatgtaccaggattatcccgggaactttgacacctcg

SEQ ID NO: 100 - DNA, 6127 bp, Homo Sapiens; identical to SEQ ID NO: 94

SEQ ID NO: 101 - DNA, 6161 bp, Homo Sapiens; identical to SEQ ID NO: 83

SEQ ID NO: 102 - DNA, 6174 bp, Homo Sapiens
aaaatctaaaagggctagaaagagttcagggatggcaggggaaagctgtaggaattgatataaatatctgtagagggagcagaacaatcagcaatttcaaggaaggacaggaaataaaaggttaagtctgatagaacaaacatcaagactgaaatccaaagatgccaatgcaaaaacttgcaacaaggtttgggaatcattaatagaaacaaaacagtaagtatttgctttattgacatactaggcttagacctgtgtgtgtaacaagcaagcctaataatagcaccatggttagactagcctgcttttccaagccatcattttataatttattaagcaaacaagggatcaaatgtctctccatccacctgatgtgatctttttatatgcacacagctaatgagttccattcagctgaaaatcttttagtaaaagctttaaagatgagcccatgaattcactttaaatttcaccagttaaattaggtcaaatggaaggaactcaaatgagtattgcccaatcagagcccattatttgtaagtcatcagtaaccttaaaactccacttagacctaattattgaaaacttgcatataatgaagtgaaagaatttccattcatcaacctctcaatcccaggttttcaaagaaaaacctaaggaatacttaccaaaatcagataagaaaatttaaacctgcatagttatcagatttgttccactacaaccagtctgcatacagttacacatcaattcgttctgtatacactctagaactgaacagaacaaagtttagcatagaaaagctgtaagaaacaggttcctaattacggaagttgcaaagttcaaaagggtatgaaaaaaactaatgtaaattcgatacttccttcgtttcaaagaaatagactttctgtaaaaatatatacaatttttacaaatacatttacaagctgtcttaagaattgaggatatccatattcataactaattactgagccttccgtcaagtattattggtgataaactaggctaataaagtaagaatcatggaaaccaagccaaagtataacaggtataaaagtcctgaacacttggactttctaagaagtatactgggaaagctaattagagagaggaaaagcttcccttgtacagtactgaggcttacagtcatagttctattacttgtaacttttacacaggtcactggcattcttagtgcttctcttaacactacagtaaattaatgaattcggcgggtaatcaattctatgacttgcctggctactggccactttcctgttctcaacaaggaaattaagtctttccaccctaccatcttcactaaatctaaaagtcctcctccatagcttcccaaacaaagtttgtttgttgctgaaactgaactttgcttctttcagacagtgactcttcaatcaatggggagcactcttcccatgtatttattcttgttagccataatcctcttgccacttgcttttctggctaggttgctagggtgcaactctaggaagttacagcttggagtccaactgcataaactggttttggtggtggtggtggttggttaaaagtcaactattgcacttacagtaaggctatcttattagatatgccaaaccagctcctactccagcaacacctgcaaaagccagcagcacattcctgatgccaccttctaggtcctctacatggaagaactccacaaacccatcctagaaaacaaaaaagaaaagcacattttcaagtatgggtttctgctctcttacaacactactatccagagagaaggtaaattaaaatatctaaggtttccccctaaagcaatagtaaaccaattattattcaccccggggcaaaaaaagaaaataagttcttcagtttcttaagcggggacccatgataattaaacttcattttacagtactatcttggtcttattaggatttatcctaacaaaaggacttccagagttcccatgaggtaaaagacgaaaacccttattctcaaatctccaccacctaatatttcagtaacgcctcaattgcgcagatcagtttttctcaacgtagttaagtacatcctgcatcagatctgggtttgtttaaaacgcaggctccaccccatatcttctccattaaaacaggcaccgccttaggaattatttcagctatcctcccctggtgacttattttttcatggtttgaatccactgaagagtattcaactgaattggaacaaaaaattgcctagagaaaaccaagatttttgatacaattcaagaccgccataccactatctctaaggatccactacttaaatcaacatcaaataaacaatggtcctttagttagagcctgcaaacagccgtgcgtcataaaaacctttagatatccccacctctctaaaaaaaatccttcattctacttccactccaaggcccctttcatccttaaggcaaacttacccagcctctttgtttaactagccagtcccgttttgtccttacgagaacgtctgtgatactttctgctaatggttcgatgcagctttcttggtttatggtcttcaagtgtttagccacaaaggcaccaaaagaaatgagagtcacaatcctgccccagtttgttacgccgtcgctgaaaacatggatcatcactcgagacaacgatttcacatcgtcttcgtttttgatgtccagtttccgaagcatgcctgagaaagaaaagcatgcaggtcctcacggcctcctttgtctaaaccggcgcaagattcgcctgcccacccgcggcgggaaaatcgctactgggatttacagaactcaggttgaccccacttgaaattgacatcccaccctttccggtctttgaacaagagctgccatttccaaaagaatcaagatgggcggaaacaatgactcatggccagaatattctggcttcaggaataggatgagacacgtttcaacactgactcgtttcggtttccaacccacccttggcgggtgagtccggggagagatggaaaaaagggagtgaggccttggcgattaatgaacccccttaccttggaaggccgtctcgtggttgcgctgcacgccatccccaacccgtcgtaaggtctccagcgccttcctgctggtggccccagacctgcccattggctttgtgtccttggcgccggtggcctgctcccgaaggtaccgagagataatctccagcgactgccggtacaactcgtcctcctcctcctctgctggcggcggcgtcgagggtagtgacccgtccgtactggtgttattaccagattccccgaccaactccagcagcggcaggacagccggccgcttcccgagaggctccggctcgtacccgtccagctcctcttcgggcgacatgatggcgtcagcggccggggcttccatctcctcaagcggcgccgcgcggcgggtgggcgcgaagaaaagcagcctcgcgggggtcgcggtgacgtcggggacctcggcgccaatgggcggcggccgcgcgaccctccgggagtctggcgtgagggtggacggggggcttgcgccggcgcttccgccaatcaccgcgccggcctcccctccccctatctctcgccgggccgaggcctccttctccgtagccaaaagtcgccctcccgggcgggtggcgccgccgctgccggcccccaagccggcccccccacagtagaggttgagtccgattaccgcgtttcttttgaggccaaacattgccagtcgccgccgccgcctggctgagaaaactggggaagaccccgactccttactggaaggaagcggaagtgagaagtggcgagcagctcctttatcacggttttagggcggccagtcctacggggtggcgccagcgaactctttttttttaaaaaaagtattcccataaaaggggaaaggggcggcagcttccggagggttgcgcacggcacctaccagctgcccggccgggccggggcggggccggggccggggccggggccggggcctgagccggggcctgagcggggccttccggtcttcggaggctctgagtgccggttacgtaacggcggctccgagcgcctggggtcctcccagagctcctgggctcgagctctttccatgagcacctcgggccttctcgtggctacctctgtgcttccctgagacctgatttgtgagccctttttgctggttttcgccagaggttttttaccaaatcaaaatttcaaccattgactaacacaggggttgaaggaagaggacggggaagttcagtgatggatgggaacaacagtcttagatgatagggataattaagagggcatagttggggacttgtggttattttgcacagctctctactctcagtccaatgtttggaaatgaggatgctccacgtgctaccctaaagaaccatttatgtaagtggactaagctaaaactgccacagctaaactattcctgcctccctgcttgcttctcccatctctgttccatagtctttggtgctatttacatataggccttaatccattagaatctcgtctgagagtcttgacaccattttttgtttgttttgagacagtctagctctgttgcccaggctggagtgcagtggggcgatctcggctcactacaagctccacttcccacgttcagacgattcggtacctcagcctcccgagtagctgggattacaggcgtgcgccaccacatctggctagtttttgtatttttggtagagatggggttttcacgatgttggccaggctggtctcgaactcatggcctcaagtgacctgcctgtctcggcctcccaaagtgctgagattacagctgtgagccacctcgcccagctgattattgtatttttagtagagatgtgtttcatgcgcgtctgtgtgaagacaccaccaaacaggctttgtgtgagcaacatggctgtttatttcacctgggtgcaggcgggctgagtccgaaaagagagtcagcaaagggtgatggattatcattagttcttacaggttttgggataggtggtgaagttgagagcaatgttttgtgggcaggggtggatctcacaaagtacattctcaagggtggggagaattacaaagaaccttcttaagggtgggggagattacaaagtacattgatcagttcgggtggggcagaaacaaatcacaatggtggaatgtcatcagttaaggctatttttacttcttttgtggatcttcagttacttcaggccatctggatgtatacgtgcaagtcacaggggatgcgatggcttggcttgggctcagaggcctgacaatgtggtttcaccatgttggccaggctggtctcaaactcctggcctcaggtgatccacctgcctcagcctcttaaagtgctgggattacaggtgtgagtcactgcacccagctgacaccatttatttttgtactgataataaggcacatttgactctagaggtttgtaaagcccttgagaacaaggatcttcttatatgccatgtatgttagttaacgttaattaaagcagcctttttgttaaaagatctgtaaaaataatagctaaaattcaaaagcaaggtgctgagagacataggaaaggtgagcaagctcactttttatttatttttttgagatgaggtcttgccctgtcacccaggctggagtgcagtggcaccatcagtgctcattgctgcctcaacctcctgggctgaagtgatcctcccaccacagcctcgcgagtagcgaggaacacaggtgcatgcccctatacttggctaatttttttatttcttgtagagatggggtatcactattttgcccaggccggtcttgaactcctggactcaggtgatcctcctaccttggcctcccaaagtgttgggattacagaccgggctctgtgcctcatgccaataatcccagcactttgggaggctgaggtgggtggatcgcttgagcccaggagtttgagaccagcctgggaaacatggcgaaaccctgtctctactaaaaacacaaaaattagatgggtgtggtggtgcgcatctgtaataccagctactctggaggctgagacaggagaactgcttgaacccaagagacggaggttgcggt

SEQ ID NO: 103 - DNA, 6244 bp, Homo Sapiens
tgaacattctggggagctgggaaagaatacagattcctgggccccatcccagagactctgatgcaagaggcctgatgggaaggaggggttgaggctttgtatttttttttttttgatatggagtctcactcagtcgcctaggctggagttcagtggctcgatcttggctcactgcaacctccgcctcctgggttcaagtaattctcccgcctcagcctccctgagtagctgggattacaggcacacaccaccacgcctggctaattttttgtattttagtagagacggggtttcaccgtgttagccaggatgatcttgatcttctgaccttgtgatccacacgcctcgacctcccaaagtactgggattacaggcgtgagccatcacacccagccgaggctttgtatttttaacaagttttcctgggataggagtcactgcagtacattattaattcccttcaagctccaacaactcatgtcagcagatctcaaataaattacatgggaagggggagggagctctttgtggaataccatgaaatgcgaataaggtgaactcctcccttatacaaaccagaaggaatcttagtagcaggaaatgactacattccatatatggacatttatcatcaaagcaccaaaagacagaaaatatttttgagaaatcacattagcaagatggaaattgctgaaacccaagtgtccaatgtaataggagaagttgtctgattggttgcccagagacatacagaggtgtacaaactcacaccctgatactcattcatttttcagcaggcctcaggagtttaagatctgggtaaaaatctggaaacacagtcactaattttgttctgccctgttgccatttaacagaacatggttgcccaactcagtggtccccaggaagggagttagagaataataggaaacctccatcacattcagctctgtccccctgtccccatgacagagccagtgccaggccaattatgaaagtctgccagcctcagcacaatgctttgaaagaatgcgcatgtgatctcaagagggtcctgataatatccctgttgagtgagacatacatgagggcaatcatagtaaagaacaaggttcaagtcagacagacagacagacctgggtttgagtccataataatacgacttctccctttcccttctttccttccttccttttccctttccctttcccttccctccttctttccttccttccttccttctttttctttctttctctctctctccctccctctttctttctttttttttttttttgacggagtctggctctgtcgcccaggctggagtgcagccgcacgatctcggctcactgcaagctccgcctcctgggttcatgccattctcctgcctcagcctcccgagtagctgggactacaggcacctgccaccatgcccggctaattttttgtatttttagtagagacggggtttcaccgtgttagccaggatggtctcgatctcgtgatcccccactctcggcctcccaaagtgctgggattacaggcgtgagccaccccgcccagccgacttccctttcaagtaagattgctgtgtggattaaaagagaaaaatcagtgtgaaatttatcagcagtgtttgaagctctatacatgagaccattttttggctgtactctctttataggtaggaggagacttgtcagaggtcacacagaagcctagtggcagagccaggacaagaacccattaccttgacattagagtaatgaaaccctccatgagcccccatcgttccacaactctgaaattccaacatctgtttgctgttgggcttttatttagttggcaaacactgatttgcatttaatgccactcccttgactaggtactggggatatggaggaggataagacataaagataatcaccatgggccaggtgtggtggctcactcgtgtaatcccagcactttgtgaggccgaggcaggcggatcacccgaggtcgggagttcgagaccagcctcaccaacatggagaaaccccatctctactaaaaatacaaaattagccgggcctggtggcgcatgcctgtaatccgagctacttgggaggctgaggcaggagaatagcttgaacccaggaggtggaggttgtagtgagccgagatcgtgccattgcactccagcctgggcaacaagagcaaagctctgtcaaaaaaaaaaaaaaagaaaaaaagaaagaaagaaaagaaatcagatgaaggtgctaagtgggccctttgtttttctcattctacagcctcaaccctcccttggctttatttatgttttgctgatgacattcaaatctacatcttcacagcaatactttcctaccttcaaactagaatatccaattttttcctgcgagtctccatacaaccagaatagaatttgttgttgtctcccacaaatctgcttcttctctgatgaaccccacccaggtacccaagccttgagtacttgtttcctacatctcactctccccaaatcctatggattttgctgcctaagtatatagtactttgaattcctttatttatctccatttccagagtttgtagcctagccccggccactgtcatctcttccctgggcgtgaaacagattcagagtcaggtgtcttcagtgaccaggatatgttggcctctgtcccccttccaggacttggcacgtgctgtcttctctttggaactctcgccaccactcctgatctgggctcgcgatttcgttccggaagctgtccctgttctccgccccgggcttctacattctacagcccatcacttttccctgtaccgtaggaacagtgtttgtcttgatcacttctctacctagtaattagccgcgcttagtactgtattcattcatcacatgaatgaatgaagaatgaatgacagacgggtcagatcaccgaaagcctcaaaacgcccacaaggaaatcggtcgcactttatcgccaggacttaggccagtgcctggaaaggccccgaggcaacgacacggtcggctgcccaggctggccccacttcacgggcccgctcgcttccaccctggacaaagtttggccctaatcgctccccgttgtagctctaactggctccagtctcactggcctacatgccccgacaccggcccgatctaaaggcagaagatccggaaagtctgggatcagtgcgcgccagcccaaccccctcactagacactagttgccccgctcctacgaagggtttcagccacaaggtctcccggcctccggaattccaatctcttgccagacccctccctcacatcgttcctcccgaggaaacgtgacccatgccggccgccgtggccgccccaacctactagttcgcctttcctccgcgaacggttctcccggccctcgcgccgctacccaggctcagggggcggggcctcgatgcgacccagtgcgcttgcgctgaccgccccggctaggcttaaagagcaggcggggcagagacccatacctttggcgctgagtcgaggccaggaaggggcggtcgatgagagggcggccttagcattaggagtgcgtcggctgcaccctggcggatggaccttgggaaggaggggaggggaccatcggggtcggcggggagctacgggtatgcatagctcatagagcgtcagagctgacgacgactagtggaagatggggaaactaatgctcagagcgggacagtcactacctcaggggcacacaattgataagggtgggggtggccgtggtaatggaggccccaaggaggggcaggggcccatagtacgtcaggggctgagcctgtattagaacccaggcttgtttcccagcccagccaagtcccagaaaaatccccctgattttatctatttttttttaacctgggataccagcagggaaagcattagaggcaaaaggaaaggattttcatttttccaggaatgctgaagtcaggactgtttgaggggagccctgtgtttctcagactctcttgtaccgtttacatcaggatctggggcagtttttaaaaatatgcggattcatgattcctaccccccacctcattgcttggcagcccccaggtgccttccctgtttcttccttctgggttgtgataggcttgtctgcagtccgaagcacctgatacgaattttagttaaatggaatgtatcagtccagcttctagggaattaaccataaataagacacagccactgctttcagtctgataagataggcaataaactgcctttctgaaggaatcagggatggtttttggggtcttgaaggatggataggaaggtataggtagtgaaggaggtaggggtagaggtgagaggctgggatggggacagtgttccaaattgcaggaacaaaagcagcaaaggctggctgggtgcagtggctcagacctgtaatcccagcactttgagaggccgaggcaggtggattacttgagctcaggagttggagaccaggctgggcaacatggcgaaaccccgtctctactagaaatacaagaattagccgggtgtgttggcccgtgcctgtaatcccagctactcgggaggctgcggcgtgagaattcttgagccccggagacggaggctgctgtgagctgagatcacgctgcagcactcctgcctgggtgacagcgtgagaccctgtcctaaaaacaaaacaaacgagcagcgaaggcatataattctgagggttgctcggcttgttttacagacactgaggagtttggtgtggataatgaggaagggcctgagggttgcaacaggacttaggcgcttaggcttggagaggtagcctcagacgccagttccactgagcaacaggagctaagggctttaagcaggggaaggacatggttagttttgtgtgttaggcactggttacagcgtgacaaatggtttggaagtggggagatgggccagagaaagcagagagagttaagatgtgagatcatgaggctgtagccagtgcagcagctgtggagatggagcgaagcgaacagatcaaagaaatttaggagtgagaactcctagtgatcgtaaatcagtggcccaacccagggaccaagatccttttgactctttttttttttttttttttttgagacggagttttcgttgttgttgcccaggctggagtgcagtggcacgatctcagctcactgcaacctccacttcccaggttcaagcaattctcctgcctcagcctcccaagtagctgggattacaggcgtccaccaccacacccggctaatttttgtatttttggtagagacagggtttcaccatgttggccagattggtctgaaactcttgagctcaggtgatccacccgccccagcctcccagagtgctaggattacaggcgttagccactgcgcccggccccttttgactctttaaataaaccatgtacattatctgactacaggacaggctgagtcctccagtctcccgtgtgtggtcacgggatggggggagatggtggcagataggtgtctggttattcccagaacaatgtttcctgatgtcctttcctcgttggcttttgtacctgaggggataagcagctgttaactagaataggccccaggtggcaggaagaggctcctgggtcaaccaggaacaaaagaagctatttctagtgcagcatgaaattaaaaatcaaaagcatgacccagggttctctgtgcaggttcccctcttccaagacgggtgccaagtgatgagtatcaggtgtctatggtgagatttggggaggatcccagaccttaacagccctttggttgaaacctctcacaatgtggcaggtaagatgtctttattcccattttgtagatgtggcagctgagcctcagaagttacgtgacttgttcaaggtgacccagtttgtggtaggactgggagtgaaggactcttgactaagaatctttccagggagcgtttgccctttctgcactctctgcctgggtgctttcctccaaaatcctggcatgactggctcctttggtcattcagatgtttcatccctggaggctgccccaccctataagtctatcacgttatccttttcttttttttgagatggagtctcactctgttgcccaggctggagtgcagtggtgcgatcttggctcactgcaacctctgtctcctgggttcaaacaattctcctgcctc

SEQ ID NO: 104 - DNA, 6112 bp, Homo Sapiens
aaagccgctttcaaaaaaggcatgaaggggcaatggataaaaagcttattagggtttaaggtcaaaccagcttgagttcgaatgtccaattcaccactaagtggtggatgatgctagaaaaattatatttccaagtctgtttcttcaactgcctatcacccctctctcataactgttgaaaagtgaaactcctaacacagtattagacacacaaaaggcatcatggaaatgttccatttgccccaagccctacaacccttaaggtccttagaaaaattttaaagagatcagataatacacatccttgaagatcttaaacaagttactaaaagcacatcagagaagtgcctgccatgcctgctgggagaggctgtacacatacacacagaaaataccattaatgtaggcaatggtaccttcctacaactacaacataggatgggactgtgccggaaatgggcaccatcaggaaagtttacattttatgattctaaacactttaattcttccttctggcttcccatcctagtaatatgtaatatgtaaatttttcttgttaagaaaaatgtcttaagacaaggaattggccagtcagggtggctcatgcctgcaatcccagcactttgggaagccaaggtaggtgggtcgctagggacgaggagtttgagaccagcctgggcaacgtattaagaccccatcactactttttaaaataaataaacaaaataaaacattttttaaaaaagatgatggagttaactggactcaaactgaagttttaaaaagatgaagagtcagagatccttaaggataaagacaaaattagtctgtctctttcattaaattcttatttgctggtagattccgactcagagtcagagaaagtttaactgcttaagctctactacctttaaagctctggtcaagtttccagaaaacttatttctattgagcagtaatgtacaaagctaagcacttacatcagatttttaaatgtaagagacatatcatactctgaagttcatttcgggcatgatttcatcaaaccaaaacattatggaatttactgctacagctgaaatgccttttgtgctctcaaacacaccagttaaattttaaaaataaaataaaaaaacatggtttgctcctacaactacaacataggatggggctgtgctggaaatggacaccattaggaaagtttgttttatgattctaaacactttaattattccttccagcttcccatcctagtaatatacagagcaagaaaaatttcacacacaacagtgactgacaaattggggaggtggaagcaacaaaaaggatttattaactacctgaaaatgatttacattttaagttaaatttccaccacaacttctaatctacacaaatttctcctttctctcatatgctaaaacaaatacattcaatctcaatgtgctgaagtctacaaatcatcatacaaagatcttacaagtgaccaaaaatagctcagattagtagataaaaataccccatagttacaataaaattacaagtatctccaagtacccaaaagctagaatcttgatactaattttaaaataaaactaataaaacttgtcttatgttttttgaaaaagttctgcttaacaaaaacaccaaaaattagccttttaaccaatgcttaatgcaataaaggactctggaaatatgaatttagaaaatttttgtataagagttttaacccacaaacatgttattcaattgttttttcttcaaatataagactacatcagtttcttactgttttcattatttttaaaagaacatttagtatactactactcagtaaagtgcctcatgtgtttgtcttactttttattaccttatagagaacagtgtcttaactcctgaatttaatcacaaaaagtgaaaaaagataggaaaacgatttgttgaaagccacgtttagaacagaaataacaaatgtcagatgaaaaaggctcctctaacagagagtctcccgcacataatcctttttaaaactaaacatctattatcagctcttaatctataatgtgtgtcttgcttgatgaattggattgaaaaaaattaaataaaacgtgtaacaaaaaaatgaacactacaaactataacagaagtctgcctacgcagtaccaccctcggactcggtagaatacaggacagaaatacacttggtcctgcagtcataagtcaaagtggcaaagaaaaaaacagaaacaatacattacatgaaatagatattttctaaattatcaaaggctacagacactcatccaaagcattcctcaaattttttcaatcgttgcttttaggcacaccttgaggtttttaagtttactctggggcaagtcaaaaagcttacctaaaataaagcactttaagcaagaataaaatgatgcagctggtcctagaacacaccggaaataaaaatcgttgtcttcaaaacccgaaacaagaaatgacatgcttttagcaaatttgactttcatgtgcaggggggagggggcactgttttgacaatccactaactacactgtacatctactccacctgaaagtttaacgaaactcttcaagttgggtcacccagggaccgaacttctactctaagagacccaatccagcctacaaatcaaagaacatccccaaatggtttacccttctcccgaccaaaccctttcccctgggcgacagaatgttttcaagaacaccaacacaccctcctgtgatctctctccaaacacaggacacaggaagaaccgaggccactagtctcagataagcgggtgatgactgctgccactccacgggcggcccctctgcagaatggggtcggtcaggaccggcgcgccgggtaaagaacaatacacgagcccagctgcaaacaacacaacttcccacgagtctgcgcggcgggtctcggcggcggagaggacttcggaatccgccaccgggcaggggctgggggaggaatggtgagcaggatgagcgctgaacgaggacggcgagaccgccagcctcgctgcggctgcctgcaccggcgcccgccgagcagactggagggatgcagccaccagcctgggttccaccgctctcaccaggcgacgcggatgccccgacttcgcttctctgggaggcgacccccgcctcccggggccgccagggcggtggggggcggggaaggcctcgccggaggcttgggagcctcctcggcccgccaccgaagggaaagcggtcggggcgcgggggacaatagggagcggggagcgcggcccgccagagtggcgccgctggccggctgggctgactgacgcgcacgccgcgaggcgcgactgggctccgctcggcccggccgccgctccgccgtggtcgcggcgcccccggcgctcgcagtcgtgcctcacctcccatccccgccgcccaggagaggagcagaattaacactctcagcaacaccatcttccgctgccgctgccgccgccgccgcctcctcacgggttaacagcagcacatcgatccggagggagaagctgaaggggcttggtccggagcctccacgggaagccgggacctcccctggcaggagaaacggcgaagcacctccctctcgctccacttcaggggccggcaacgctcctagctcctccaaaacagggacctccctccccctcgttcgtttccttcctcctttccccgctttccttcccttgctcgttccctcttctctccccccctccttcgaaactcagacctccgcctccttcctcaccacgtgacgcgcgggcacccaactggcacgcggagccgcgcccctacctcccgcccctacccgtcccccaggcgcttcaggggcgcgcgcatgcgcgcgggggacggttcccgtgctgctaggcctgccgccgcttcctgtccgccggcggagagctgggattgggcttgggaggcggggtttgtcctggtcccgccccggggcgggagcgctcctacgcggagatagtgctccgctacgtgttagagctgctgaggaccttcccttgggctaaaatggtccgtggaagatgtaagcagggctgctttcgacttcttaacgtcacaagtaacagaggttttttttcttctttttctgcctctcttggtgcaccacagctaccaagtaaacaaaaagtcccaacaagcagtaattatagcggcagctgccccagtgatgcgaacataaatgcaaagaccttcaagcagcaggaaaaaaagacaccatgtccgagatgtaattttccgagctctttacaaatttatgtcacagactaaggctttagcctttgcaaaagcatgcaacctgaaccagactgtcttgaatctccagtccagaaaatgtcctcttttctctctgtcacatctttgaagcgaatccacgcacatcttctccccaacttcttaaagcttgtgtttgttttctcgtaactcattttgattctttaaacttggatgtcatgaactagaactttttatggccatttaattagatattcttcatctatttggtatcgtgcttgagtaggccgaattagggagagtgtgtgtgtgcgtgtgtgtgtgtgtgtatgtgtaaattgttttgttttgctttctaaagacaaggtctccgctgtctcgccaggctgaagtgcagtggtgtgatcatagctcactgtaacctccaactcaagccgaattagggagagtgtgtgtgtgtgtgtgtgtgtgtaaattgttttgttttgctttctaaagacaaggtatccgctgtctcgccaggctgaagtgcagtggtgtgatcatagctcactgtaacctccaactcaagcgatcctcccgcctcggcctcccacaagtgctgggattacaggcgtgagccactgcgctcggccttaatgttattgatactgtaataaactggaattcctatactgttacctgtatattttataccatttattaccattaacataagtgaagagaatttttttttttttgagacggagtttcgctctcgttgcccaggctggggtgcaatggtgtgatctcgactcaccgcaacctctgcctcccaggttcaagcgattctcctgcctcagcctcccaagttgctgagattacaggcatgcaccaccacgcccagcaaattttttgtatttttaatagagacggggtctcaccatgttggttaggctggtctcgaactcccaacctcaggtgatccgcccgccagcctcccaaagtgctgggattacaggtgggagccaccgagcctggccataagagtcttctttaattctcagtttgagaaatgaatgattctagttttgctgcaacattaataggctcaaaaacggacgtttcaaaaccatcataattgtatccatttataatgagatacatggaatcatcaaaggatggcagaatctcacgaatggtttttttttccttcattaaaatattcagtcttaggaaatagttacctgcagacattacatctcatatcacctgtgctttttactaatctcttgtggtagtgctgtcaacaaatgatatttttattttccagctcttaaaccaccttatagcatgttttctgttgcacagtatttttataatgaattccagtgattagaggcaaatggcactttcccttaaaattcaactggaaaaaactccaaagccatattttgcattactaagatgattactgaaaattacatttataaagactgtatttttttttttaatttttaaaatgtatttattttggccagccacggggctcacagctgtaatcccagcactttgggaggccaaggtccgcagatcacttgaggtcaggagtttgagaccagcctggccgacatggtgaaactccgtctctgctaaaaatacaaaaattagccaggcgtgatggcgggcgcctgtagtcccagctactcgggaggctgaggcaggagaatggcgtgaacccgggacgcagagcttgcagtgagccgaggtcgcgccactgcactccagcctgagcgacagagctaggaaaaaaaaaaaagccgggcgtggtg

SEQ ID NO: 105 - DNA, 6223 bp, Homo Sapiens
gccatcagaaccatgaaggatgtagtcagttgggtcacagcccctgaaaagatgacatccatgtcccagaacctgtgactaggaccttactttttttttaaatggctctttgcagatgtaattttttttttttaagagacggagtcttgctctgtcacccaggctgcagtgcagtggcgcgatcttggctcactgcaacctccacctcccggggttcaagcaattctttgtctcagcctcctgcgtagctgggagtacaggcacacgccaccaggcctggctatgcagatgtaattaaatgagagatgtcaagatgagattattctgaattatccacctgggccctaaattcagtgacaagtgttcatacaagagaacggctcacaactgtaatcccaacactttgggaggtcaagacaggataatcacttcaagccagaagttcaagatcagcttgagcaacatagggagactttttttccacaaaaaaaaattaaaaattataaccgggcatggtggcaggagcctgtaatcccagctactctggaggctgaggcaggagaatcgcttgaacccaggaggcggaggttgcagtgagccgaaattgcaccactgcactccagcctggttgacagagggagactccatctcaaaaaaaaacaaaaaacaaaaaaaacaaacaggccaggcgcagtggctcatgcctgtaatcccagcactctgggagactgaggtgggcggatcacgaggtcaggagttcaagaccagcctggccaatatggtgaaacctcgtcgctactaaaaatacaaaaattagctgggcgtggtggtgcactcgtgtagtccccgctactcaggaggctgagacagaagaattgcttgaacctgggaggcggaggttgcagtaagccgagatcgtgccactgcactccagcctgggtgacagagagagactccacctaaaaaataaaaataaaagattagctggccgtggtggctcacacctgtagtcccagcttcttgggaggctgaggtgggaggatcgcttcagcctgggagttgaaggctgcagtgaactaagattgcaccactgcactccagcctgggtgacagagcaagactctgtctcaaaaaaagagagaggcagccaaaaggagatttgggtgggagaaggaagagaagaagacagagacagggactggagtgagacagccactagctgagaaacgtctggagccaccagaagctgcaagagtcagttctcccctgggtccccatggagaggctcagccctgccgatatcttgatttcagacttccaacctccagaacttcaagagaataaattactattgttcaagctacccagtttatggtaatttgttagagcagccgtaggaagctaaaccacagggttaagggggatagaatgatggggtcaaggaggtggaattctattttcacagacatatgaaggtaaggagggggccatggggctttctggggaacggcattccaggcagagggaacagcaaatgaaaagtctcagacccatgtccaagcgcggtggctcacgcctgtaatcccaacactttgggagaccgaggcaggtagatcacctgacatcaagagttcgagaccagcctgaccaacatgaagaaactccgtctctactaaaaacacaaaaaatcagccaagtgtggtggcacatgcctgtaatcccagctactccggaggctgaggcaggaaaatcgcttgaacccaggagatagaggctgcagtgagccaagatcgagccactgcactccagcctgggcaacaagagcgatactcgatctcaaaaaaaaaaaaaaaaaggaaaaggaaaaaaagaagtctcagaccccaggacacaaccacgcaggcacacacagacaggcccagaaaccacagctacacacacagagggacacaccaattggacgccatggcctggccagcactcaagacaccaacccacagcatcccacgcggaaatgagcaactctcactcacagggacagacagcagggctcccacaaaccctcaagtcccttctctgggacttatatagcctcttatgcagggatgggagggtggagggttggggtactgacaccactgttggtaccctcatcttgggggggtggtccttcaacctgcagccccctccccaagcccaccaaggagtgtgaggaattggaactgggaggggttggtcttaagactggaaatctccaaggggcactagcggggtcagagggaggggcttagagaagccagagagtccaagctccgccccccgacgctgccaaccctcacccccctctatccccccaccctccgcccctggcgcggttgtcctccctccggcttgtcccagacgcctgagactgaactcaacaagcggctgactcagtccttagcgtcacccgcaagatcccccccaccccggcccccagcgaaacaggtcggggcacggccgagcaagcaagggtgcgggtggcgttgggaggggagggcacagctcccgtcccctcctccaaggcccgcagggcgaccactgcggccccgaccgcgcgtcgggagggggcgcgctgcgctgggcgccgaggatagctggtcccaccgccaggcagggcgcgacccgcgcgggccccctcccgacgccccgggcgggttcccacgctctgcgtcccgcgcccccgccgaccggtcgggccggttccagccccagcccgcgccccgccccacggcctaagctttgggggagacggaggggggagcgcagacctagttagggggggcacggcgggtgaggcgaggactaggagatggggacgaggtctatggaaacgtctgctgccggtgggggggtcttgggggatccatgggtggggtgacagcttgggggcatccttgaaaggacttgagtatttgagaccgtgaaagagactcgtggggggtggagggcgtgtagggagtggttcccacagcccaactcggaggactgagcccgctccactccgggcgatccgggctccgggcgccgcgcgcgccggtgattcacctgtcgaagggcggggcagccgcgggctcattcacctgtcggcagtattccaggcgcggagctccactgcgcaggcgcccggccccaccgctcgccctcccaggtgtgtggctccaggtaaggtcacacttttccccatcccgccccaccttcgcagaccccccagccccaggaaaccctctcagtcaggctcagccctccacaaaggtgagcccgagtgggagatccagccaaaataaatgtaggtgtaacttcaaagcggctcttcttggtctaaaatcaccccagacccacccagcttgggcctgacccagtacttggcacacatgatgctgaataaatgaatacattaatgagtcaatcaatggctactgcgtgaactgctgttattaatgatagcatgaaaggagccaagcatttcctcataaccttgagagacttctccttagagcacctgtttcctgcctccctaccattattatttataataatgcctatgttgagcacatactatattctgagcacttaatgtatgttgagtgcatacaggagttattattgccccattttccagatgcaaaaactgaggctcaaaaagcttgaatgctcaaggtgtcccagaccccagaatttaagctgagctctttctgtctctgctcagctccttcccagcctctgctctgctccctgcaacctcttgcctttccttgtgatatctaacaactaaattgttaagtcccttcacagtcgccagtgaagcattccctatttcacaggtgcaatgatgatcagagagggaaagtgactagcccaaagtcacactgcaagtaagtggcagtgtgggactgtattataggcctcctatgtccccctccactaaatgttgagagatgggaggggtgtggagggtgtgagccactgcgattggtccctgatagtttgttgattgaataatacctacctcatggggggctttacatgtgacctcaggtggccaagaactgtgaagctgggattactgggcccattttgcagaccatgacactgagatgtaaagagtttaattcctagccggtcagcaacatgatgtgggacttgaacccatgccaagaagagtgcagagcccctgctcagtttccaatggggaaacacgagaggttgcccaagccacacacatgtaggaagtggtagagacatccatggtgaacacagaggcagagggagaagacaaatcgcccctcccccccgcccccacacacagggcccactggtggctctgagccaggcactcacaggcaggcagcctcccgggagggcagctgggtgcaacgacctccatttgcacacgggcttccgtccaggcaagggggggctgtgtgggggtgaaggaaggtggaggatcagccaggtgcccaggaaccccaggcccaagtgacaaaccccctccctccctccaccaggcaacagctgcatggggatgggggcgtctctgcgggtgcagggagtccccccatccacagttcccacgccccccccccccccgccccagccccagctgttgaggctgcagctgtccctgccagctcgagccctgggaaccacaaagcaggggaaggcaggaggaggggctgtcttatgccagatgtgggggctcgggaagctgccagagctaagatgtgcagaatggggtgtgctgagacaggaagtaagggtgctgagtgttacagggaggtctggggcttcatgcccaggttcaggggtaatagaaggggaaggggcaggggatcctagggccacgggtcttcctttccctgatgggcatctactccagccaggcaggcctgcgtggtgctcttgggagagggaccaaggcatgtacccacgagtgagcacagcatctccagaagcagccagcgctgggcgttgctggaatagggtgtgtgttgaagggaggggcaactggcacaaggcatgtgctgccctgtccaacatcgccatccctaagggctgtgtccctctagggtgtggcatagtctaactgtcctgccagaagggtccagggtgtggctgggtctgagctagtggagaactgtgtgcatgcgatcaggtgtggggacacagtgcgtgtgtccatgcatgctcttgtcagagagagggtgatggagagaggaaggaagatcgagaaaaacacaaagacgtgagaatgaactagaagcagatagaccaggagaagacagagaaggacagaaagaaatagaaagcggccaggcatggtggctcacgcctctaatcccaacactttgggaggccgaggctggtggatcacctgaggtcaggagttcgagaccagcctggccaacacagtgaaacccagtctgttctaaaaatataaaacttagctgggcatggtagcaggtgcctgtaatcctagctactcaggaggctgaggcaggagaatcgcttgaacccaggagccagaggttccagtgagccgagatcacgccattgcactccaccctgggcaacaagagccaaactccatctccaaaaaaaaattagctgggtgtggtggcgcacgcctgtagtcccagctactcgggaggctgaggcaggagaatcgcttgaacctgggaagcggaggttgcagtgacccgagattgcgccactgcatgccagcctggcaacagagtgagactgtctcaaaaaaaaaaaagagagagagaaggacagaaagaaatagaaaacaagagggtgagttacagaatctgtcgagctgaacctgagcatgggcctacatagtatatgccccttcctcacaggacaagccgactggacaccatcacccacaccaggacctgtgggtgttcgtgaactcacactgtgggtcccataacatgggctatgggccaccctgagctgtaggcaatgtgagccacatgtgtgtgcgtgcacgggcttgtgtgtctgtatgtggatttgggcatgcatctattgtgtctcagttgcagctacatgtgagtctatctgtacatgcatgtcagcgtgggtgtgcccgtgtgtgtatgagctgcacacccatacgggaatgcacagatgtgtgtgctgtctgtatgcaggttgtgtctgttgtgcgtct

SEQ ID NO: 106 - DNA, 6195 bp, Homo Sapiens
tcatcaaatccaatctgaaatgtttccaacctcaaactaaagggaactgagtagtataatctttggggtttgttaatcccagcctttcagtcagccgacgttgttggccaaattcttgtccttcctgaagggcaacttgggttcctacagttcccagggctgggcaatcatatctgtaactttctaaagccttgcttgccacaaactgcatgagccaatggaaagatcaagtatctctgctggcacaatctcctcaggggatttctaaggctccaacagcaggctttatgtcaactcttgtttagtaagaaagcttagccaacttttagcaattctctcttctaggaagctgatcttgtggctactgggaacaagatatttggtgaccccactttagaaatgtaagtaaattttcaattagcatctataagcagaaatttacacaatccttaggacaattaccctttgagaactgagttaaagtttactgttttatttgctgactcttaagtgagataaagtataccagaagctagcacgtcaggtgttttcacgagttttgaaaatttaatattaacttacataggggccacagaaattacaaatatttgttaaggggtcagtcccagctatcttacaaataccctttttcaaattgttctaaattatactcccactagaccccattccataacccttagcacaagggttctgatactattattattaatttttatttatttatgtatttagagacagggtcttactctgtgctactgcactccagcctgtgcaacaatcatagctcactgctgcctcaaattcctgagatcctcctgtcacagcctcccaagtagctggaattacaagcataagccaccatacccagctaatttttaaattttttgtagagacagggtctcactatgttgctcaggctggtcttgatctcctggcctcaagcaatcctcctgccttggcctcccaagtagctgggacttacaggtgcacaccaccatgcccaggtaattaaacaatttttttttgtagagatggggatctcactatgtcacccaggctggtcttttgatctcctggcctcaagcaatcctcctgcctcagccttccaaagtgctgggattacaggtatgatactattaacttattaaaaacttatatagaggtcccttctttcaacatactttacaaagttaatctgctggcttttctaccatcaattgactatttaacaaaaagaagaccaatttaaaaaatatttagtattcaaggttcacttaccttcagaatctcatacatgtaaaatcgaatatcatagtctgttaacgtctggtacaattgctgttaaagacaaatgtttgagccatgaaataatgctgacagaaaggcatttttcaccctcactcacagtaattcaaaccaagacttggctcatttaccgttgttccaagatctgtccattcactgccctctatttctccaacattacattaactttaaagagatactttgggtcttcaactcttaaaaatgaagaattacttaaacatatattgcggaagctataatccactgtcagaaacatactgatctagatacgttaatatgcactgacacccacctataatttagtttgcttttcatgtatcttcagaccttctcaaaagaggcattttggcaaatatactgcctccttagtagggaactaactcatctttgccttacatagttggccctgcagatcaccagtgggtatgcagatggcatgataccaaacctgttgagtcaatttaacaaaactattcttgttccaattggaaagtaaactctgaacaactgttatgtatcctttccagtttccaaagagttgcagaatgttttttacatggacatatcttttttttttttttttttttttgagacagggtcctcactctgctgcccaggctggagtgccgtgctgcaatcataactcactgcaacctcaaactcctgggctcaagcgatcctcctacctcagcttccccagtagctaggactacaggcgaaagccaccatgcccagccacaggtacgtctctttaatggttagcaacgtcttctgacaaagtttttcttgaaattatcattctgactctaaagcagttcctcttcctttctccctatctctgcaacagaattcactaatttattaatatataacattctggatactggactggtggaaaggcaaatcgaagatttttacttttactccaaaagagtagctatattcttctgtaaaattggaactgtgtgaaataagtaggccactggatagactggaattctgagatatctcttatagaggtttgtgttatggcagaatttgacattatccttcctcgatccctgccttttaagatctatagcccacagtttatgaggaatcctaagaaataagcagtccctacttttatacatacaatatatttcttcctgaacactattgtttaaagcgaattgccatatggccagatcctaagtgaacgtgtgttactgccttcattaggttggacatcagcagaaactgtcaactaagtagtgagaagtcaatgtgttggtcattaaaaagaacattaaacaaatgggcaaaatatcaagatgcagaaagtgggcactgcttatataggagttcttctatcttaaaatttgcactgtaaggatgaaaagctttttaaaaacaaatgcgaagcaagctcttctaacagcatcatccccaaaggctatgtggtctaaaaacccactagcccgaaacagttggttatatattataccttgaagtctgtgttgtttacgtgttcaaaaaccaaggcgggggttcgtgactaggggaaaagaacaaaaacaaaaacacacattagcaatagccctgacagctttaatggggacaatgtttgcggatgctgcgtggtgaaatttggcagtcctcgcctcagtagtaagaaaccctctattgctacaagccctccccgctctgatcatcaccgcacttaggtcatttttgggatggatttcaaacagaagacatggagctgaagtctcaccaggctctaggcagcccgacaatgcgcccatcgcccatcggcatcggacctgagtttgcaaaatggattaacacatttcagtttccagtgctatcagtctcttagcctagaagaataagaaatagtctgtgggtggaggtctctttgaaagaaagacccaagctagttaaatggtatatctgattaagcactttcaaagcaggacttaatgatgagggttgggggagggaacaaaaagaggccagttgtgctccaggtcaaacaccatctcagctctggcgggccttgctaacacctactatactcaccacagggtcttttacaatgtctgccagtgtgatgatgttgggacctcctctcaaattctccaaaatctttatttcacgcttaattttcttcttttttactggctgaaaggggaaaagtacatcagcaaaaaaaaaaaaaaaaaattttttcagagtatttcaacacgtagtgtaatacataaatgataaatggcttacttatgagcacaccttgaaggaagaaaatgtgtcacattcgtctctgaatccttctcctagcactgtgccaggtattctgcaggtacttacaaatgttgaattgaaagaaaaaaagatttctattccaaagaccagacacttctgcagaattagcatttcaatcatcagtcttgatgttaatgttttaaaacatgttaaacatgttaatgtcttaaaaccttacaaagtagcaatttaaatcgttagtaatactaaagtatatcaaactttttatcaattaggatgaaacatgggccctttccatttcttcctctaattagggccaacaacaaggatggccaaaacatctttgtgtagcacaaccctgagggtaaagggtgagtcttggagtcacaatgcccaatgtgaaacctacctttactacctgctggctgttaatggcaaactacataacctctctaagcctttcattaagtgtaaaatgagtaacaagagtacccatctcataagattgttgcaagaatcaaatgaggtattcgaaagatttcggaatatggctgaaacataacataataataactgtctagcctgatcaccaatgctcttttttttttttttttttttttgagacagagtcttgctctgtcacccaggctggagtgcagtggtgcaatcttggctcactgcaacctccgcctcctgggttcacgccattctcttgcctcagcctcccgagtagctgggactacaggcacccgccaccaggccaggctaatttttgtatttttagtagagacggggtttcaccgtgttagccaggatggtctcgatctcctgacctcgtgatctgcctgcctcggcctcccaaagtgccaatactcttataaatgaacccctccattctaaagagtattctgcagagcatatcttaaacattcctttgtccttacccattctttccacatctgttctagtatggaatccttttcatttttttctgaggagggccttggtcccactgcacctcctttataaagcctttttttttttttgagacagagtcttgctctgtcgcccaggctggagtgtagtagcatgatctcagctcactgcaacttccgcctcccgggttcaagcaattctcctgcctcagcctcccgagtagctgggattacaggcgccagccaccatgcccagctaatttttgtatttttagtagagacagggtttcatcatgttggtcaggatcgtctcgaactcctgacctcatgatccgcctgccttggccttccaaagtgctgggattataggcatgagccactgtgcctgggcttatattataaagccttctcctgaatagtctaaaacagtgctggcccaaaggaaatataatacaaaccacatgtgtaattttaaatgtgttagtagccacatcaagaaaattttaaaaaggacaaaattaatgtactttattaatctaaaatcttaacatataaatcaatataaaaattattaatctattttacctttttttgtattaaacccttgaaatctaatgtattttactcttacagcatatctcaattcagcccagccatatttcaagtgcttaacagcctcatgtggcctgcgtgcctgctgtactggactgtgcaggtcttttcctagggtgttggtcacctcagactagatgcactgcatataactcttagaagttaagtacatctcatctcttcattaacaagattggtggttactaaagtttgatgaccaacaatcacctggatttttttaatatacagactcacagaacccaccaagattcactaaatcaaaatcttgagagggaaacgggggatttatttttagatactttccaggctgatgatccaggtccagaaactaccaaataatactataaattcttttaactttgtcttaagcctcaagcacatgatagcagaaagcaagcagattttggaaacattgacagttctcaaaacctggctttgtggttgtgcagtgttcagaaaagcatttaaatgtttctcactgctgaaagggactatactcgcctgttagtgatttacataccacagttagaacaggtccaatgcaaagtggtacccaataaacagaagctattttactaatgacttccatgtagtccattgaattcaacccacgacctcttacccaatacaatatctacctaagaaacaagataatataagtcttctcttcctgcttcaactattcagatctttataaactgttatattatctgggagatctttccaccctgcagagactaacccaacaacttacctcctgttttccattaacccaactgctggttttttagtggaaaaaaaaagcttctggttgacaaaactactctacagaatgcttcaaatctataaacttaaaaagctggtttgtgacagaccaggcagctgactcaggcccgaatttaatgcgatcaatgcaacttttgtcttattaaataggggagattaaaaattttaaatatggtttacaaaggaaattcatctatacttacaccacctacccacagttacagta

SEQ ID NO: 107 - DNA, 6199 bp, Homo Sapiens
aacaacaaaaattagctgttagctgggcatggtagtgggcgcctgtagtcccagctactcaggaggccgaggcaggggaattgcttgaacctgggaggaggaggttgcagtgagccgagatcacaccactgcactccagcccgggtgacagagtgtgactccgtctcaaaaaaacccaaaaaaacaaaaaaaaccctaaaaattagccaggcgtggtggcccacatctgtaatcccagctactcgggaggctaaggcaggagaattgcttgaacccgggaggcagaggttgcagtgagcccagatcacacctctgcactcctggctgggtggcagagtgagactctgtctcaaaacaaaaacaaaaaaccaaatagtcttagaggagtagtgggatggagaagtgttatgagcagaaggctctgccgcagagagacagaagttgagaagggcagggtggtgacggtggagcttcaggaaccaggagcagggacttgtgggatccaagggaaggcatgggattggggcggggtggactaggctaaatgctgctggcagggcaggtccataagcgcaggtccttgaggcatccccaaggcactgcggctgtcccgcatgacctcccagggactctccttgcagctgcgccagggccccgcggggctggggcccaaaaagcgtgcggagcctcagctggtggagacccagaatgtgcggcttattgaggtggagcgcagtgtgagtgtgggcccacagtgggccctggggaggtgccccgtgcagtgtgagtgtgggtccacggtggaccctgggctggggggtatcccgtgcagtgtgagtgtggactcacagtgggcccgggggtgggggtgccccatgcagtgtgagtgtgggcctgtggtaggcactagggggtgcccccgccacctggctattgctaacccccacttctgggcagaatgcgatgctggtggcagagaaggcagctttgcaggggcagctgcagcacctggaggggcagctggggagcctgcagggccgtgcccaggagctgctgctgcagagccagcgggcgcaggagcacagcagccgcctgcaggtgggtggtggcccgggtgcccatccctgcccatgtactgccccctcctgctccttttggatcatcctgtggcctttttctatcccagctcccagccagctgccccacctcttccccagtctcatttatccttgtcctctgaccccagccaccattttgcaccatcctccctgccactatctcctcctacctgccgccagcccccacatctacacccatgtcgccctgcgctctcactgtcccagccctcccctccacagggcgccattagtcccattctgccctgtgccccttccggacagcctggcccagccagcctctgccgcctctcccctgctcaccatcagcctctggctggggcttgtactgcctgctgtgcccccagccctttgcctcctccacaactctctcattgtcttgggccctaccgtctgcccttagccccccgcctctcactcgatttccagccaggggttcctccccagcagcccctgcttccctcctccatcctaggccgagaagtctgtgctggagattcagggccaggagctgcaccggaagctggaggtgctggaggaggaggtgcgggcggcacggcagtcccaggaggagacccgcgggcagcagcaggccctgcttcgggaccacaaggccctggcacagctgcagcggcggcaggaggccgagctagagggactgctggtgcggcaccgagacctcaaggccaacatgcgggcactggagctggcccaccgggagctgcagggccggtgagcatcaccaaatgcccagctcctcccctggcaccccctatctgccagagaagactcccctcagcaggtctgactccccatcaggaagcacctccacctccgctctgtgatgccccggccactgctgtgccctctggggtagctgtgctccccacacttctgggttgggctccccgtggggctcacctattgggagtggtgggcacctggcatggcattctgcccaatggcttcctctgggggacctaggcttaggaggtgacagacccccccgccccgggtccagatagtccagccagctgcttgtggtggccataggttcacacagccctcttagccccttgtccatcccaggcacgagcagctgcaggcccagcgggccagcgtggaggcacaggaggtggccctgctggcagagcgtgaacgcctgatgcaagatgggcatcggcagcggggcctggaggaggagctgcggaggcttcagagcgagcacgacaggtgccgcccctgccacagcctctagcagctctcagtggccccatcctgaaagtgggttgggggtgtggggtcctgtctggcctcccctccccggcataacttctctggccagcactcggactggggacccaggtcccttggagagcagctctccttgcctcccaagggctcagatgctgctggcagagttgtctcgggagcggggtgagctgcagggtgaacgcggggagctacggggccggctggcgcggctggagctggagcgggcacagctggagatgcagagccagcagctgcgcgagtccaaccagcagctggacctgagcgcctgccggctgaccacgcagtgtgaggtgtggctggagggccggtgggggtatgggcgtgtggtggggcagaaagcctagacccaggtggtcctgagctgggtcccaccctccgagccatggtgcccccctgccagctattgacacagctgcgaagtgcccaggaagaggagaaccggcagctgctggctgaagttcaggccctgagccgggagaacagggagctcctggagcgcagcctggagagtcgggaccacctgcaccgcgaacagcgggagtacctgtgagtgggccgcctgggagcggggtggggcctgcatcccctttgggcgttcctggggagagcccttagtgagggcctagggacagggttggagctgaccttccaggtcagtccaatctgcggcacgggaccagtgcgtcctcgctgcagcttgtgccttgctactgcctcggcctccctgggcctcacacccacctctcccttctcactcctgccagggaccagcttaatgccctgcgccgcgagaagcagaagctcgtggagaagatcatggaccaataccgcgtgctggagcctgtgcccctgccccggaccaagtgagcagccctgtcacctccctcaggctggacatcctgctaacctctgcccctgccctggcctctgaccccaggcccagctcaggtccaggccccatgaaggtcaacctggcctttgacatccccaggacaccctttgctccctccctcctccctgtcctgaccccctcttgtgccctcttgcccccaggaagggcagctggctggcagacaaggtgaagaggctgatgcggccccggcgggaggggggcccccctggggggctgcgcctgggggccgatggggctggcagcaccgagagcctggggggccccccggagacggagcttcctgagggcagggaggcagatgggacaggtgggtctgggggtcaggtggccaggatggtccctgccccacatcctctgtcccccaccttggcacctgcctcactgcctggcctgcatgcgtgaccccattggccttccctgaggcctgccccccctgccctgatgccaccaggggctcttttccctgggtcctacagggtcacccttggcccacacctccctcctgcctgtgctgtccccgacccagcctgccccatccgcagcggagcccaggatctgggaggtgcagtggactctagggagaggtcattgttcctagactgcagatgaggagactgaggccccgggaggggaagcttttgcccaaggtcatgcagtgagttagtatgaaggccagcacagggccagtgtcctgctgccccactcatttgcctggcttctcccccacctctgcacctcccctccctggccctgggcagcttcacccactggcccctctactccatccagggccctgttcctctgaccccctccctgcatgagcctccgccccccccctctgacccctcccctgcatgaacctcagccccctcttctgaccccctccctgcatgagactcagtccccgttcccttcctctgaccccctccctgcataagcctcagcctccccccctcctctgaccctctccctgcatgagcctcagcctcctcccctcctctgaccccctccctgcatgagcctcagcccccacttcccttctctgacctcctccctgcaggagcctcagcccccccgctcccctcgtctgaccccctccctgcatgagcctcagctccctctcccctcctctggccctctccgtgcatgagcctcagcccccacttcccttctctgacctccttcctgcaggagcctcagcaccccctccccttgtctgaccccctccctgcgtgagcctcagcctccccccattctctgacctcctccctacaggagcctcagctcccgtcccctcctctcaccccctccctgcatgtacctcttgcagggtccccttccccggcacccatgcgccgggcccagagctccctctgcctgcgggatgagaccttggcaggcgggcagcggcggaaactcagctcaaggttcccggtggggcgaagctctgagtcattcagccctggggacacccctaggcaacgattccgacagcgccatccaggccccctgggggcgcccgtctcccacagcaaaggtgagggacaagggtcactgtaccagccagccccccaactctttgtggacccaccagctccttgggggaggaggcttccttcttgtcccctgtgtctcctgcaagctctgtccacttccgcactggccctgggcccagtggttgccttgtgcctcccaggacctggtgtgggatgggagaactccgctgagaccctgcaggaacacgaaacagatgccaaccgagagggtgagtgggggactgtggaaggagtagtattctttgtcctgcctggggcccctggcagaacctcattcatccattctttcattcgacaatgatcctttaccaagtgccaggtgacgtgctggcaggggacacagcagggaacgttctggtgtgaggaggcagatagtaaacaatttgcctaaaaataattattatctacaacagccctgtccactagaaatatggtgtgaaccacatgataattttaacttttccagtaggcttaccagaaaaagtgaaaagagacaggtacaatggattttaataacatttaactcaatatgcctacgctattaccatttcagcatgtagccagtgtaaaaatcatgaatgagctattagacgtgatgttttttttttttttttgagatggaatttcactctttggctcactgcaacctcctcctcccaggttcaaacgattctcctggctcagcctcccaagtagctgggattacaggcatgggccaccacgccaggctaattttgtataattattattattttttttagtagagacggggtttcaccatgttggtcaggctggtctcgaactcctgacctcaggtgatccgcccgcttcagcctcccaaagtgctgggattataggtgtgagccacccagccagacgtgatttttttcatagtaagtctttggcagtttcggaggccaaggcaggcagatcacttgaggccagaagttagagaccagcctagccaaaatggtgaaatcccgtctctactaaaactacaaaaattagccaggcatggtgtcccatgcctgtaatcccacctactcagggggctgaggcaggagaatcgcttgaacctgggaggcagagggtgcagtgagccaagatcacgccattgcactccagcgttggtgacagagtgagactgtctcaaaaacaaaaaacaaaaaacaaaaaaacatagtaggtctttgaagcacgtcacaggccaaccccatctcacctacttagctccgccctgggcagctcagccctagacccggctggaccatcaggaggcgctaatgctctgggaagaa

SEQ ID NO: 108 - DNA, 6229 bp, Homo Sapiens
tacactcttttaaagttctattgttccagacactttgagtgggtccaaaggaaggacttaggttagaacttagcaatttattctgtatttttaaaaattattttattttatttatttatttttttgagacagggtcttactctgttgcccaggctggaatgcagtggcacgatcatggttccctgcagccttgacctcccaggctccagcaattctcccacctcagcctcctgagtagctaggactgtaagcacacaccaccacacccacatcattcttttgattttttttttttttttttactagagacaaggtttcgctacatattccccaggctgagcttgaactcctgagctcaagcaatcctcctacctcggtctctcaaagttttgggattacaagcattagccaaagcacccggctatttattctcttttttttttttttttttttgagatggagtcttgctctgttgcccaggctagaatgcggtggtgtgatcttggctcactgcaacctcagcctcccaggttcaagtgattctcctgcctcaacctcccaagtagctgggactacagttgcctgccaccgtgcctggctactttttttgtatttttagtagagatgagtttttgccatgttggtaaggctggtctcgaactcctaacgtcaagagatccacctgccttggcctcccaaagtgctgggattacaggcccagctatttattcttaatatgtatgtgttcattagtatttctaaaccacagcccaggcacggtggctcacgcctgtaatcccagcactttgggaggctgaggtgggcgaatcacttgaggtcaggagttcaagaccagcctggccaacatggtgaaaccttctctactaaaaatacaaaaattagttaggcgtgttgtcaggcgcccacctacttgggaggctgaggcaggagaatcactttaacctgggaggcagaggttgcagtgagttgagatcacgccactacactccagcctgggcgatagagtgagtgagatactgtcaaagaaaaaaaaaagtataaagataaatttagacatataatccataacactggtatttcagtggagagggaggacattattggtattatttcatcaaactaaaagggctgatgaaaaaaatttaataaaagtcatatcactctattattccaaaatatacagctagcctctttaaaatatgccattttaagttacttaatacagtccttgaaatggaaaaaaaatttaaaaattaaatggtcttcttccaaacacataattttttattaagcaatgctaataaaactcttcagatttctagtttttagtctaccttcctcttttctaatctaaatgttcgaccgtgtttacccctaacatcaacaagataagttattccaaatggatatatgtatttccaggagaaatgtatttcatccccacagtcttctctcctcaccctctccaccccttgctgaaacccattcaagtgaacagtatttgggacatgggaactatcattaagtgttaagctattccaatcactgtttgacaataaccacgttttaaggtaaaaatgattatttccctaaatagataaaattaataggacaaagactaccaaagaccaatatctactacattaacatagagaccttctctagcctttgaagatataactaagggaattctcctacattacaggagagcattttctgtttttaaacacttttgctaataacgcataaacaaaaatacccaacatgtaattgtacagttcaatgaatttttggaaagcaaatacctattgcaaagcaaaccactatccaggttaagacaaagaacactgccagcatctcaggagactccttgtttgtctctttcagatagcaaccctctcccaaacctcctaccaccatctgacttcttttgtaagaggtgggggttgttttgttttttaatcactttaggtaacagtatgggagcaaagcaaatatccaaataattgtggctcactggatacacttttgcacctatcattcaagtatatattttagacaaaagtttcattgtctagatgactgcttctgtttctcactccaatgagtggcaatgggtccaatagactaactgaggtgggtgcttttgaatgtcaacaaatcttccttctagaaatggtatccaatcaattctggttcttgtttacaagtaccatcatgacaatcaggaatgactgtttgtgtagcagagtacccacatgtaattgcaatgagagtgagtcatgagccaaattgtacaagtgtgtggtggtgctggtgagtaactaaccaacagctctcacatctaggaactgaaccagtgccagaaagccatctggatagcaaacagtaacatgagaagaattttaaatagcttacagctgtagaaaatgcactattccaggctttgaattcttttagttatttctgtctgctgtcattttgaaaataagtcataatatgtaaaaattaaaagagcatccaataaaggctggcatttatcccaagtaatttcaggattactcctttgcatgatggtttaagtttggtctggcaagtacttatcatttgtttgtctgttttaaaccttttccttggagaccaattttcttcctaagctatccacccatgaatgacaaaatgcttctgtgtgtagctttcatttctccctcactatggactgtaaattgagagggaaaagactaagaaaaactgaagaagtatctgtccttgatgccaagtcttctttcactggttattctctctagaggacacagagagtccagagaggcaggctgataatgtcatctcagtgctaggccttgatcaaaaagaggaagagaagaaaactgcagagggacaaagtgggaaaacaactgaatttcaaggaaatgaatatttaataagtacttattctgtttaagataccatatcacacacttgattgggagatgaggtaattacaaaacaaaacgaagcaatttgcaatccagcctgtaccagagcagttaggtctagtgagagactagcggaggcatgtctgttctctgaatgattgcagtgttttttacctcgacctcccagagcctcaaccagaagggatgaggatggaatactggaaaagggaaatacagagtacccgcctgaacttcttaaggtgtgggactgcagtgtctggggatcaggctatgtcatctaaaaagttgaggcagcaccacaatgttgctgtcatgaaaccccctcactgcctcactgccccagcctatgacctgtgcataatgggatgagtactgggagttacatggtttggaatataataattaatcacatgttactatgtctaagatcccaaaagatctgaaatctttatctgttatgcattaacaggacagcttttggatactgtcctgtatttaagttataacatcaccctataagctaataaattatatttcgtttcaaaaccctcaaatatagcattcttttaaattaaaaagcatacattggccagccgcggtggctcacacctgtaatcccagcactttgggaggctgaggtgggtggatcacctgaggtcaggagttgaagaccagcctggccaacatggtgaaacccagtctctactaaaaatacaaaaattagccgggcgtggtggcgtgtgcctgtaatcccagcgactcaggaggctgaggcaggaggatcacctgaaccccggaggcaaaggttgcactgagtggagattgcaccattgcactccagcctgggcgataagagcaaaactccatctcaacaaaaaaaaagaaagaaagaaaaatgacattagtatccatttcataccattagtataacagttaataatttaaaatgtttcctgactgaacgtagctactaaaaccaacccatacctttttcttctggaaactatgggaatactctcaagggattaaaaatgttttggataaaacattagcaaggaaagaaagctttaagaatctaaggccgggagtggtggcttatgcctgtaattcgagtactgtgagagggcgaggcagaggatcccttgaggccagaagttcgaaaccagcctgggcaacttgacaaaaccctgcctctacaaaaaaatacaaaaaatacaaaaattagctgggcgtggtagcacacacctgtagtcccagctactcaggaagctgagggacgatcgcctgagcctgggaggcagacattgccgtgagctgtgattgtggtactgcattccagcctgggcgacagagtgagaccctgtctcaaaaaacaaacaaacaaacaaacaaacaaacaaaaccccagcatgggcaacatggtaaaaccctgtctttaccaaaaacacaccaggcatgatggcatgcacttgtggtcccagctacttgggaggctgaggtaggaggatcacttgagcctgggaagcggacattgcagtgagctgagatcatgctactgcactccattgttggtgacagagtgagactctacctcaaaaaaaaaaaaaaaaaaaaagaatctaaataatctaacaaagtattgaaaagtagcttaaaaaaattgtgattacacgatcaacagcactgctgtcacaacctgggatgattttaaaacatggccacaaaattattttacatcactcctgcacctactggtgctgcctgccaaggctgtgggcaaagtcatctccaagctgagcaggaaggtcactggcatagccttctatgcccccaccaccaatgtgtccctcatggacctgacctgccatctggagagacctgccaaatgtgatgagaggtcaggtgcacgatccctctccttgaatatggcttcagtgatggcttgacctctaatagaatacagcaggggtaatgctctactaattcccaggtttaagaagctgcagcttccatttcctcacttaagacacctgcttgtgagatgctcactcttagaaggtagccaccaagcagtgaacagctcaggacagacacatgggagaggccaaggataagtgttgacaaactccagctgactgctagtaccaatagccaaacttctgagtgaagaagccttcaatgactccatccctcagacgtcatgtttttccacctgatgcccagacaacatgggccaaagacaacctgactctggtgtgccccatccaattcctgactgcagaaccagagcataataaaatgaatgttttacaccactaagttttgggatggtttgttacagcaatatatcattgcagcatgacctattagaatgaaatcacgcaattactacagtcaataattcatttttttcttaaaaaaaaaatttacactttctgttcctcccattcaacagccacatcttctcatgtaacacccatcacatccctgagacatcacaatgaaagtgaaagccaggtaaactgatttggccttattagacacctggtcaccaaggctgcttttaactctggcgaagtggatattgtctcatcaaggaccccctcattgccctcaactacacggtctatatgttccatgatgattctacccatggcaaattccgtggcacagtcaaggctgagaatggcaagcttgtcatcaatgaaaataccataaccattttctaggagcaaattcccaccaaaatcaaattgggtgatgccaccacaattacattgtggagaccactggcatcttcactaccttgtagaaggctggggctcatttaaaaggagaaaccgaaagggtcatcatctctgccccctctgctgatgcccccatgtttgtaatgggcatgaaccatgaaaagtaaaaaaacacctcgcaattcccagcaaaccttctataccactaactgcttagcaccactggccaagatcacccatgacaactttggcatcatgggaggaatcatgacctcatccatgctactatcactgacatccagaagaccactgatggcccatctgggaaactgtggtgcaatggctttccagaacatcactcctgtacctactggtgctgccaaagctgtgggcaaagtcatctccaagctgagcagggagctcactggcatagccttctatgtccccacagccaatgtgtccatcatggacctgacctgccatctggagagacctgccaaatac

SEQ ID NO: 109 - DNA, 6229 bp, Homo Sapiens; identical to SEQ ID NO: 108

SEQ ID NO: 110 - DNA, 6211 bp, Homo Sapiens
aactgaccagtcttcctgcgaaaccagcaagcttgtccctccagcaagctcactcctcacatgtgaatacatctcagcacacccggacccctaaggctctttaggtggaggctgaatctctctggggcaaccagtctccctggcctttcactccaagtcccaccaagcctcggttcatcctgggagcctggtccctcctcagagagtcgcaaacccaaactagtccagagctggggctgcaggtgactccagggagacctgacctgaaaggacccccttcaagtgatagggcagagcacagattgcaaaaacgcatattaagaaatcactcttggccgggcgcggtggctcatgcctgtaatcccagcactttgggaggccgaggcaggaggatcacttgagccggggagtcagagaccagcctaggtaacaaagcgaaacttcgtgtctctctctctctcactatatacacacatacatacatatatgtgcatatatataatatttatttatacatatttatttatatatgtaatatttatatacattatgtaaaatcaatcgatcaatcaatcactctgtggtggcactatgggtcctgatggtggtaacaactgctgatgcccatcttggcctggggcactgagatcgcccggagatcacagtgttagcttcagggcggggtagaaattagaggataggggatctctagggcctggtgagttgagggcctaaggggagtgggtctcaggctccttccaagcctcagcctagatcaggcccaggaacccagtgtgaatgtgtgtgctggggtcggggataaggtgcttctctcccgttggaaggagaaggaacatctgggctgggattccaaaagagctgagcgggggagaacggtggccctggtgtggtgtgtccaggggtacaccactggaagggaaggagccagcagggcctctccggcggagccgagcgcgggccgggggctcgcggcaggggcggggccggccctcggggcgcggcgggggcgggggtccgcgctgggaatgccgcgccgcgggggctggggcggggcttctccggctccgcccccgcgcaggtagccaatgggcgcggcggcgccgggtgacggagggagccgaagtgctagtgccgcggcggcggcggcggacggcccagccggagcgcgaggggctcgggggggcgcggcggttcgggtcgcagagccagggaccccaggacccgggaggcggcgcagccggggccgccggaggagcgcgggtgacctggcggcggcgagatgccgctcgcccagctcaaggagccctggccgctcatggagctagtgcctctggacccggaggtgagtgagcggggcgggggacgggcgcccgcggccggcgagcccggatcctcacaggggcggggcggcccgaagcgccgctgcagtccggcgggcgcccgcgagggcgcgagtgccctccgatctcttgcccactgtccggctccacccccctatgcccgggtgtgcgtgtgcgagggacagttccgccaagcgccgactacctccccgccatagccaggagaggggatcctatggggcgctgagatctggtcgccttcaccccacacctaggacccgtcccggcatctgtccagagctgtcggagcttcctccattaatgcagacggggagatcttcagtgccagatgtctgggattctaccagagacaggggttatgggacccccacttctcccagggccctccgccaagagctccctgcttctggcttcaccgctgctgagcctagaaggattgctcctcttgacccctggcggatgcggagtgtgggatggcaccacccgtctggggctggaactcctggttttctttgccctgaggctagggccagaggacacctgtgtgccctaccccaggctgtggagacgagagtggggaagagcccttagaccttgtgaagatgattcctggcagggcgtggggggaccttggtgcctgcctcccttcttatgccccttccggtaggaagggctgggcccttggggagtttggcttctgccagcccagactccccagacaacccagctccttctctctcagaagcagctcctgacctcccttgagggctctgtggctccagtccctaagcgtgcagaaggccacctcttcctgtgccttttgaccccagggtcaaggtcaagcccctgaatgagctggtggaaaacttcctccttaacctcttgctgggaaggaagcaggtgatattctccttcccaggtggttgttgggggtatgcagggagggaatggagacctcatttgagcccaggagctgagatgactttctcccagcttgggcctggagcccctgtctcagtcccctcctctgccctctcttacctagggcagccaccaagtgtcctgcctctcaggaccacaggcttagatcagggtgagcacccagggtccccagcccccagggtgtgctgcccctttaaagggatggccgacactggctattggagggtgggcgcggcaggattaggtaaccaacctgaaggagcaatttggagtaaattgctctgggattcctgccatggggattttacaggcactgctaggctgctcagaggttctctcgctgactcaccctctgaggtgaggaacactgccctctgcagcccctgtactgccaccccgctactaggaccggggcgcaaggtcctgggggtggtgctcagaggtggattcctttgcccaggcacgcccctgggaccaggcctccaaaggagaaggtagggctgggagaggctggggagtgactttatgctgatagggagggtggacacccaggagctcgatcctggggcaccacttcctgcttctctttagggaatcctgaggcaggggccagcttcaccagggagccaggtttaactgggaaactcatctcagttttgagttctgtaacatctcaggtctgtgagaggggaagaccagcggacttcctgggattggtggggcagggggacgcaatttcctcaggagcttcgctccagaaacgatgtgtgatcctcagtcagtcctcagcctgtctgggcctctgcttctccagtggcaagtgctaggttctagcctccacttcctgggcctgagagggtgcagagcgctgggtactgttgtctggtcccccctcccccactcctggaggtgccaggcgactgggtgttattgtttgggtaacaggagccacagggcagccacggcgcaggttgggctgttctcactggagaacagggcctcgctgttcttagcccaggtgacatgtaagcgatacagccgcctgacctgcacgtacaggcaccaccactgctggcagctcctagccaggaaggaggcaggtgaggggctggtgggggacttttcacagggacctaggatctggactgccctgccctcccttaatgctgctgaaaatgggccgctgggaggcagggcctggcccagggtgcagcccaggtggagtaatctatgggaagcgtgggtgaggattctgcctgggcctcgcttagccctgttgaaagcagtagccttgtccccaggcccagttctgccacgtacagagctttactatgtgccacccactctgccttacgaatgtcaccccactttaattctcacaacagcttctcaagatagggattattacccctgttttcagatgggacaactgaaaactcaggcttatgtgttaatatcagagccaggattggaaccaagatctctctcttccaccaagtgggagagaggctcagggatggggaagggctggagccacactagcccaggtggaaggtgctccaagagaggctccggatgttggcggactctccttatcctgcaaggccctcgtccagtctttgccgagggctggcagtgccagccagccctggcacctggcccccagcctccagcagtgagcagggctgccaatgctgggctcagaacccagctcctggggctgcttcctgcctgtggggcacgtgctgtccttctccatctgctgcccagcttctccagacgctgccctgggcccctctttctaagacagagttgcttgggtgggaaggaatgatgccagttggaacccatttctgacatctcagaactgggggcagtggtctggggccctgggcatctgtcctcatgagcagtgctctctgaggaagagggaggagtgtgggtcttcaacctctaagaggccaaaggactcctaagacaaagtccttcattcagtactctgcaaggtcagcaccattgtccccattcagtcatttatttagcacttaggtgataagtactatttcagacaacaaagtgcagatgtcagcaagacacacctgccctcgtgatacagatgaggaaactgagactttattactattattattttttgagacatagtcttgctctgtcaccaggctggagtgcagtggcgtgatctcggctcactgcaacctccacctcccgggttcaagtgattctcctgcttcagcctcctgagtagctgggactacaggcccgtgtcaccatgcccagctaatttttgtatttttagtagagtcaggttttcaccatgttgaccaggatggtctcgatctcttgacctcgtgatcctcgtgatctgtgaggcctcttggcctcagcctcccaaagtgctgggattacagacatgagccactgcgcctggccgaaactgagacttcaaaaagtgatatgaggccacgcgtggtggctcatgactgtaatcctagcactttgggagcctgaggcgggtggatcacctgaggtcaggagtttgagaccagctgggccaacatggcgaaaccccgcctctactaaaaatacaaaaattagccaggtgtggtggtgcggcctatattcccagctacttgggaggctgaggcagaagaattgcttgaacccagcggggcagaggttgcagtgagctgagattgcgccgctgcactccagcctgggcaaaagagtgaaactgtctcaaaaaataaataaaaataaaaataaaaagtgatatgacagacccaagggcagaataagtggctggcagagctaggattagtggctgtatctttgtggctgcacagctgtgttctttcaaggattgctatgcagcagtcaggccagaggggcagatgaccccggacccaggacccaggctctgagtgggaagccagcaccccacaacccccctgacccccctaccagtctgttctccagggctgcctgttcccttactcttacaggtttggcgttccataagaatgacacccaagccagagatccagggagtagaggcagccagactgccttagagcggggggtccctaagtcatccaggccactgctcaagaaacccacacctctaggtacacctaccccttcctccccaccctcagtaggcttgcagccacgtgactttgggttatggtcacatgtctgccacctgcctgctgagggacctcggtgagtcccttaactctcctgagcctcatctgaaaaataggagtaatagaacctgctctggcctccttgctgtctttgctgggttgaactttcactggataaaccacatgctggactctggctgggtgccaagatgttgatgatggacaagccatggccccttcccgagttaacctgcagcatgcttaggttatgggggtagagaggagggaggaaagaacatgaggctgtgtggacaggggtgacatttgaattcagtcctgataaaagatcaggagtttgccaaagtgacaaggcaggaaaggctttcttggtagagggagccaccatacaaatgctggggatataaaatagactgttttcagggtctgtggttgttcagtttagctcaaaaatagggcccaatgataagaatggctattgtttgtaggccagttacatgtcaggtgtatatatttataggcattatttcatttgcttcttgccgccaccattgaggtatgttactttgatccgcatttcacagatgaggaaactgaagccccagtaaatgaactaaccttctaggggtcacgcaggtggtagaagccagaatttgaacccacaaggtcaggttgcaaaacctacattcctagttattgtgc

SEQ ID NO: 111 - DNA, 6211 bp, Homo Sapiens; identical to SEQ ID NO: 110

SEQ ID NO: 112 - DNA, 6198 bp, Homo Sapiens
tgcctaggaaggaaaggagttgttttgtagaaggtgttggggtttgagagatcagtcagacacgattggcagggagagcacgtgtgtttttatgaagaattatgacaagataggtaacagatgaggaagaaatttgggtttgactgaagtaatgggggctgtctgtgaagccttgaggcagtacagagccaggatgagccagaaggaggaatttcacaaggtaatgtcatcagttaaggcaggaaccagccatctggatgtgtaagtgtaggtcacagaggatatgatggcttagcttgggctcagaggcctgacaccaatcttttcagacttagcatttgctaagtcacaaactttttattatacataaaaagttcaaaagtaactctaggccgggcacggtggctcatgcctgtattcccagcacttggggaggccgaggcgggtggatcacccaaagtcaggagttcgagaccagcctggccaacatggcaaaacctcgtctttactaaaaacattaaaaattagctgggcgtggtggcacatgcctgtaatccctgctactcaggaggctgaggcaggagaattgcttgaacccaggaagcggaggaggttgcagtcagctgagatcccaccattgcactctggcctggagcaagactccatctcaaaaaaaaaaagaagtaactctaatagaacatccagtgtccagatattagcttctaataccattctaaagcaaaataatcacagtgccttggagaaatggatcattccaaggttgggacatggaaaatacaaaataagcctgagcattctctgatgccagaaatcaagaaatgcattaaaaaagaaaaagagtccgggcatgatagctcacacctgtaatcccagcactttgggaggccgaggcgggcagatcacttgaggccaggagtttgagaccagcctggccaacatggaaaaccccgtctctactaaaaaatacaaaaagtagccaagtgtggtgctacgtacctgtaatcccagctacttggtaggctgaggcacaagaatcgcttgagcctgggaggcggagggtgcagtgagccgagatcgtgccactgcactccagcctgggcgacaaagactccgtctcaaaaaaaaaaaaaaaaaaaaaagaaggaaaaagaaaaagcaagtgtatgtcaaagtggcacaggcgccaacctgaaaaaggtcccagtggtgaaagccagaacaatttgagcagcaaattaaatactgataatattggattataacccatataacaaaacaaatatccatgagcccatactgatacaaataactgaatcaatgaacaggagagaagggtcaactcttccctacagaagggaattttaattaaaaaatgtagaaggaagaaaataggggttttgtttaaccattaggaaaaaaaacccgctaaacaacatgttccacaaatggatgcttaaattaatgaataaaagtttaaggaaaaatggcagtgcaggtttctctcccaagatctcaaatacaaagggaatctggcaaacagattaacatcataggtaataagaagtatcggctagggcacagtggctcacgcctgtaatcccagcactttgggaggccaaggcaggaggatcactagaggtcaggagttcgagaccagcctggccaacatgaaacctgtctctactaaaaatacaaaaaattatctgggcatggtggcaggcgcctataatcccagctactcaggaggctgaggcaggagaatcgctagaacctgggaggcaaaggttgcaatgagctgagatcgtgccactgcactccagtctgggcaataaagcaagactcagtctcaaaaaaaagtattgacatcatgtacccaatatgacatactgagatggaaactttacttctgtgacatttttccccaaaatgcagaacattcatctaatcatgacactaaacatcaagcaaacacaaattgaggggcattctacaaattaactgaccgggtcttcttcactagtgtcaaggtccatgaaaaaacaatgaaaggctgaggaactgtcacagatcagagaaaattaaggatatttagcagttaaatgcaaagtgagatcatcgattggatcctgggcagaaaaaggacagtggaaagacaagtgaaatccaaataaagtctgtagtttagttcattgtattatagtagcatgcccatgttattagttttggcccttgttatgcatgatattatgggaactctctgtactattttttgcaaattttcagtaactctcaaattatttcacaattaaaagttattataaaataaataataaaataaccaacatctttcaatgtttataatggaagggtaatgttagacttaacatgccatctttgtcgttgaaacctttctcatcaagatctcatcaagatctatacaatccagtcaaagctgtactctgaaagcactgttttgtaaagaatatcaataaaaaacatctcttccttactactctggtgtatttatttatgactagctgacattcaaatgataagagagctgtaagatcctcctaaaaaccaagctttaggggatatctctaggactgagaagggagtaagagcactcaactatccacagaaaattacaaaagggagttcaataattctttagcaaaccatccaaagctttaaagggattgaccaataatttgtcatttacctattcccaattgtcattgaccaattcctatattggtcaacccctttaaaatattaacatcaacaaatgtttcctccacctatagtaacttctgtgctcagtgggtttttatccttccaatatcaactttaatttcatacatttggagaaaggccaagagtttttaccaacccacacttaacacactatgggacccagaatcagtttgcaccagggcatcattttctgaaaaaccactttgaactgtcagttttaaactgcatacccactttcaaatgaaactgcgaaaggctaaaaaactcagtcgtctcgtttgaacggttaccgattttctaacaaatatatacacaacgcccaccaacctttccagacacacactctcagcgaaactggttttacaatttactcactcagcttaatagagctcggtcttaaccaaaggctcaggatctcaggatgcgtgcgctcggaggcagcgctttaacaattaaggatgtaaatgttgggatgagtcacccggaccttccaaacaaactctaaagcagcagtttccacttaacaagaccaccaagcatgtgcacggtgcgttcctaaatcctacccagttcctccacaggctgcctccttgccgcgtctctcaatctcagtgggagtggcgggcactgcctcttccctcctgcgcgcccggaaccttttgagtgggcacagcacgcagcccgcgcgcggcacaaccccttcccccaaccacacccggcgcgcccgagcgctcccctcgcgcggcggccggcgtgggaggcgctgcggctggaggtcacgatgggagccggcgggtggccgcctggggagacccggacatccaggggacgagctcaggcagcgctgacacgaacttcctaagccgcgcttcgggctgtggaccgccagagctgaacgcagtggcccctccccagcgccccgggtttccccaggtcggggttcgcgggcgggggtgaggcgtggccccgactgccgggccgcgataagcgccctgcgacccggctgaaagcgcacacgtgtcctgccgcgctgagccgccagcaggactggtaccaccgccctccctcggggctagggtcaccctgccgtgacacgcagggacaagccaaacactcccgcctccgggatcgaacggaatgaaccagagtgattaactacgagaatcaccaggcgctcattgggctgatcagtacctcgtctgacctagctgggtttggtcgccgtcactggccggagcgccgaagcaccggggacgctgacgcacaggttgcccagtcacaagcgctgctcgcacccagagcaagttaaatgggtggtttctggtgaatgggattctgagaaagtggatgcttgcgccccagggcctaaaaaaatcaggcactgaatctaacccaaggaaggaaaggggagaaacttactgaatgaaaatattaccatagtttaaatgttattctttacactcctgtgactgacatacttctgtgcaatattccgatggtgtggaaaggctagaaagtgattgcgcatgttcaggaaacgggccatcaggctttgtgagtgtagccatcccaacatctacctgctgcatctaccctaggaaattagtacctgcatgcagatattttctggtttgcatttacaaacaaaaatcatagtatcatttaagttgtttaaatcaacactaggaataactattaatggttcacccaatgcaggaaagttttagctaggaagcctagataagaaaattgactatacataattttttaaaaagaattttaaatataccataccgcatgctttttaaaagaattttaaggtatatattcatgatgcgcccaaacatttgggtaaaattattcttttgaattaatttctgtcagtttcaagacccttaaaggcccatatagaaatacatgttagtcatacttcattttaagacaaaattaaggccagcacggtggctcatgcctgtaatcccagcactttgggaggctgacgcaggcagatcacttgaggccaggagttcgagaccagcctggccaacatggtgaaaccctgcctctactaaaaatacaaaagttagctgggtgtggtggcgaggctgtaatcccagctactcgcgaggctaaggaacaagaagcgcttgaacacaggaggcagaggttgcaaatgacccgagatcccaccactgcactccagcctgggccacagagtgagactctgtctcaagaaaaaaaaaaaaattaagataaagttttcagacctggccgttaacgactgtttgcaaaaactgaaaaatctccgaaaaataaattttattttaattttctttttagctcacccagataagtgaaaagaataaaattttatgataccagaaaaaatgaaaacatttccagcaagatctgaaggcactacaggaggagactgaacaaaaatggagaaaacacacacgaaactgatatgaagcacatttttaaaaatggatacttagttgaatatagcattctgtaattatgcaaagtaaaaacaaatcaaaaccctatacatagaggccaggcacggtggctcacgcctgtaatcctagtactttgggaggccgaggcaggtggatcacctgatatcaggacttcaagagcagcctggccaacatggtgaaacccttctctactaaaaatacaaaaattagccgggcatggtggctcatgcctgtaatcccagctacccaggaggctgaggcaggagaattgctggagccagggaggcagaggctgcagtgagccaagatcatgtcactgcactctagcctgggtgacaacgtgagactccatctcaaaaaaaaaaaaaaaaaaaaaaaacctatacatagaaaattgctgggcaaggagtgacagctcactcctgtaatcccaacactttgggaggcagaggccaaagaattgcttgagcccaggagttcaagaccagcctgggcaacatactgagaccctatctctacaaaaaaaaaatattttaaattacactgggtgtggtggcttacacctgtaatcccagcactttgggaggaggccagaggattgcttgagcccaagaattcgagacaagcctaggcaacacagggagcccctgtctctacaaacaatttttttttttaattttttttttttttattatactctaagttttagggtacatgtgcacattgtgcaggttagttacatatgtatacatgtgccatgctggtgcgctgcacccactaacgtgtcatctagcattaggtatatctcccaatgctatccctcccccctcccccgaccccaccacagtccccagagtgtgatattccccttcctgtgtccaagtgatctcattgttcaattcccacctatgagtgagaatatgcggtgtttggtttt

SEQ ID NO: 113 - DNA, 6207 bp, Homo Sapiens
actggtctcgaactcctgacctcaggtgatccacctgcctcagcctctccaaagtgctgggattacaggtgtgagccaccacacccagcctcattcagtacattttgaataaattaacaaacctggggtgaggaaacagagctacaccaatacagccacagccccagcaagtagagctggggcactctcaacccacacactgctgtcgaatgaatgaatgaatgaatgaatgaatggggagaacaaagtggctggaactcagacctccttgcactggagtcatccctagaacagcgtttcccactgaaaacctcaaggcctcacttctccgtctccctcctcacctgccgagggctcacaatgatgctgttggattttgccccgggtttcagggcctggttgggcgtctctcctgccaggggctctgaccctgtggggcacgtggccccagccccttccagaggctgtgagatggcatattcggcgtaggtctgaggggccgcctgggccgaggtgtccacagtgggaaggctctgtgtagatcggaataagggcttggcctgtggggagaaagggagtttgcaggggactggttggggtgagcagaggacatctgaggccctgtgagttcctctcccctttctttttctttttttgagacagtcttgctctgtcacccagactggagtgtagtggcactatcttggctcattgcaacctccacctcccgggttcaagcaattctgcctcagcttcccaagtagctgggattacaggtgcccaccaccacgcccagctaattttttttttttttttttgagatggagtcttgctctgtcacccaggctggagtgcagtggcgtgatctcggctcactgcaacctccgccccccaggttcaagcgattctcctgtctcagcctcccaaatagctgggactacaggcgtgtaccaccacgctggctaatttttgtatttttagtagagacagggtttcaacatgttgtccaggctgatctcgaactcctgacctcaggtgatccgcccgcctcggcctcccaaagtcctgggattacaggtgtgagccacagcacttgacccctctcccctcttcagggctgcccatcctccttcctcctaatgtcccttccagaaggctgagagctcaaaatctgaattcagccacttctcccccactcctcagcctccactctggtcccagccaccagcgtttcacccttggaccactgaagtcacttcctcaccagctccttgcccacaccctcgccccctggaagtctgtcccctaactaagtcctcatgtccctcctctgctcagagctggtgggtggctcctgcctcagagtgaaagccaaagctgtcaccatcacccacaaggctctagatctgtccctgctccttgcctcagaaactacaccttctaccacttctccttgctttctctactccagccccaccagacttcgttctgcccttgaacacggcaggctctctctgacctcagggctttggcactggctgttccctctaccccagatgtcgccatggctcactccctcacctctttcacgtctctaccaagatgtcacctcctcagagaggccctcccttgaccttcctatctaaagtaggaaggggccaggcatggtggctcatgcctgtacatcccagcactttgggaggccgaggtgggcggatcacttgaggttcgagaccagcctgaccaacatggtgaaacccgtctctactaaaaatacaaaaattagccaggcgcgctcctgtaatcccagttactcgggaggctgaggcaggagaatcgcttgaacccaggaggcagaggttgcagtgagccgagatggtgccagtgcactccagcctgggcaaaagagcgagactctgtctcaaaaaaataaataaataaataaataaatagagtaggaaggtcctctcccccatcatgccctacatccttagcccactttccttttcttcatagccaatgctcatcacccgtcgattgttttcccttgggaaggagatttcaatattgccaggtccttccatttaccaaaatatgtctaaagtgtagatttttttaagattgcaaaacctggcgattcttaaacacgagcaataaattcatgtcttgaaaaatcagggtgctggcctcgtaaaacacatcaggggctacctgctgaatgccagtgtctggcctctgccttagccctctcttagaaccacccatccatttcacagatggggaaactgggacctggggaggaccaaggactgtttccccaagtcgtccgtggcccccaaatccactaacccacaccctggtcccacaggccccatcctatcctcttcgtcctaacagcccccagcctcccaggggccccgcatctccttgtcctaccactccaggagggacctcatcctcgtcgaggggtatcacaaatttcttccttgctggcggccctgagggctggggcaccccctctttgtccttcccagggtccatctggagcctgaaagggaaggtgccaggagcgagtgagccactggcgtctacgttctcatcccgcagcaggaaccccccactcacagccgtcccccacaaaactccgagagctccatagcgtcaggtccccaacacccagcgctagaggctctgtaacgccacgcccctttgacctccaccttcggctcgccccgccccttacaggtccacaagtcccatcgctccgcccctcgcccccaccggattctattggctccgtccccaccatcccccgccttccgttcgtccggcccccgaggctagcatctggacgccctccccacgcctggccttgtccatctctcagactcggcaatgattggcttccgcggcgccaatctccacccgcagtctccgcctcccgcacctgtggtccgggcctcacggtttcagcgccgcgaggcctcacctgctggtcttggagcctcaagggaaagactgcagagggatcgaggcggcccactgccagcacggccagcgtggcccagggctcgcagcacttccggcctctctggccccgctccccaggagagtagagcatagagcagggcgatctctgtacaactctctatggttctggaggaccgcggaggtcgtgggaggagagagatgtggcctgaggatctggctcccaaactgttaagtttcaaagcccttactgagcgcttctgtgtgcccagaatcctggcagggctcagtggagaacagatcgcaggagatccaacttggtccctcctctcagtaaggagagacttaagtttgaatccaactcagacattgacttggcttcagtttcctcattcattcatttattccacacctattccccccacgcgcttcctctcttcccggtcctgtgcgagtccgtgctggtgacacagcagtgaccaacgacagccccgtgttgtcctcccggagcttacggttcagtaagggacacagacacgttcccagtgctgacccagaatgggcaggtctgggatgggagatcccgggagagccgtgggatgggggtcagggggagcgcctgactcagccccggagtccggaagggcttcctggaggaagggacatctgagcaggggcctggctgatgagttagtattagtcacttcctgaaaggatagtatcacactgttctaacttgcagctctctgattactaaggaaatggaatgttttttgtgaaagtattggtcttgtaaattttgtcttctgtgaattgcttgctcatattccttgtccatttttaaaatgggttgtatggcttttttattactattaatttctaggggtactttatggattctgattctaatccttagttacccatattgcaaacatttcctcctagtttctactttgggctttaactttagttatttttggcacagaagttatttgtgtttatgcgcaactatttatcaatctgttccgttctgacttttgcttttggtgtgttaagagccctgccataacccagggtcataatgataaattcttttttttcttttttttttttttttcgagacggagtttcgctcttattacccaggctggagtgcaatggcgcgatctcagttcactgcacctccccctcccgggttcaagcgattctcctgcctccttagtagctgggattacaggcatgtgccaccatgcccggctaattttttttttttttttttttttttgtatttttagtagagacggggtttcaccatgttggccaggctggtctcaaactcctgacctcagctgatcctgaggtcactttgtgacctcccaaagtgctgggattacagtgcacggctataatgatatattctatcatttcttttatctacgtaaaagataaaagccccgtgttgtcctcccagagcttacagttcagtgagggacacagacacggtcccaaacagtaatgacctagaatgagcaggtcatctggctttaatctatgtaagatttatttatttatttattattttttgagatggagttttgctcttgttgcctaggctggagtgcaatggagcaatctaggctcactgcaacctccgccacccacattcaagcagttctcctgcctcagcctcccaagtagctgggattacaggctaacttttgtatttttagtagagacggagtttcaccatgttggccctgctggtctcgaactcttgacctcaagtgatctgcccacctcagcctcccaaagtgctgggattacaagcatgagccacggtgcctggccaagatttatttttgaaagtgcaccgaggtcgttgtttatgagtgatgtaaccaattgtctcaagttgaccaaaggtagatcttttctccactgttctgaaattctacctttatcacataccaaattcccatacacacacgtctatttctgacatttctgttatgttcattgatctttttatttattcttgcctgcatgtacatgacatccctctgtttctttgttcacatcagtctttcatctatgggtgtctatctgtgtctacattttcccattttacttaattttttttttctgggcatggtggctaatgtctgtaatcctagcactttgggaggcctaggcgggtggatcacctgaggtcaggagttcgagaccagcctgaccaacatggagaaatcctatctctattaaaaatacaaaattagagtcccggtgcagtggctcacacctgtaatcccagcactttgggaggccgagacaggcggatcacgaggtcaggagttcaagaccagcctggccaatatggtgaaaccccgtctttactaaaaatactaaaattagttgggcgtggtagcgcacacctgtagtcccagctactcaggaggctgaggcagaagaatcgcttgaacctgggaggcggaggctgcagtgagccgagattgtgccactggactccagcctgggtgacagagccagactctgtctcaaaaaaaaaaaaaaaaaaaaaaattagccgggcatggtggcacatgcctgtaatcccagctactcaggaggctgaggcaggagaattgcttgaaccctggaggcaaaggttgcggtgagctgagatcgcaccattgcactccagcctgggcaacaagagtgaaactccatctcaaaaaaaaaaaaaaaattttttttgagacaaggtcttgatctattgcccagatttattgtcctgaaccttgcttacctcaaatgcctttttcttttcaccctaacaattgaaatccagaattctaggctgggtgcggtggctcatgcctataatcccaacaatttaggaggccaaggtgggcagattgcttgggctccagagttcaagaccagccagggcaacatgacaaaaccccatctctacaaaaaaacacaaaaattggctgggcaaggtagctcatgcctgtaatcccagcactttggaaagctgaggcaggagaatcacttgaacccgggaggtggaagttgtagtgagccaagatcacgcaattgtactccagcctgggcgacaaaagcgaaactccatctaaaaaaaaaaaaaaaaaaaaaaagctatgtgtgttggtgtgcacctgtagtcccagatactcaggaggctgaggagggaga

SEQ ID NO: 114 - DNA, 6229 bp, Homo Sapiens
gactgagccaccagcctgacacccagaaggcgagaagccatctcggtccttgctggaaggtggagacatcgcttgtgttctggtgtcaatcggggctggatggggcaagaatgggggacaagggtggctttgtaaatagcagcaaatccctgcaactaatttattactttttttttctttttttttttttttttttgagacagagtctcactctgttgcccgggctggagtgcagcggcgtgatctcagctcactgcaacctccgcctcccaagttcaagcgattgtcctgcctcagcttcccaagtggctgggattacaggcgcccaccactatgcccagctaattttttgtatttttagtacagacggggtttcaccatgttggtcaggctggtctcgaactcctgacctcatgatttgcctgcctttgcctcccaaagtgctgggattacaggcgtgagccactgggcccagcctaatttattactttttataagcgatagccgtactgagccgccccctgaaggcggctgccaggtcttgccccaggcacctgggactctgtttgcaggccctgccctctgggctgagaaggatgcactttggacaagtcatctgtgtttgtgttttccagtttttctgtactttttaagtgttttgtgttacctggtctcattcccctccccacacctacccatttgaggggatggagttgaagtcacctggtcacctgtaccggcccagttcggctacaacctggagtgtccgtaaacaattcctctcacccacaaaacaatgtaatcccagcgatggactggattctgaaggccacttcccaccatcatagctgccatgcccaggcagtgcctgctctatatatagagtctgcctccaatcctgctggcttcagcctggagaagggatatgggagctggagctttgatggatgaataggtgttcaccggatctgggcagaggggtcatccgctccccaggtgggcactgataaaggaaggtacaggcctcacctggaactgccaaggcagcctccagaaatgctcggctgtctcggggcacgctccagtatgccagtcctgcgggattacgtccagctacttccagaaacactcagtgtcccctcccctcaggctctgccttggcctggccttgtccagtctaccctggacaagatgccgtgtgtttgaggcccagcagagtaagcccttggccgtgatgtgtctgaaacacctgttaggggttccctccatatgtcagagcctctctgggatgaagttcaagccagaaaacccagtcgaggctcaagtttgaatttcagcttcactgtgtggctctgggaaaatggctttcccactctgtgcctcagtttccttgtgtttacaagactaatcccattgactgtttattaagcacctactgtgtgccaagcgcttttacgtggcttctccctcagccagccttgagaaggctggaggtggtgtcatcacctccattttacagacaaagcagctgagaccccagcgaggggcggagacctgtcccacgatcacccagcaggagtcgtggcagaacggagcatcagccagaccctgttgtgggcgttgtcatcaagggagcttgaatggagggtctggtgtcagatacagccgactccagccccagctcatcccccatgatgctgtgtgacccactgggcactctggtgagggagctttccagacatcaacagcccactctgcttccctttctgagtcccctgtccagcactgcctagtgttggagggtagaccaaggctgtgcatgattcaccccctccttccatcctggagctggcagtgaataaaagcccgtatttacaaagatgagctccaacgtctggatttgtgaggggctgagaaaggaggaagggaagagtggggaggggagcggagtgaaatagacccatggctcaaagtcattgcaagtgggttttgaggactgcatagcagttcgctgttgagattcttcctgatgccatcgctggtaccagcctcctgctaccctctccctgcgagtactccatcatagccctgcctttaaaagcttcctccagacatctgggccctgagctatgttttttatttttatgtttttgagacaaggtctcgctctgtaacccaggttggagtacagtggcgcaatcacggcacattgcagcctcgacctcctgggcgccctgggctatgttaataaaataaataagcggcggggcgcggtggctcacgcctgtaatcccagcactttggaaggccaaggcgggcggatctcctgaggtcgggagttccaaaccaccctgaccaacatggagaaaccccgtctctactaaaaatacaaaattagccgggcgtggtggcgcatgcctgtaatcccagctgctcgggaggctgaggcaggagaatcgcttgaactcgggaggtggaggttgcggcgagccgagatagcgccattgcactccagcctgggcaacaagagcgaaactccgtctcaaaaaataataacaaaataagcaatcgtcgcgtcctttctatcctggtcttagcttgcgctctgccataaaactccctctagccgaacccggcccagccctagagcaatccgttacttccggggcgctcagccggcatgcaaacactcttggctacagccccatctccgagtgcgttcggctatttccggaaaccgtcggcatctaggctcaagtccgctaaattctagtgcccgtaggggtcgagatcgttggctgtttccggacgctctgggttgccatggaaactccttcaaccctggctttctccgacttctgctttttgcggcaggccctttccccactctactgccccctgtttgctgagcttgagaacgcctcatttgtcccctggaaccatctatgcttcagtaattcccataagctggcggtcgcctctgggtctaaactcccaaggcctccattgggcactgagcacattcggttatttccagaaacgctccgcggtcttggggatcagcctcagttgtgccagtgcggccgtagagagtgttcggccatttccgaaagcgctcgggcgtctctaagcccagccgagcccagtctcggatccctcgccgacccgattgcactcggctacctctggaaacgctcggctgtctcgggggcaccctctagtccaccagtcccgcgggattacgttcggctacttccggaaacactcgggtgcccccttacctcaggctccgcctcggcctcggttcatccgcccggctcgaatgcgctcgggcatttccgccgggggcgggccaggccgctcggaaccgtggcggcggcggaggcggggatcccgcggctgcggcgacggtggccgcggtggagccacggggcgggcttggcttggtgtgacggcggctgcggcggcggtggcggccgcgaccaggtgagtcctgactggccctcgtggcgggggcggctgggagtgtgcttaaatgcggggcgcccgggggcagtgccgggccccggtggaagccagaacgcaagcgccaggctgcgtcgggccccgcgggaactgggggggccgcaggcaagggggggcctcgggctcggctccgcagcggtgcagcctccttgggacggtcggggcagaatggggagagactccccgcgtccaagataccggactggagccgaggccccaaatgaagggaggccctgcctggaatggggcttcgaatagtaccgaggggcgcccaggcattgtgcggggcagaatggggtgcgggagggccgggggtcgaacccacttccggtcccctagccgggtggccgggtccacgcagacccaagtgcgcgtctgtgtgagcgctcaggccctgccttcacccgcggagcccccagccctgcctgccccgcccctcccgcctcccggattcggggagcgctgctcccggggcgcgcacaccggggcgtgggggcgggctggcaggcagatccaggcggttttctgggcatcccctctcggggcctcagtttccccacctgtagaatgagggtaacagaggcctaggaatgggtaaattgggcacccgagaatgtggcgcccctccgccctgctcggacacctcttggggttccccgtgactgaaggatgctcagagcctccacctgacactcgggcctcttggtggatagcacctatccttatagccaccctgaatccttgacaagcaacttaacccactgccaaggctttgcatgtgccgttccgtctgcctgtcgcgccttcctatccgctgtgatgatccattctctagaacagcacgtccatcccccgaccctagccctgtccatcacagggcgtctgaacccgcagggctaggctgggaatgtgtgcctatctccgcctccccaggctgggactcctggggaataatcaatgccctgctgccggcagcctcccctcctcctcagctgcagtacccccaccttctcctggctccctgtccctgcctggggctaaggttccttctaagcacctccccatctgcattttgtgcctactctgggccccaggctggagctacctgccagcccactcactcctcctctgcagagactggaggtccatttgcttggactcacctcgaggcctttgcttgtgtagaggcctcttcctggactttgttccctacctcttagttcagctggcctgacccctctatggagctcccaaagcacccggagtggcctccattgcgtcctccctgccctaggtatctggccacctggctgctgccccctcatgtccaactgggccaagtcggcagatctaggtgtaagtcctggcttcctcctggcctactgcacggccctagatacctccctgctctgagcctcagtttccccatctgtaacaggggtgatgaaaagcctgtttactggccgggcgcggtggctcacacctgtaatcccaacactttggaaggcagaggcaggaggactgcttcagcccaggagtttgcgaccaacctgggcaacatagcaagaccccacctctattggaaaaaaaaaaaaaaaggctgggcaaggtggctcatgcctgtaatcccagcactttgggaggccaaggcgagcagatcacttgaggtcaggagttcaagaccagcctggccaacatggtgaaacctcgtctctactaaaaatacaaaaattagctgggtgtggtggcctgctactcgggaggctgaggcaggagaattgcttgaacctgggagacaggttgcagtgagctgagatcacaccactgcactccagcctgggtgacagagcaagactctatctcaaaaaaaaaaaaaaaaaaaactgatttactgagcatgtagtatacctggggcaggttcttgggaactctactcccagcagctccaagggaaggctgtcagtatacccattttacagatagagaagctgaggccctgagagggaccggccccaaggtcacccagtgattcagggaattccaaatcaggatttgggcccatctccgtgttgggggtgagaggagttggcctggctaacgctgccctatccctgtctccctaggtcggcgtcctcagctggccgagcatggtggcagcctgcacccttggctcccttgtctggtgcagccagcagagccgccagccttgggcgcccatggccctccgtgtgagggcgtgagcggcctgccccagcctcacctgctgatggaggactcaatggcccagtgacctgacaccacaccaccaactccctcccaccagctgacgaatggtggacccagtgacgagtggcccttgtaagggtcatggaataatttgaagcgaggcatgagcggcccctgtggtcgcctgtgactgctggagatagaggtcccagcaccccaagccaacccagcggaccctcccagccctgcttcaaccaatggggccagtggggctccaagcagccacctaaccatccagaccccaccccactcacgcggccatggcgggccctgagggcttccagtaccgcgctctgtacccgttccgccgggagcggccggaggacctggagctgctgcccggcgacgtgctggtagtgagccgggcggccttgcaggcgctgggcgtggccgagggtggcgagcgctgcccacagag

SEQ ID NO: 115 - DNA, 6148 bp, Homo Sapiens
aaagatattggggtcaaccctagtaaggaaaacaaaaagatcttcaagtaccatctccctgtaaactttcaagtactatctccttggtaaactttccaagtcaagataatgtactggcaaaaggaaaacaattacagtccggatatatatcttgcatataattgtgcattaagtcataaaccttggaaaactagtaacttagtaataagttgctattttaattataaaatattttcatgttttagacaaccacccccggaatgtttgtattcgtttatacatattttgcaagtgatactcaagttctgaagactaatcttcatttcctacaccatctttattagactcttccaccttcgttttcctaagtaaatacataacctaaaccaatgagtttcactcatttgtcagcttcaaccactgacaaaacccagtggttgcctagtgatgtatagttctactaaaagacatatatgaccatgctttaccaaatacggaacacatgtctaaactgttgagacaactgccaatgtattaactacaaaaagccattattttttactttagcctcaactaaaatcaaagtgtgaacactttattatggctagaaattacccaatatagatgcataggtttcactgttgactttctatttggaaacttcatcaattgcaaactaccaggctttcaaccaaaatgccacattggtgaaatgagttggttttattttcataacaacattattttgatggaagaaatgtgagcatcccagctttgacttgtgggtaagcatttcctctgctttcagaacataaacagtaaataccggtattggaaaaacctggccccaacgagattctttatctctaggctaactgtagattcccgggaaatcccaaacaagggatggtgaccccgcctcggcgtcagggtcaacacagcaaccagctaggcttcaactttgggctctgaagggccccaccggcatcatggctgatgcggaccgatgcgccggaggaggtggacaaggaagaggctggtctgtttacttgcagccagagctgccgccgccgccagcagcgacagcatcactggatcagccaaacccagcatcttccgcacatttctattcttagcacacaactcccaagcggatcaaaaccccactactattaaaaacacagacaagcacgttacccacctcccacacacacacccccccccccaccccaccagtgccgtcttttcctgcgcgccagtggcggggaagggtgggggaaggaaggagaccccggggacgcctgtgcatcctcgccttcaccccaccccacgcgcagacagcctcagcgccagggcgcgcggcagacggctccctccccccaacccaaacacactgacaccggcgctccacgcgttatataacctcgccgccgcccccggtccaggcgggcgccccctccccacgccgcgcggcccgggcggggaggggcgaggggaaggagcgagagttgcgcagacagcaggcgccgggccggggcagcccagacacagacggtaccgctaggccgggaacacccctcccccggcccgctgcgcaccgccgccccccagctttccccggaaagcggggggtgtcggtgtcaaccgcgctgggcatcccccggcctccacacccacacccgaagcctccggtgacccagcccccgcccacgcccccggcgcggtgacaacccagaagcccccgcctcaccccaccccgccgccatcccccgcctgagggaggcagggagggcggaccggggcccggggcccggagggagtggaggccaggcggggagggggctagagttgggggcggtggctgttacctgcaacggcggcggcggcggtggcggccccgcagctgctcgggcggcggcggaggatggagccgggggggggcggggggaggagagggggcgactcgggggtcccccctccctcctcctcccctcctgtcctccccccaccccacagagcctctggcctcctggagcccggtgcggccggcgggagggcaagcgaagggctgcaggggagggagggagggagccggccgggccgggccgcggagctggagcgggaggcggcggcggcggcggcggcggcgggagggggagggaggagagagggcggcggcggggagaggaggaggcggagactctacatgggaatcggatatcggctacaaattcatcaccagaaaacaccgctcgggcgggggccgggtcacgccggcggggcggcggctctgggccccggggcgcgcccggcgcggggaggggttctgcggcctcctcccgggctgcgcctcgctgaggggaccccccgccgcctccccgccccctccttcctcccgctcggggccgccgccgatcggttctcgccgtcgccgcggggcttgttgttgactttgaggaaaactcctgacgtcaggggctggctctcggcgactggcgggagcggcttccccgcgtccccggccctgcccgccgcctctgctcccctccctgcccggccctcgtcctcaggcttccccgcgcccccaaaccagcggtgccccgcgccccctctcctctcgcgagaacatccccctagccagccagagccgggagcgggggcagtcgctcccgggcgggaagttctgggtttccccctcgcccgcgtggcccttggcgggcacccgaggcccgggagcggaggctcctcgcccagccgcttcctcggcgcatccgcccacccgccctggccgcggacgcgcgcgccgccaggccccgggcgtctcctccagtccgccgcggccccttggggagatgggcccggcgcgagggctcgcacctggaagcccacgaagtgggcggtgcccaatgaggtagggaccggagagcgcggagcagtccagaagccgaccccaccccctgcacctcggggaagagggaacccgggtcagcccgtagcaagaatcattcctgactatcccaggagaccacggcagaccaaaaacacctctctgaacagccttccgcaccgctcgctgcaagcattcgtccacacacggtacacagattgcgggcggatcgtaattcactcttgaaatcacaccctttttagggatattcgttttcaatgactttgggaaagccacgaggtactacatttactacgaagagaccgtttctttattttgaagtcagtgactcctgagactgcattggggacaacttttttgcacaatgaccatattttaccatgcagcgcacttcagaaaattataaaagtttacaagttttatcgcttctggaaacacctgggcagcatccctattatcccgccacgtggctctagccttgttgatgtacctgttactttctcccactgcaacatttttgttaatgtctgtggcttctttctgcagaagagttcctcctcctgacatgcacttcattctctgcttttctatgtcttgacaactctcttatggtagtcattttcttatactgtagccccctggtatttatgtactgtgtggtattaatatttatacttccaggttcacatcttttatgaactgtgcatctgttgggattgtggacaggagtaggaaaccaaataaaagggttttttaaaaaagtcagttttctccgtttgtaagggaaacttgtctccctgaccaccctggagcaaaatttgccattttaagataacacagtccgtctgagagaaagtcctgcaccatgcctttccccttttcccatatttcccagcatgctatgagctgatgaataaacagactttgtcctattttcgttgtatctataaaatatacataatgtattcccataattatcagacctctcacagtcactattggtaaaattattgggttacaggtttcttgctgtaaaacacaaaaataggtcatatttttattccatagtaccccaacttgctttttatttttaagaaaatagtcccttatgacaccagcactaaaaagagtgtctgaaactttaaatacttaacttttgagagtcagagtatccggaattactgaattactagatatctcttatcagtgagatgttcatttgttcccaaatttaacatcaatatatttacaagaactgaatgtgtcttatgagccatactacctcaaaatatttctcccagtctggtcagattgcattaaatcttaggtggattaaaccctaaaattcagtatgtgagaatggattatatactctcggcttcatgtatttgaagaattataagtttttatttctgttcaatttttgcttgtggactatagtagtttcataagtttccataataaaagcatgtttgattttgttattgaattactattgattagggatattatttatttaaataacgttgttctttctcttagactatgccggtatgaatttggtagaatctgccgattgtggtatgtcggtactccatacagagtgtgtggcagatttcttctctattttgttatcacatccagtaatatggagtgcagccagcatgttcatccctgggaatgtccctcctaaattttgcaaagaaagccttcattctttattacaccaaatattcttaagattaacatttctcagtattagttatttattcattttaagaaaaatgttcattcttctttactaccaatgactaagtttgatactgagctatttcttggtacttcccccatttcttgggagtaactaaaactggaaggatatttagaatttcagagcatctaatgtcttagtccattcaggctgctataacaaaataccatcaactaggtagcttataaagaacagaaatttatttctaacagttctggaggctgggaagtccaagatcatggcaccagcagatttggtgtctaaagagggttccgtttcctggtttgtaggtggtgacttcttgctgtgtcttcacattttagaaagagtgagggaactctcttggacctctttttctttttctttgtttttttttttttttttttttttttttttttttttttttttagagacagtgtctcattctgtcacccagactggagtgcagtggcatgatcatagctcactgtagcctggaactcctaggctcaggcaaccctcctgcctcagcctcctgagtagctgagactaccagcatgagttaatgttcccagccatcttgagcctcttttataagggcactaatcccattcttgagggctcaaaccctcatgacttaatcacctcccaaaggccccatctactaacacactttggaagttaggatttcaatctatgaatttggggaaacacaaaaattcagaccagggcatcacataacaaaaattaagttactgctcttctgtcttaatagaaagggtgtgtcatcctaggagagggcatggaacaaagcagacacagaatacctgtttgtggaagaaatacatgttctaatgttctaatgacggctctaataaatctgtgtactatgtacagtttatatagtattttcctcttgggatgtaacgtgatttattggaaagaacataaaagtgctttggagacttgcagaccagagttcaaatcctctctctgcagagtttgtctcatctcaggcaagttacttaatttttctaagccttatatttccttatttgtgaaatggcagttacaactacttcaacaacttatgtgaattaaattttatgaaatattagtatctaaaacacagtgagtggtcagcaagctaagattcctttaccataaatgtgaatatatttatgttaaactaacaatagctgctacaaacaaatacaaaaatctatattggcactctctgccacagttggttctgaaataaccacgttaagtctacagctgtaattagtgaatatattctagatgattaatagaacaatttctaaaggagtatagcttaaatttctgttggttaagcctcccaatctgtgatatttttcttacagcatcccaaactgactaaggcacacagttcattacaatagttatcagtactaattgtctttttctccctttccctgatgtctgtctgtctgtctgtctgtttttct

SEQ ID NO: 116 - DNA, 6186 bp, Homo Sapiens
tccacctgcctcggccacccaaagtgctgggattacaggcatgagccactgcacccagccaaattgttagttttccaaagtagttaagccaatttatatacctcccaacagagcgtgccttttccagttaatccacgtctttgtctgcactcgtaattttcagtctttgtttccagtcactctggtgggtgtatgatggtatttcactggggttttatttgcatttccctgatgactaatgaagttgagcatgttttcatgtgcttgctcaataaatatttgttgaaaggatgaataaagagtgaatgaataaaacatggaaagaaatccaactctgtcttgtgccctgcctaaaacccaccagtggttcccactgcccctcctttggccgacgggtacctgcctgccctggctccttctgaccccacctgctccggatggatttcttttgcttcttctctgggttcctgccatccaggctgtcttcagtttcctccaaggaccctccctgcttcataactttgctataaactgttttcttctgcccagaacacaacccaggcccaaggaacccagacgcgttccttgtatctcagtttgaaagcctcttcctccaggaagccttctctgacttccaccccccagcaagggtggtataaattgctaacttaggcccacttttgcccactttttttgtttgtgtttttgagatggagtcacactttgtcgtccaggctggagtgcagtggggccatctcagctcactgcaacctccatctcctgggttcaagtgattctcctgccttagcttcctgaatagctgggattacaggcacccaccaccatgtccagctaatttttgtatttttacatttatttatttatttatttgagatagagtattgctttgtcgcccaggctggagtgcagtggcatgatcttggcttactgcaacctccgcctcccaggttcaagtgattctcctgcctcagcctcccgagtagctgagcctgcaggtgcctgccaccacacccagctaatttttgtatttttagtagagatggggttttaccatcggtcagactggtctcgaactcctgaccttaagtgatctgcctgccttggcctcccaaagtgctgggattacaggcgtgagccaccatgcccggccaccactttttttttctagctgtgaccatagttgtacatatctccccttccctggcttttttttttgttttttttttcctgagacaggatctcgctgtgttacccaggctgcagtgcagcggtgcaatcatagctcactgtagccttgaactcctgggccaaatgagcctcccacctcggcctcccaaagcactgagattacatgcgtgagtcactacttctggcctgtaaataccctttcaaaaatataatatttgattaacatctgccatcttaccataagaaacacttaaaaaaatcccaatccaaaaaaattccaatcctttaagctatataagagtagcaattttatcttgttcctagcaagacatctggcatatagtaaatgctcaataaatatttgttgacagtataaaggtcaagcaacagcataactggcattattacatgaaagtaattatcccttagaaactcattcacccttgggggacccgggccaataaaaaaatcacagaaaacaatcctatctaccttcctccttcctccttccctcgctaggtcctttgattggggggaggtctcaaatgcacacactgtttctgttttatttggtgcagctgttgtgtgcatgtgttatggaaacccacatcaggcaggagattaaggaggagaggagaaaagaaaggcatcgctggtatcacagtgaaatttacactctgcggcctcgccctagctcctctgtctctacctgtctgcctatgaaacagttcaaaactaatatggcgcaatggatggtattatagacttcccacctccctggccagacttcttgggttcaaagtttggcttaatcacttaccatctaaataatccctgacaatgtactctgtctttctgggccttagtggcctcatctgcaaaatggggataatactacttcttacctcatggggttgtgaggattgcacaagttaatttgtgtaaattgctaagaacacagccttaggaagccttgtcactgtgaatgcatattaattttttttattattattttttgagacagagtcttgctctgttgcccaggctggagtgcagtggtgtgatctaagctcatttcaacctccgcctcccaggttcaagtgattctcctgtttcagcttctcaagtagctgggactacaggtgcccgccaccatgcccggctaatttttgtgtttttagtagagacagggttttgctatgttggctaggctggtcttgaactcctgaccttatgtgatcggcccgcctcggcttcccaaagtgcttgattacaagcacgagccaccatgcctggcctacgattatcatgtctccaggcttcagtttccttacctctgaggtgaggatcaataacctggttatttctaagtgatgcttaaagaggttgagaagaagcaaaggcgctctgcacacaggtgaggtcaacagctgttagtgatggagactggcgccgtctgggtcatcagtgctccggaatcaggctgctcacgggtttgaatctcacttccactttcactccttattaactgtgtgacctcgggcaagtcacttcgcctttctgaacctcagtttccccatctgtaaaaggtaggtgaataacagtattcacctccttctgtgtgactcagctttggagtcagcggaccgggttcaaatcccagccctgcaagtgattagccaggtgaccctgggcagagggaatcactcaacctctctgcacctgggtttcttccttcatgaacgtggagactttacaggatgaaatgagggcacagttaaggcgcccggtacactccaggcaggtagggggctccgttcacgttattttcccctggtgacggatactgtccttaaacagcatttgaaaagtggtcgcagggtgtgtggccccaaagatcccaggcgcttccggaaggcgagccaacgctccccaggcccgtccgcgagcgggtgggcctaagccttggaggatctggggtgggggtggcgcggggtccaggcccggggcgccgagaggtggctggtccggctgcccacgccgagacgcgcgaggtgagcgggcgccggggcggggcggggtggggcggggccgccgcatccccgtgacgcgcgggccaaccaggcggcgttgcggccccggccccggctccctgcgccgccgccgccgccgccgccagcgctagcgccagcagccgggcccgatcacccgccgcccggtgcccgccgccgcccgcgccagcaaccgggcccgatcacccgccgcccggtgcccgccgccgcccgcgccaccggcatggcgctccggggcttctgcagcgccgatggctccgacccgctctgggtacgtgccgggggccgcgtgaggccggcgggacggagggaggccggcggggagggaaagcaccgggcccgcagccgcccggggcaccccgctccccgctctgctgccggcctcgggggcccgggaccctcacgtcgcccgcggcccagcccctttcgggggtgcaaggcatgggggaaacttgggtgactcagttcctgcggagcagagcgtggggggccgcgtgcccagccctggggttttggagggtcgggtcgggtcagagccgccgtgaggaggccttcctgttttggggttcccgtctgtaaaaacaaccttccagggaaggggacgctagagatggggggcgggaagaggggtgtctctctgcttctgttttcccatcttttttgtggttagggtccccccttttcacgaaaaatactccgtgaccaacggggtgagctggggaggggcttagattgtagaaagggactttcattgtctccccaaagttgtcgtacaagccacattactcttctgtggttacctagctttgttttttttgttctttctacttagatactgcgggggaagtttgggggaaccagggaagaagggggatgtccacccttgatgtgccctacctgaccctcggctcggggcagacttggggtgcagctgaggacgcccaggaccctggtagctgtggtcctgccctcccttccctgcaacacgtggagctcctctctggggatgccccttagatttaaccccggcaagttttcttctgtaacgtggcctgcggagcctgactgggtgtctggagtccacttgctgtggtttaagccccagtcttttgggcttcagcttctccgtaatgcgatttgcctctttgttccaggaaggcaggcacttctgtctcgtgctgtcttgattgttggtgaacgcagtaggcaaatctggacacgactgtttctctctcctcttttgtttaggaatcaggagaaacagccttggttcttaggagctggtgatcagcttccaaaaatactttcttgtcctgttttgccggcctttcctcgagggttgcatttggagtgttgaaaagtcatcctccagggccccattggagggtttggttttgtttgtttgttttttttagtagggtatcattgtgtttaataacctaccacactttgatatatctcccattttaagccagtggggttggagagtaaccccaggggtggaaatagaacacagactttgccttgagggtctgggggtgattggagcctctttgcagatggactttctttagcaggggaaaacctgtggcttccttgttgccaggtgtagtaacagcaagattattttttgcaaagattcacatggtgatctgggtttgtgttgctgtgaattccagaatattctcttgtttattttcttctgaattgaggagggggcaaaacagggtgaacatccatgaggttttgtatcaggacgtattttattgatggcaattggtagttgatggctaatgagtatgtttggggtgcgctttgtttatcttaagaaactcattcacgaagtccagttgtaatattttttaaaatttttattttcttttttctttttattttttccttcgttaaggactttctgccacagaaattgccaggtggttgggttttgcttgggggtaattgtagctgatctctgcctctggtaggtaccccatccccgtgtttgaccttgcgtatttctgctgtctggattccaagacttgttggaggtgccttggaaccagaatttgagaggaggcaactggggcctgagtgggaaaattgaaatataattaactgaaagctagaaagtaggtagttgttgcttttttcttttcttttttttttctttttcttttttgagacagagtcttgctctgtcacccaggctggagtgcagtggcacgatctcagcttactgcaatctctgcctccccggctcaagtggtcctcctaactcagcctcccaagtacctgggactataggcgtgtgccaccacgcccagctaatttttgtattttttatagagacagattcgcactatattgcccaggctggtctcctactcctgggctcaagcgatcctcctgccttggcctccaaaagtgttgagattacaggcatgggcctctgtgcccggctgtttttgtgtttttcaaggtagcgtgtccgaggccaggagcgactggcctcccaggcagtcagataactgtgtgaccttgagcaagccactttccctctgtgtgcctcactttcctcatctctaaaattggacaggagccaaaaatgtggcagccttcttgggttgttgcgaagggtcaatgagttaatcttgtaagtggctcagcttgtgccctgcacggagataaacaatggttagtattaaatattattttttccaaagatgaagttgtgtgttttaagctccttgttcttcctttggattccccttttcttcagctggtggagatgggattgggctgtgaaaaggcagtgaggcacccgtgcctggctcctgttgtgaccaaggtcatgtgcttagaagtcaaggtcagtgggcctcgggtgactctgtcagagctttgt

SEQ ID NO: 117 - DNA, 6209 bp, Homo Sapiens
gtgcctgtaatcccagctactcgggaggctgaggcaagagaatccttgaacccaggaggcggaggttgaagtgagccaagatcatgccactgcactccagcctgggcaacagagcaagaccccgtctcaaaaagtaaaaataaaaataaaaataaacatacagaaggcacagcaaaaacatggcctgatcatcttacgtcgccaccgctgcgtaggcggtctgtcactggctgagccatcgccctgaggtggctgtacacataggcgcaaacacacacacgcttcgtcttcatcgcttgtttctctggagaaccataacacactcgcatttctgaaacccccacgtgctagctttctgggaatatggatttcaagtgccctccagggcagaaagtagtcactggagggcacagctgtgtgtggctggtgtggctggcacggctcccatctgcccagaagctgggccctttctcaggacctagagtccctggtggggatgagggacagagcctggagctaatcagaatgcagagacccggctgccttcccaacctgcctcctgtttccagggggaccttccccaccactccccgacctccccgaccccgcagtgctcaccttcctggccatgatgaggcccgagggtctgtgctggactttggtgaccaccccgccgttgcccgcgcccagctctgagatcctttcgaagtcatcgtctttgagttcgccgaccttggctttctgggtgagaaaggcttccagccgcttcttctgctgctcgtcaagttccagctcctccagcttcttctgcaggtccaccaggtttgccctgcagagaccccccagggtaggggttagctacctagggagactccatctggccgtttgctatgtggccgtggtgcatcggcccccaggaggacacagactggattcctgcacttgaggggttcatggtgtagaaggaaaggatccatgctgtgtacccccatagacacaccaatgaccagaatccagggcggctccccgggaactgaggacgctgccttgatcctgtctcaacaagtctagcagacctcaggacctcaaggataagctgcagctcaaaggacccaggaagcctccgtctttttcttttctttttcttttttttttgagacggagtctccctctgttgctcaggctggaatgcagtggcgcgatctcggctccctgcaaccttggcctcccgggttcaagagattctcctgcctcagcctcccaagtagctgagattacaggctcccgccaccatgcccggctaatttttgtattttcagtagagacagggtttcgccatgttggtcaggctggtctccaactcctgacattgagtgatccgcctgcctcagcctctcaaagtgctgggattataggcgtgagccattgcacgcggccgggagacctccttcctaacgcacgagctccggaccatgtcgggaggagacgaggaagctgggatcgggtgaacggagcccgggccaagatgtctgtctttgcaggagatagaggaacaagcgttctgagcagcctcagagcacagaatgagaaccaagagtagagggcagaaggctcagcacaaaagctgcatcaggtaggcacggtggtgcacgtttgcagtcccagctacttgggaggctgagacacgagaactgcttgaacccgggagggggagattgcagtgaactgagatcttgccactgcactccagcctgggcagcagagggaggctctgtctcaaaacaaaacaaaccaaaaaacaaaaaaaacaaaaaataagcatgaccagcctgggcaacaaagtgagacctatagccgagcacagtggctcatgcctgtagttctagttactcaggaggctgagcccaggaggtcgagactgcagtgagccatgatcgtgacaatgtactccagcctgggtgacagagcaagaccttgtttctacacaataaaaaatttctaacaatttaaacaagcaagtacattgcactttattgggtgattcaaggaatcttcagaggaaatttcgacagtaagctattttcacaaatgccttgactcagaaccagatcctggagtaacagacaactaagcgcaatgcacacaggaacccattgctgtgcacaagcaatggaatgtaaaccatgcgcacaaattaaaatcttctagtacccatgtttaaaaagaacaggtgaactcacttcatttatttagagacagggtcctgctctacctcccaagctggggtgcagcggcacgattacagctcactgcagcctccaactcctgtcctcaagtgatcctcccacctcagccttcctagtagctaggatcacaggtgtgagccatcatgtctggctctttttaattaattaatttttattattattattattttctgagacaaagtctcattctgtcgcccaggctggagtacagtggtgtgatcttggctcactgcaacctccacctcacgggttcaagcaattctcctgcctcagcctccgaagtagctggaattacaagcacccgccaccacgcccagctaatttttgtatttttagtagagacaaggtttcgccatgttggtcaggctgctcttgaattcctgggttcaagccacctgcccaccttggcctcccaaagtgctgggattacagacataagccactgcacctggctgaaattaattttaataacacatttgatttaacccatcaaaaatgttatcattttcaacgtacaaccagtatgaaaaatgaatgaatgtttcacactgtttccgtcttaagcctttgaaatctacaatggcattattgcgcctatgctctcgtgggtttgggcaattcttgttttatgtgttgcctgtagccaggggctactcaaccaggcagtgcagctttaaatggctctctggaagaacaggccacctccagaggtcccaattcaggaaggagctaaagccaaggtggacagccagagaggggactgaagcagggaatgaaggcgtggactgctccttccatctggaaatttccaatcccaaagttcgaccactgttcgcctacagctggaagtggcgtaagccacggggcacacaggccagaaccgaggcgatggcgctggagctggtgctgcaaagagctcgctggaaggcaggggcctgggcaccgcttcctgggctggacaaacaccatctcattccattctcaccatcgtccccggaggcccaggcaggagggaacagactcacaggggtgggggaacctgcccgaggtaacaacacctgcctgaggtcaggacaacccctgctcatcttagtgtcccccatgaggggaaacagggccctagtaggtgctcactgaggagctgctgaacaaggacccagaagaagcagaaatggcgagaccctgggagtgggacagaaggtaaggaggggaacatgaatgaatgaatgaataacatcaatgaataaatgaatatttattttttttgagacagtcttgctctgtcgcccaggctggagtgcactggcacgatctcagctcactgcaacctctgcctcctgggtccaagcgattctcctgcctcagcctcctgagtagctgggattacaggtgtgcatcaccgcgctcagctaatttttttggcatttttaatagagacggggttttgccatgttggccaggttggtcttgaactctgggcctcaagtaatccacccaccttggcctcccaaagggctgggattacaggcgtgagccaccacacccagccatgaatgaacacttctgatggcagacttggaaggtctcaagtactgctcaaaacattgaaaatgcattctggagtcagctgactaatccatcttaaatttactggcaacccaactgtggttattaaacaaaacaaaacaaaaccttggcgtccctacagccagcttcctctcctgggggaatccttcaagagatgggaatcaaaccccacacggaagagaaatgtgaagggcgagttctgtgcagagaatgaggaacgggtccccgtgtctggctgtgcccgtgttgacttgcacacattggcatcaagagtcttcatctgggtcacagaaggccgacccccaagcgggagaggccaccagacatgccacagtccctgacacctggttcttgaggggtcacaccgcaggcacggcacccggaccccagccaagggccccggggatcgccctgccctgcctcggcctgcagaacgggagtgcagagatcaccctggcatgaccccaccagtgtgtgcccccaacacccagtcccctccctcgtcctggagcagtgcgattctgccagcacgccacccggaccccagcatacccctttctcagatcccttcacccaggcctctggtcgccctccacctcctcaaagcttctgcactgggtcagcccctcacaagggttttccggtccactcacttcagaatctgcacctctgctttcaggggccagcagggtcccctgatccccacgcctcctcgttcctcacactctggcttccctgtctcctcacacttccagcttcagggactccacacactgggcaccgccacaagcaggagatgccctctcagagatgcccatcttgacatcttgacctccctgggaccccatcctgaccccctcagaaccccaacatgagacccctaggaccccctgctctgccctcccagaacccccacaacatgaccccccgaggaccccctaacctgacccccccagaatcccccaacatgacccccgaggacccaacctgaccccccccacaacatgaaccccctggaacccctgtcctgatcccactagacctcccccagcagaaacccctccatctggaacccgctagaactcccatcctgaccccgctaaagcccccccatgtcctgacacccctaagacacccccttgtcctcagataccccagaactcccaccctgacccccccaaagtcccccgatcctgacctttctagggtctcccaccccatcgtgaccccctaggacacccctctcccacatcctgacccttctgggagccccctgtcctcccctctcttcccttttccctggttgtctatggacctcctcaccccatcctctcccctaagggacccccctgccccaccttggcaccctaggtgccctcttcatcccatgccaacctcattactcagggactcattccccaaaaggaccgctccccgcccccccaagacctctcagcctgtcctccccacccaggtgctgcactctcaacctgtggctcaggcaccctcccaccccatctctcccccataggaaccctcccaccccatctctcccccatagggaccctcccaccccatctctcccccatagggaccctcccaccccatctctcccccatagggaccctcccaccccatctctcccccacagggaccccctcaccccatctctcccccatagggaccccctcaccccatctctcccccatagggaccctcccaccccatctctcccccatagggaccccctcaccccatctctcccccataggaaccctcccaccccatctttcccccatagggaccccctcaccccatctctcccccaagggactcgcttcactatcatttcaatatgcagaacaccccttgcctatccttcccccacaggcccccaccgacacatcctctcctcccagggaccccctcaaccccatctcacaattcaggggccctgcaccccatcttctctctgcaaggacatctccttggcctgatctcacgacttagggattccaaaccccatcttttcccaaagggatctcccctcactccaatctcattactcagggaccccaccatctccccgatttcactattcagggaccgttcaccccatttcactactcagagacctaccaccattctgctactcagtgactccatgccctgtcttttcccacagggacctcccttggccctatctcattattgagggacccttaccccgtcttttcctaccagggaccctaccccatctcagtctcattactcagggacccctcaccccatcctctcccctctggagcccccttgcccagatttcctcctcaggggctgcctgacctccccaca

SEQ ID NO: 118 - DNA, 6224 bp, Homo Sapiens
ggctgaagtgcagtggcacaatcttggctcactgcaacctccgcctcccgggttcaagcaattctcctgcctcagcctcccaagtagctgggattacaggcatgtgccaccacgcccagctaatttttgtatttttagtggaatgaggtttcaccatgttggccaggctggtctcaatctcttgacctcatggtccacccgcctcagcctctcaaagtgctgggattacaggcgtgagccactgtgcctggccacaaattgaaattcttatgtttaatgccatgacatctaacactgcgttcaatcaaaatgtctacgcatgcagcttgagacctttgcacagaaggtgcctagggtcatgatttgggaagattaatctgccatcagtggaggggtggataaaaactaatgtttattgggatcaagatgagcagtctctgtgccagaaactttattcctttaatttccacagccctgtgaggcaggtgaaatcatccccattttatggatgaggaaattgaagttcaattggttcaataacatgccaaaggtcactcaactgatgaacagtggagctgagatgcggaagactgaagactcacagcctggacttttaaccaaacaccacatggcttcgctacagaagaaagttagaaagttttcaaaaataaaatgtagagccaagtgccaccttggatataagggactgggggacgggaagaggcaagaactcccaggcttccctctggctgtcaatagctagtgggtcctggcagtgggagctgggccatcagaggtggcgcctgaagtggggcaggcacaaaatgggttttcgggcaagcatttgcccaggtgatggtcaaagccacagaaaaaaggtgttttgatggagtggtggctgagtgtggggagagatgagcaggggaccaagcctggagcttgggcagcccacgattggacactaggagaagaaaagaagccagtggaggagacactgaggctagggatggggagggcactgtggaaggctgggctccacctggcgctccggggagctggcaggggggcacatcaaggagctcaagctgcctcaccagcaaatgcctctgtttctgaccaggggcaatgaaataaagggacccggttgagtaactggtttctggtccctgccagcccaggaagccagcacccaccctgccttacatcccatgtgccactctcagccttcgaagcaaaaccagctgagaccagcacctgccagatctgaatgcgcagctccaagttctggggggtgggggtgggggtgagccaaggaggtctggcttctctagggcaagggtaggaaggacagcagggaggctcaccctgagcccggcaggcagcccttcctcctcctccccttcagcaaagaaaggcagataaaaacgtgtttttataaatagctccagccccagctgatttgtaaattcagtgggttttttgtgtcaatgacatcaccttcctccccatggcaacccccgacgatatcaaaattgccaagcaacgttggagcagctcggcgccccaaacgagcaggtcgatgcctgaggatttaatggagaaatcccaaagtgagccggggcgcgcggtggaggaggggcgcgccgcagccggggccgctgggccctgatgggcgggagcggggtggagcggcctcgcctgccaggcagccctgggcgcggggctcggcggccacactctggagacagccacggtccaggcaggtgggggagggcgctgctcccgtcctgatgtgccaggagccgccagcagccatccaggtgactaagccggcccactagcactgagtcaccgcccgcctcgagctgttcttgcttctcctttgcatctgattattttgggagctggaaacttggagctgcacctgagtcccgccccttctagctctcccctccctaccttgggctccaggaagatgggacttgctgtgagtctgctgccaccccctaaagatatggaagacgctgtgggggccagaagtgcccggggggctgtggcagcaggcagagtgcaatagcagatatggtggtcaggctgcctgtgtgtgtcctctggaggtgttgggacagaagggcagtcttgtccgagctgactggagtcctcccgggctggctctgaactcatctcccacggggatgtttcggtaaaggagtggcttctggggtcggagtggcatttggagagcgaggctggattggcttaggctggcctgggcaggtaggtggctctgtgttgggtgtggacccacgtgtgtgtgagtgcgagagtgtgtaagccagtgtgtgtgccgtccccctgctggggacagcagctgggtccagcagagagctggctgggggcttgacaggagtttatcctaactgatgctgggtgggcgcaggccctgagatgggcgtcagggagaggggacgccagacacacggcctgagcagggtgaggagcagctgccagccccggcaggcccaggccctgtctgggtgcacaggacagagacacagcaagatgcccaggtaggaagccgtccggaggggctggccagggtgagagcccatcactggggggctggacagcccatcagctgccccttcattctggcaggcctgggtaccaaggaaacagcttcctaccaagaaccatgtcactctcttatgcagggccagtcagcacccatgtgcgtctctgctgagctcacagggacacattcagtgagaagggtgctggccagggtacggcttccccatgatcaggacccagcgggtgccaccctcaagcccctggtccccacagggcatgccccagtgtgtgtcaggaggaggggggaggtcccttctcccccacacagctggcagctttgcgggcaccagtgagtaagctgccagagggagggaggctgtgtgcccacagtggcaggacaataccaaccaggagccttcaagagaagaggctgggtgagaaaagcactgaggttttcttttcctttttttttttttttttttttctattttgcctgaagggagtgccgcttcctgggctagagacaagcaccagcctgcagtggagaacgcaggaccccgctgcccagaaggagcagccacggtaaggtccccactgccgctgcgtgctccggattcctgggctagggacgggggtgccaaggtgtccaggctgcctcccacctgggacagggaggctaactccacagctgtgggttcctgggtcaaggggctccactccccacccggcctgccaccttctttccagattgattgtgaaacagtccaatcccagctggtctctggctccctagctagagggagaggtgcttgtttctactcttcctgccccagctgggccaagccagtgccaccgggacacccctatccaaggcccctctcactttaccacctctgggacatttcccttgtgtattcattccacaaatatttagggagcactgctgggtcccaggctccaagtcacaccctttggctgggtttgacctggcacagattctgactctgaaactcagcatcagggcaggttcagggagctgcctggccaagcacggtcactcctcacaggccttggtctccccacccctgctgcagggtggatgacctggtcagctttggggacatcgggcccagtgagctcgggtttataaagcactgggccccaccgggaagcaaggctaacgtcttgtggtctccagttatcctttccctggcattgtacaccaagaggtttgtgccgttctgcctggggtcttcctgaggctggttctggtgggaactgggctgcaggaggagaggatgagcttaggagccgtgtggcccccaggcctggtgggcctgggactcagccccacgggagctcatctagctggggttgaggcctttggggcaagcaaggagtcccctctgcaggcaggcttccctggcggttgtcctggcccaggcttggaggtggcacctgggagccctagtgacagagcgcctggtcagggaagggtcggcaccagaggcaagcccttctgggagcagctgatttggatggaagctctgtgcacctgagagggggagtgtggggactgcacggcctctccagtgccccgaggacaaactgatgctttgtgagtgctctgggccctcccggacttgccagacacagggagggtgcagtgggtggggtctccagccaaggaaagcccgctctgtgcacaactcctaaggatgaccaaaaagtcccctgccctggaggagcacatgtgctcagagtcaggaggaacccataagtgtctctcatgccagtgaattcccacacctggctcctggatgaggagaatgacccagctgtgggggtatctcatgctgcctcacaaaaggtgactctgtgcctaggagtcttccatgcatgcagagctgagcaggggctgctgcccagttggggtcagaggggcggaggctgtcgagcactaggtagacagcaggccagcagcgggcagcaggttgggccaggagggagcagagagtaggggccagggcaggctgagcaggaaaggaaaaggctgcctggggtcctgagggctcagggaggactccagacagctggccttcttatgccagcccgcttctgtgggagaggccctctgcgtaggtgactgggcagggaagaggctaagacactgaaagattgaattcctcacccaaatggcccagagatgcccaccgcacacagtgtcctgggtgcagaaggcaggaaggactcatgggaggctgtcctgtggactgaagcagaaagtccttcccgtaagatgcgctcgtcgccctgagcaggaaggcccaggctgcggaagcagtgcctgagacctgagcagcaggaaggacaccagtaaagctcatcaggaggcatctggccgcctgcacctaccgggcctcaaggagagagcttatttctgggagcctccttggtagaaagaggtggactagccagcaggttggggaggagcattgcaaatggaagcttctgagggcagaatgagttctgaacttgctgaagccaaggctggccctcctgcccagggcgagcagtctgcctgggcctgggaagttgtccccttctgaggaggtgccctccaccccaccagagctcagccctaggggccaggaagggctaaagcgagaagagtgagatgtgagataaaggggaccgtgtctcttcctgggagggtgtggggtccaggcagcaccttgttctggcgcacaggctgccaagcagatgacagccatggcctgactactaggtgcaagcactggtggcaggaagagggggtggacaaagcaggacagagctcttgccctggggatgctcatagccctgcagcagagcagtggaaaggaaagctgagctgagcgtggggccaaccgcgccagaaacaagcggagccacaaagccaccatcagcccccaggtggcttcgtccttttgccaactctgggtccaactcatcgctgaagttggcagccatgacccatccagcccagataatttataaatttacaccaatactgggcaacggttcttaacatagaactttataaagatggacaaaaaagataagttgagaatgacaaacaaaggaagaagcagcttctatctgcagttgcaggaggaggtgaaggctcggggagatagaccagggcgggaagaggcaggatggtggttggttaacatgaagtcagcagcatgagcctcaggcccggtgctgcctcttcctggtgactcgggcaagttacttcatgtctctgggtctcaatttcctctcctgtccaacagagataattatagtacctatgagttagggttgttgagaggattaaataagataataagtgaatgctctgaatggcatgactggcacatacgtacatgttcagcaagagataactattatcaccgtgatgataactggtgtcagaggaacaaagtgccaggagagaccataccttgttcgggggaatcaggaaaggcttcacggaggaggtgactttgaaagaaccctcctctgaggagaaacaaaagctctcagaatgcccaggaaagctgggaagaaacaataatgccaggtctatttttttcccaaatagcatattgtttgtccactga

SEQ ID NO: 119 - DNA, 6225 bp, Homo Sapiens
ttgagagaaaaattatgtcctaaagatatggccattaactataatgggtttagacattatataacagaaataaggaatatctatattagttagattaaaaggaggtgatcagcatcttagaacaaacagggcctttctcacttactacagagatttggcagtattacctagcatttccctgtcccaagaatttatttaaattcttgttttccctattaggtctcaaatacattaatatctgaaattgcagctggtaaaggatttagataattaactttttatttccaaagttaactttaaatgttcctatatgacaatctaaatgtcagaaaccaaaaataaacttataaggtgttgatttgcaaagtgttttaggtaacagttactaaccataaggcatatctaaagttgcaaagaaaaattaaaaagctaagtcatagcttgatatacagccaaatctttcagaatattaagaaaataaacctctacttctctctgacttcttttctctctttcctctttcctcagcctcatcttccttctttatgacctttcctttatctatctttctctctctgccttccctttctcccttggtacctctccttccttctagcctcacccccaagaccttttataaaaaatccctgtccaccaaagccattgtatagaaaaaattagaataacagaaggattcattgagtcattatactagtaatttatgaagagaaaattggtgaatatcttatcttccagccttaaaggggaaattacattgctttaaacttgtacattgttagttcctaattgtttctgtctaggaaatgacccagaatcatctaatcagaataagaaaatggcattactctcccactgggactccaatttgacattaaaattagtatattaattttaaaaattatctagcatttatgtgccactaagatatcaatacttgctaagatataattgctatgagtcagatatctccacaatcagaatttcaaattttaaaacttttgttctactttagaattgagaaaatcctgtttcagcatcacattatagccctaagagtataaaaatgtaaagacgaaatcagaactacagagaactggtgaaaaagaaagtaaaatcaaccaaaatgaatgcttttagatttttttcttttttacacaatgccatgcttcttcgtaatcaaacaactttcaacaagattataaaatttttcaggaataatttggctaaaaaataaaattaacattacatcagcatcaaaggcgtcatcatatatggttttccactgagggtggaatgtaactttatcacagctaagattagtgtccttgttttaattggattatagtcagacatatctcaacacttggcatttattttatcaataaagaaaactcatctaacctgaatcattatttctgaatctacttttattctgacttctatttccttattatttgagctgatttcagatataggacaagctagaatttatcaggttataaaaccaataaaacacatatatctaaaataaaatagctttatgtcacaaaggaaggtctctcaaaaccaaatatttcatatttgaaatattaatttcatattcacatctcttccaatgatgttggaagggaataatacagccttgtgttaatatacatttttgattgttgttctattgctatggacacatattgacaaaaacatataaatatataagaaattacctgttggcatcttaatttgtaaatagtttcattcttggtcaagagagtagggttgaaaaacagtacctaaaacggtttaaaaagtaataattcagggaaaatagtcttcttttaagggcattataaaatgtcaaatattctaatagcaatattcttaaatgttgaaaataaaataataaagacatttatatactagggacaaattttagttacagcatttttagatacctattgcatttcagtaaaaaatatgaacaaaactaaaagatcaataacgtacttaatataaatcattgcctaaataatgtaatttaatcttaaatatctctctgcagaaaagtctaataaggctttttttcgtaaacattgttaacatagtagagtactacatggaattttacatgaacgatgagacagtaagtaaaactgaatgaactgaacctttaaaacttttataaaagcacttttaagtttaccatagattgcacattacatttaccaacctatgcaaacctttcttctaaaaaatgtccagggctgataggtgcggcaaaccaccatggcacacatgttataaacacactatgtaacaaacctgcacgtcctgcacatctatcccggaacttaaaattaaatttaaaaaagaaaaaaaatgttaaccccacacacacacaaaaatgtctggcatctggcaaagcaatgtagctaataagacattcttacatatgaagtttcctgctataacagaaacaaaagaattcaaacatatatttgaagaggtgaagcatttatacttacattatgattacaagctcccagttctgttctataaagaacacttctgacctaaacagaaagactctaacagaaatctcaatctactaacacagttgtaataccaaggtcttctctcaaagccaacagctctttcttagacaagcagagaggcagagaaagcgagcaagcaatcgagagaaacacacacgagcgagaacaggcaggaaggagaacattaaatctatttgatttttaaaaagcactgactcatactgtttcttttttccaaacaaacaggacttaccctcaataaaaacttacattcacacaaaaaataaattttgttggacatgcagtgtttcaaaagtttttgaataccgcagacaacagcagctgtgacttgcattttataacatgtcaaaaatctgatttatatggctgcagtgtgcagtgtgggcgaggtcacgccagaccaaggtgtgcacagaggtcaggcactggccacgggagccaccccttcaatttacgtgttcagagttgcaaatggagcagaattttatttagaaaaggagttgaactaagctgcacttccaaattactgtccacgttttaaaggtaaaaaccaaaccacattccttagactccttacttatctttgcttgtctgaataattcaagacgtagtgtaagtttgggagaaaagaaattttaatgtggagctaatagataagtgtttcacaaattaaaaaaacatttttttaaatttatgttttatgaggtttgtgttaccttacaagccagataaaatttatataaataatgacctgaagaacttataaagctaaaagaaggtaatagctataataaaacttgtaacaccaagttcaatttgaaatgaataaaatcactgaacttgactaataccaatgacagtgtaatgcctgaatgctatggcaaagttgttaaatatacagtgaggaaagttaagttttaaaaatcataaacaattttaaaatattgactaaaactgtaattttgtttaaatgaatatagagttcttcatcatataattatctaaaatatgccaaacatttagatggttatcttttctaaaacgacaattcagacattattacttgactgatgtaaagcccaaactaataagtttgttttgttgttttaagaaaatattaaaataaactcaaaatcaaatactctaaaaacaatctgttcattaggagaatggtgtgaacccgggaggcggagcttgcagtgagctgagattgcaccactgcactccagcctgggcaacagagtgagactccgtctcaaaaaaaaaaaaatgttcattattacatttttaaaattatactttaagttctgggatacatgtgcagaatatgcaggtttgttacataggtatacaagtgccatgctggtttcctgcacccaccaacctgtcatttacattaggtatttctcctaatgttatccctcccttagccccccaccccgacaggccctagtgtgtgatgttctcctccctgtgtccatgtattctcattgttcaatttccacctatgagaacatgcggtgtttggttttctgttcttgtgttagtttgctgagaatgatggtttccagcttcatccatggccctgcaaaggacatgagctcatcctttcttatggctgcatagtattccacggtatatatgtgccacattttctttatccagtctatcattgaggggaatttgggttggttccaagtctttgctattgtgaacagtgccgcaataaacatatgtgtgcatgtgtctttatagtagcatgatttataatcctttgggtatatacccagtaattggattgctgggtcaaatggtatttctagttctagatccttggggaatcaccacactgtcttccacaatggttgaactaatttacactcccaccaatagtgtaaaagcattcttatttcttcacatcctctccagcactgttgtttcctgactttttaatgatcgccattctaactggcatgagatggtatctcattgtgctttttgatttgcatttctctaatgaccagtgatgatgagctttttttcatacgtttgttggccacataaatgtcttattttgaagactgtctgttcatatccttcactcactttttgatggggttgttggtttttttcttgtaaatttgtttaagttccttgtagattctggatattagccctttctcagatgaatagattgcaaaaattttctcccattctgtaggttgcctgtttactctgacgagagtttcttttgctgtgcagaagctctttggtttaattagatcccatttgtcagttttggcttttgttgccattgcttttggtgttttagtcacgaagtctttgcccatatctgtgtcctgaatggtattgcctaggtttctttctagggtttttatggctttacgttttaggtgtatgtctttaatccatcttgaattaatttttatatgaggtgtaaggaaggggtccagtttcagttttctgcatatggctatccaattttcccaacaccatttattaaataggaaatcctttccccattgcttgtttttgtcaggtttgtcaaagatcagatggttgtagatgggtggagttatttctgaggcctctgttctgttccattggtctatatgtctgttttgataccagtaccatgctgttttggttactgtagtcttgtagtatagtttgaagtcaggtagcgtgatgcctccagctttgttccttttggttaggattgtcttggctacacaggctcttttttggttccacataaagtttaaagtagatttttctaattctgtgaagaaagtcaatggtagcctgatggggatggcattgaatctctaaattactttgggcagtatagccattttcaagatattgattcttcctatccatgagcatggaatgttcttccatttgtttgtgtcctctcttatttccctgagcagtggtttgtagttctccttgaagaggtccttcacatcccttgtgagttgtattcctaggtattttattctcttagtagcagttgtgaatgggagttcactcatgatttggctctctttgtctgttattggtgtataggaatgcttgtgatttttgcatactgattttgtatcctgagactttgctgaagttgctatcagcttaaggagttttggggctgagatgatggggttttctaaatatacaatcatgtcatctgcaaacagagacaatttgacttcctctcttcctatttgaataacctttatttctttctcttgcctgattggcctggccagaacctccaatactatgttgaataggaatggtgagagagggcatccttgtgttgtgctggttttcaaagggaatgcttccagcttttgcccattcagtatgatattggctgtgggtttgtcataaatagctcttatgatttttgacatgcattccatcgatacctagtttattgtttttagtttttagcataaaggggtattgacttttatcaaaggccttttctgcatctattgagatactcacgtggtttttgtcattggttctgtttatgtgatggattacgggtattgatttctgtatgttgaatcatccttgcattccagggatgaagctgact

SEQ ID NO: 120 - DNA, 6216 bp, Homo Sapiens
ttctttttcctttacaaatccaaaattgcagtagcttaataaataacaaatattttggttttatgattactgtcaaatagctcattagtaagagaaaaaaaaaaatgctgagccttaagaggggagaggaaaggcagtctttctgaagctgaatcctttgcctaaattgtcttagcaataaatcttgccacctattggtaaaaaggaagaactaaaactaaaaggtgtttgccgttctcacaggtagttagtagtgtgatcgaaatagaattctttcagcggtgcttttggataaggggcttggaaatatgtgatttgatatggaacttttccctgtgctttgaatttatcatggctcatctctaagtcataatagttttttgagtagaggaggtatgctgctctcatggtctctcttaaaattatattttttgagatagaattccattttaatagatcagtggattttaattggacacattttagaggcttgattgattttgaaaacatttttcttttttctttctttctgtctttctgcctttctttccaccacggctaactgcagtctgaacctcctgtgctcagttgatcctcccgcctcagcctcctgagtagctgggactacaggcgtgcgccaccatgcctggctaatttttctgtagagatggggtttcaccatgttgcctaggctggtctcaagtgatctgtctgcctcagcctcctaaagggctaaaattataggtgtgagccactgcacgtggccttttttttttttttttcttgagacagggtcttcctctgtcactcaggctggagtatagtggcatcaacatggctcactgtagccttgacatcttggggtcacctgatcctcctacctcagcctctggtgtagctgggactacaggctgaaaacatttttctaactctgttgttagtttgggctttccttcattccagcctctgaaatccattatttcctgcccaacgggacaggccagtggtgacgttggcctttggtgccagggcctgtttttccagatcatgggcaccatacaaagataactgccctaaacggcatcattgccccagagtcattgaatgtccttaaggtgcatttgataaaacaaaaacagttttttgttttgaaaattctcaagtatttccatactgggaaaatgttctttttttttttttgacagggtcttgctctgctgcccaggctggagtgcagtggcgggatctcaattcactgcaacctctgcatcctgggttcaagcaattctcctgcctcagctgggaccaccggcacatgccactaagcccggctaatttttgtatttttagtagagatggggttttgccatgttggccagactggtcttgaactcttgacctcaagagtgacccatctgcctcggcctccgagagtgctgggattacaggcatgagccaccatgcctggccaacaatgttctttttaatggtgttttccccactatctggatagatatatgaattcagttactaagatgacttagatttaaatataaaacactagcatagcagtttttgattcttaatattatcttaaatccacctcccctcattgtcctctgtatctaaacacccttcaattcttgagaaaattaagattaccaaagattagtaatctatttgtgattgtgtgtgttggtggacatcctaacaaatttatgaataaagccaatactgttttgttagtgtccttattttttctttacgtctgttcatatttggaattctaaggcactacccagataatcatttgataccctttgttggcatgacatgtttggtcaattgttttggcaaaattatttatccaccactgggaactaagcactgtaacaactaaagaaagaggtcatacaagggaaattggaagaactatatgttatttgtttcaatttttatgtagtacacctatatatgtgtgcaaaaaaaatgtaaactgttacaaagcaacatattgatgaatttaaatgagtagagcataataaaagcaaaaaccaaacagaagagtggttggagtgaggccataataaaccaagagatattttctgaaggaagtgaacatgtttgcattttccagcatactgctatggatgtcagcgttaggctaatacatagtattgcagcgtgattcaaaaaggtgagatagaggggaaataagatagcttcataaatattaccaaggaatttaagacatgagcattttatgtagggaggttgaaatgcattgttataatcaggctgtgtaatttccttctgtcaagacctacccatttaccagtaatgataccttctttctcttctatttttgtctcttcctttaggaaaaggaatatatgcttactcattatttaaaattcagagtcattttcctgttccagttggttttgttcctggaaccaccaaagaagagtagaattaggtgcatgtgaaacttttgtttctgctttttctactcaatcaacttttatccctttttaatttttactctctcaaccatcagttctatatcatggtatctcttcttggtctttttgtattatatttccataaaaccagatgtacggggttgttaaaatactgcctggacatattatctaccctgcactaagtggtcctatcacaaaatccagttaaacacacattgaagtatttaaattgtttcttttttaaataacatcatattgggcattggacttcttaactaaactatttctttcactaaatgacattggttaattcaacaagccattgtaggaattctgttaacccagtagcttctactactatgttactatggtaatgacttagcttcccataaagctgcatttaaataggtgtttatagtcaccaattaccaggtatttcaagtactctttgaaaggggcctgcttgtggtggggtggggggcgttaacatagatactttctcagtcacgtagccatttgaagtttttcaggtagaagacagttgatagactatttggtgagcaaatgaataactggatgaatacccatctgggaacccctaaagaactgaagatagttccctggccatcactgttcacagtcatctattatgtgcttactctatgccaagtgttgggctggattctggggtcaccaaagggaagagaaaattttcactgccttgagggtagctaaaaacttaatggagggaagctgagagcatgagcgagcgtgccaccccagctgggtgagcggcacaccttgggaacagctgggagacccccagtggtgtgtgtcttccttcgcccttagcacttgctcctctccagctcactgtgtttcttttctctctggggtctaaggagcttaggcttcactgcctgctcctcagattgtgggagcaggagcagagagtgggtgcctgccacgggacagggggtcctagagacaggccccagcatgggaaggcagtggaaacccatgcattgctctctggcattgccacacgtcttctgctgcctgccttccagccctttgcttttccccagctccgtcagctccttgcctctgacatcagtgatgaaagtcaggcgtggggggattagattatttccattggccttgatagacttagacatataatagaagctatgataagtgagttagttttccatgtttgtttactgaagtttatattaccctttatgtcaccaaaacatgcccgtttgcagtcattgccaatgtagtcatgcaaaatcacttgagtgaaatagactttggggatctaatctcaggacctaaccaccatttataaagcttttttggggaaaatgtgttctggatttcgcacagccagcttacaaatgagctttggaaacacaatccacatgtaagttggagacttcctattattagcattcagccctgcgaggagagcccttgctttgttagcaggcctatgtgtcctcagccctaagttcctaaaaccagcactacttgaggagcttgaattggtgctcttggagttctttagattagttatgagacttcagaacctgcttaccagcagtactgagctcaagaggaagcctaattcatatccttcagaagataattttaagagagtgtgtatgttttcgttttgtgaacaaaggaaagttaatctggtgctccgtgtctgttttgtaattccccaagggagaaggaaagggagggaaatgattgatttccagataggataaaaaccagtcagcacacaatgggttactgccaccgctttctgataaggatcctacttcaactatctgaagagattcttcaaggtggaggatacagtggttatattagttactctcacccttgttattatggaaggtaaaattcctggatcctagatttaattttaaaatagtaatttaataatgtctggtggaaacctcttaaaaaaaacactttgcagcacatctctggtagccctgtgcttgagatgacttttaggctgccagttcagaagatggaagatataaactgtgttgatgagttggtttttcagtggaccctgttaggttccttttttaaaaaaataataatttttataatgagtatgtcttcgtgagccctcacaacccttgaagtttttacttgtttggcagaactaagggcactgaacgtttgtaagccgttcactaacacttacaggaagggcataaaagggtgctcaagtcagtctgtaggtggtgggggcggggtggaaagaggggattcctgtaggcctggatgaatcagccactgatttctgatggtagccccagctgcaaaaaagtaggaagctttttttatggacagaactacaactcctttctttcaagtttttcagccttttcacacttttccattcttcagactttgcaagtttttaaacaaaatgtttgtatttccccaaaggaaatcacacagttgactgcattatgagagggaaaggagcaaactctgtctcatctgaggaggggctcagatcaggagttgtgtagggccctcacccggttgggggtggtggagccttggctgtgtgcaggagtgactgttcttggagatgttctggttggatcatgagtttgggcttggaaagcactgcctcaagttcatcagcaggaatgaggtagaattcactacttgctgtcttaagacctttctgtctgccaagtgtttgagcaatccctcacatctcccccttgaactaaagagcaacaactggtcaagagcccagcagggatgaaaaaggttggccccttgcatccttcatctgctgtttagactaagggccgcattgtagaccactctcggccatgctgtcctgaacccgaggatcagcagaattacaggcccaatttcaggcagacgtgagcttgcatctgatgacaggcaagtacctacatgtgtctttcattactccgctgccttaggagatgctgtttaagttggcagatatgcttatttgaaagcaaagcttgttgctggtgagattactgaatttacaaaaaaaaaaaagtggggggatcagatgccaagggagagggaagggagtgtgtagcatttaaaagtgtggtgaagccatcaagttaacaagaaaaagtagaataaaatgtggttccaatttgttgtactgggctcaagatgataatattgcaatagtaaactgtagggatgtgtgcgtgcaaatgtgattacatgtgtgcttgctttctgaatttcaaaattgtagaagttattagaagttctaattttagttcccaatttaatttactctgatagtaaattagtaattttcaagggatttactgataatcagaacaaagatttgcaatttctaggacagatccccaattttgggggtgggaaggagctactttgtatttccctgaaaccttgagttactggggccgaacatgtagggcagatattgaatgaccaatcctaatgctcttagcaactttgctaagtaaaaccccgctgccatccagtggcaattggctatacggcatggtagctgtaaaatatgcccttttctgccttttctccctcagattccacctttctcagatgctcccagttttttttcccagatggcacctgacacagtacttgacaggaaaaattgactttatgtctggcttaggtaattcagggcaag

SEQ ID NO: 121 - DNA, 6216 bp, Homo Sapiens; identical to SEQ ID NO: 120

SEQ ID NO: 122 - DNA, 6204 bp, Homo Sapiens
aaaaaaacgccgtggtgcagcggcagcggcagcgtctggccaggaggcgtggaggggcccagggatggccacccccacagggagtcagggagggcctggggcgacagcggaaaggttaagcgtcgaaaaggtcaagtgctaccgtggagagatcatctgagggggaggctcccggtgggacagtcaccaagaactgtgacacagaaggggaagggggagggctttcctgtcacaaagattaaaaacccccaaaatgcatttgaacaacataatacacaataacaaatttaaaccttgctcctctgtcccactgggtaaaccctggcccatcccccatccctggtcccatcccaggggcccagcctccgatgacgtcctcagagacacggccttagtgctggggggctgctgtgtgcctgccacccccaggagagggtgctggccagcataccatagtgaggttgcatctggtgccaccaggttgaactgaggcccagggccccagagagatgacagatagctggtgacagacagcccagggcggctggctgacagagtgaggggacacatgggcaggacctgcccggccccccaatgccacattgcgcatagctgcagaagtccttaacatttccctacgtgaatcggattgttctgagggctgaggccacacccggagaacaaactggatgaaataaattaaaacccgcaggatagttttcttccctaccccgctgcgggggagggtgctgcccacagcacaaaaacgtctttccatctgggctcgagaggacagcgtggcttctctcaaatgcacccgagaaataaaaaccattaaatacagatcatggcacgaggccgcctctccatccctccaagctatcgtccagcgcagtccaccgccgcctcaggccgtgccgctggccgagtaggagaactgggggaagtggggcctgcgctcgctgtccacacactccatgctgtcatctgtgggtgtagacagctcagaccccggtgccccacctccctgccacctccacccacccacagctccagtaggaagccaacctcttaaagcacggccagcacgctgccatactgccaggaaactgagacagggccccacagattgacacagggacctgggccctcagagcactgcctcccaccctgatcattggcactctccaaaaggaacctttttaaatatttagattttaaaacatctgaagccaaaaaagctgaacactgcaggcctctctgagtgtggagagaaaagggagtgggcgggggcaggcagtggcccctcaccttggtcaggtggtgtgatggtgatcatctgggccgtgaactcctcatcaaaatacctggtgtcagtctccgacgtgacctggggcttgaagggtgggctgagctgcagaggtgggcagacgggacagtcatgagcttcgctccccactcccagcacaccctcaagtgtgctcaagaccttcaaagcacctggatctccaaggggtctccaggcaggactgatgtcagagagcagcaagccaccagccccccacagaggcagctctgggagggagggacatgaggggtgcaggagcacggagacaaccctcaacagctgagacgcaaagctgccctcacagcagccccagcaggcgacaggaggtagtgcagcccagctctgagagaccctccctgctaccaggaggtgataactttatttttcctttttctttcttgttttcttatttttcttattggtcttcttgtaaattgggaaagagggagactgtggaacaaggtgcacaggatgagcccaccctgcctccatggctcagggactacaggaccacagcctgctggcatctggctgcagacaggactctcaatgacccaggatgaagggtgactataaggtgatgtgcacacgtgaggagctgccagagagcccctcaggtcccacagtcaaggaccccctcaagcactgccccaccccagagtctgggctgggcaccagcattgtccattgtcaattagcaaggtctctggtcaaggctgggcagaggttgagcactgcccaggccccccatacccttggagggcagggcaggagggtggcaggcctcaaggcaggaacggggaccaggaccagggcaccctgtgttaatgggagaacaggtgcccagctgggtcccagggctgcccagcccgaccagctgcacacagcctaggacaggcattcaggggaggggcaggctgggaacggggcagaagcacacctggtgacagggcacccagcatctcagagtgcaggcttccgaacccagctggcagaccccatcagctggggtgatggccagggctcctagggtccctgaaagatgagcacccaggatggcgactcatgcagaaagagctgcctccctccagggcggactcccccatgtgccagaaaagtaggtgctgtccctgtccctgcacagccagaaatagggctgggctctccttgcggcagaagggattgaggtcaaacaggaggaactcgtggaggccaaggggcagcacccctggtccaccaccagccagccttcactgcacagcgtcagggaagggaaccccaaggctggcactcagagtgtgacacacctccgaggggaggaggaaactcagagtgtgacacacctccgaggggaggaggaaatgaggaccaggccagtttcctggtggaacccggcagtgccagagcctctgagcaccaggcgctgaggttggtgcagcaaggccctccttgtaccaggactgcagcaggctcctgaggtgagggcgagtgtgtgggaaatctggcgagcgtgccacgtgcatgcgtgagtgtggatatgtggggagcatgcgtgcgcgtgaatatgcggggagcagccgcaccttcttctcgtacacgtgctgccacacgataccggcaaagaagcgatgctgcatgatctccttggcgtcctcggagcccccgccaagcctgcaggcaggaaacaaggccacagtgtcggtaccgccacctgcccaggccctgggttcaggccccttcctcctgtgatgtagggcccgccagacaggacgttccggggccagggaggggagccggtggtgcagcgtccctgagcagctgtgggtagcaaagcaccacagagctcacggcagggcaggggcttcctgagtgggtgggtgcaggctgcagggttggggacagaggcccaactgaccccggcctgcccgccactctgcttgggcctgaggctttggagatcagccctggccaaggacatcaagctttggctatcagtgtagtctgggaggtgccaggaccgcctggcgcaggggcaggtgcagcctggggatgaggggatggaggtgtagcctgtagctgggatgggcggccctcacctctgcttggggtccttcttgagcagccctgaaagcaaggacttggcctcgggaccaagcgtgcgcgggaagcggatctcctccatgaggatgagctcaaaaagcttctcatggtcctggttgtagaagggcaggcgaccgcacatcatctcgtacatgaccacgcccagcccccaccagtccactgcacggccgtagtcattgtcctccagcacctgcacgggtggcagatgggcaggactcggcatcaaggggtgtccgggacactgccgggggaggtgtgacgtgcttggggcacagagaggacacagcattgcgtgtgctcaggacgtggggacgcagcaacgcgtatgcacgcaggtggggcgcacacctcgggggccaggtactcaggtgtgccgcaaaaggtcttcatggtggcaccgtccttgatcccctccttgcacagcccgaagtctgtgatcttaatgtgcccgtccttgtccagcatgaggttctccagctaggggaaaggtggcctcaggtcagtgccgccaggcccccagggccctgcccccctgcctgcccgccagcgcaccttgaggtcccggtacaccacgttcttctccgagtgcaggtagtccagggctgacacaatctcagcgccatagaagcgggcccggtcctcggagaacacacgctcccgggacaggtggaagaacagctgcgggaggcgcaacctgaggcacagccgtggctcgggcctctgcccccatggcctgcagggctggggtttctcagaccgggtctcggcattgcacagggaagggaccagccaccagagggcacgggggcctggaaagtctcagaagccctaactcagcaggaacaagtcaccccacagcaggcagctgcctgggcaggcatcacaccacccacccagcagggagcaccgtctggtgccatggagagtagccgaggctccgggaaggaccggccccaccatgggcggcccacaggccgcgaagtccatcccccgcagccccagcccctacctcgcccccgttggcgtactccatgacaaagcagaggcggtcgtgggtctggaaagagtacttcagggcctgcaaggaaggggagctggaactgcggccccacaggcaggacggcagccccgcaccacgctgcccgacaccacgctgcttgataccacgtcgcctgataccacaccgcccgtagccccacaccacactgcccgacaccacgctgcctgataccacaccgcccgataccacactgccccacaccacacaccccatcacactgccccacaccatacacccccacatcacactgcccccatgccacgctgccccacaccacactgccccacaccacactgcctcatgccacgccaccatcaggctgggccccggcagcccctgaggtgccaaggagtgtttgaaaggtgagcaaggtggcctgggctcaggtcctccagggtgagttgggacctcagcaggggacagtgctcccagcaccagggccttcgcaaagggaggacacaccctcccaggcgagacccaccctcccgccttccaccacaggcgactgtgcttttaaagcaaaggccccatctgcaggagaatcgtccccaaacacagtgacctggaactaaccaagtggctggaccctggcccccttcacagtaaatacctcctgggccaagtccccagaacaggttctgcaggacagagcccgggcctcaacaaaagcctggcaggcagggctgcagggcatggggagctggggcctcctggagcctcggcagagtgcaaggaagaccagggccacctgccccacccacctgcccgcacacgggagcagcgagcacagcccctagcccacactgggcacctccacagcctgaccctccagggcaggcctgtctcaccagcggcggagtccacggtgtgtaaagccctcacgtgcccaagaagacaggacatcgtcccctagagacagccccaggagtcgctacctggccccagcccttcagccccatctgggctcccactcactgtgaggaaggggtgcctggagttctgcaggacgcggttctcggtgagtgtgtgggccacctcgtcctgtaaagcagggctgggtgagctgccaccccgcaccctcatctccaccctgccccaccgccccggccccaccttggccacgatgacttccttcttgaggatcttcatggcgtagtagcggcctgtggccttctccttcaccaggatcaccttgccgaaagtgcccttgcccagcagcttcaggtactcaaactcgttcatggtctatgggcaggcaccagggtcagcaagcggcgctgccaacagtgcccagctggtcggcatgcgtggggtggcatgaggggccccagagtcggaggcagagccaggagaggcgtccacttcacacctggtggcctactgggctcagcggggagtccaggcttacagggaacacatggctgcggccccagctcagagcatggggttcagggaagggtggggtaacattgcccaagcctggcagggctcagcaaccccagttttcctctgacatggggaagaggacccacctgggaagcagctgcgccctacatggaaaaccggcctaggtggagatgccgtggagtgctgagtgtctcctgggccgagctgggaccccatgacccacccagccctccacagtccaaggcagccccaggcacaggcagaagtg

SEQ ID NO: 123 - DNA, 6186 bp, Homo Sapiens
tgggagtgagggtggggctggacagctggcttctctgggcatctctcgttctttctgtggttttgtcacatgtctctacatggcagccctagggtaatcatgacagctgaaggctttagagtgggtggagggggagagggagggagggaaagagagagagagagagagagagagaaagagaagcaagcaggcagaagctctaatgccttatgacctaaccttggaaataaattacactgtgccactgccactaccttttcttagaagcaagcagatagggttggtgaatatttattgagaggggaattagactccacctcttgattgggggagtgtcaaagaatttgtgaatatgtttttaaatgaccacatttcccctttctaaaatgcttgtctaaattggtgtacacaaaaagctcgggggttagtgactcatccaaggttattaagctgttaaatggttccaccaatactagatctaattttgtgactccaaatttcatgctctttttcactactccagataatctccggtgaacatcattgtccattagggtagttaagacattctagctgccaaatagattcagtccttttaattgcctcggacaatatattttttattttgcagaaaataaatattacccatatggcagtcatccataaacaccttccaagtttatcccaaacatctgtgttttaaattttttctcccaacagatgtattcatttgcattttcccagatgaatcactctttttttgttgttgttgttatttttgactgtatttctcacctctcaagacccttttgtattatcaagcccactgcttaagctaataccatctcccaatttggggacttccccttgattcctgtgtgcccttcctgtgggtcattaatgcaatgttatttaagactaggatttggctgggcgcagtggctcacgcctgtaatcccagcactgtgggaggccgagccgggaggatcacctgaggtcaggagttcaagaccagcctgaccaacatggtgaaaccacgtctctactaaaaatacaaaattagccgggcatagtcacatgcctgtaatcccagctactgggtagcctgaggcaggagaatcgcttgaacccgggaggcggaggcggagtttgcagtgagccaagatttcacaactgcactccagtctgggccacaagagcgaaaacccgtctcaaaaaaaaaaaaaagactaggatttgacataaggcctgaggggtattcttttgttttgttttgccttgttttcaagaggccaaaatcttcacagttgaaaatttctgttgaaccacagagatttgaaccaactcagtttagaaagcctggggatttgaacaacggtatggatcggaaatctcttcatctgtcagttttcatcattctaggcagtaaaatagatttccctttaggagcttttcaccgtttggggttctccagcagtgggatgtggggaatcaacccttcttcgtctccacccaaacattaggtgggagcaaggggtgggaagtagagaaagtggatagaggtctccagtggatatgggatctttgtgtagaccagcacagtcctcagaaatctcatgcaagcaacataggtactgttatattttctagtggccaccttttaaaaagtaaacaggtgaggccgggcgcggtggctcacgcctgtaatcccagcactttgggaggcccaggcgggcggatcacgaggtcaagagatggagaccatcctggtcgacacggtgaaaccccgtctctactaaaaatacaaaaattagctgggcatggtgacgcgcgactgtagtcctagctactggggaggccgaggcaggagaatcacttgaaccctggaggtggaggttgccacgctccactacactccagcctggcgacagagtgagactccgtctcaaaaaaaagaaagtaaacaggtgaaattaattttaataatatattttgtttaacccaacgtatccaaaatactatcatttgaaagtgtaatgaatataaaaatattcatgagatatttttcattctcatatccatactgtcttggactctaatgtgtattttacacttacagcacaattaatttgggactagctacatttcagctcaacaatagccaatagcatatgggatagcgcaaataaactctgcgtctctgttgcttctttgggtctcggagacctcaaccctttcttcagattgcaaaccttcttgccttcaagcctcggctccaacaccagtccggcagaggaacccagtctaatgaggtacgctcccttcctgccattctctattccattaacctgtttcgtggtaaacgtaggactgatcctccaaaattaccttattaattagcttacatatttattatctatctgtcccaccagaatgcaggtttccggaaggcagggatttaaaaaaatctgttttgttctatgtgattttcccataccaagcaccgtgcccggcacaagctgggatcccagtacacatctcgggacggaagaaccgtgtttccctagaacccagtcagagggcagcttagcaatgtgtcacaggtggggcgcccgcgttccgggcggacgcactggctccccggccggcgtgggtgtggggcgagtgggtgtgtgcggggtgtgcgcggtagagcgcgccagcgagcccggagcgcggagctgggaggagcagcgagcgccgcgcagaacccgcagcgccggcctggcagggcagctcggaggtgggtgggccgcgccgccagcccgcttgcagggtccccattggccgcctgccggccgccctccgcccaaaaggcggcaaggagccgagaggctgcttcggagtgtgaggaggacagccggaccgagccaacgccggggactttgttccctccgcggaggggactcggcaactcgcagcggcagggtctggggccggcgcctgggagggatctgcgccccccactcactccctagctgtgttcccgccgccgccccggctagtctccggcgctggcgcctatggtcggcctccgacagcgctccggagggaccgggggagctcccaggcgcccgggtgagtagccaggcgcggctccccggtccccccgacccccggcgccagcttttgctttcccagccagggcgcggtggggtttgtccgggcagtgcctcgagcaactgggaaggccaaggcggagggaaacttggcttcggggagaagtgcgatcgcagccgggaggcttccccagccccgcgggccgggtgagaacaggtggcgccggcccgaccaggcgctttgtgtcggggcgcgaggatctggagcgaactgctgcgcctcggtgggccgctcccttccctcccttgctcccccgggcggccgcacgccgggtcggccgggtaacggagagggagtcgccaggaatgtggctctggggactgcctcgctcggggaaggggagagggtggccacggtgttaggagaggcgcgggagccgagaggtggcgcgggggtgccaccgttgccgcaggctggagagagattgctcccagtgaggcgcgtaccgtctgggcgagggcttcattcttccgcggcgtccctggaggtgggaaagctgggtgggcatgtgtgcagagaaaggggaggcggggaggccagtcacttccggagccggttctgatcccaacagaccgcccagcgtttggggacgccgacctcggggtgccgtggtgcccggccccacgcgcgcgcggggctgaggggtcgggggcgtccctggccgcccagctttaacaaagggtgctcctctccaccccgcgaggaggggcagctccggagacccggtcttcagcgagcggggtcttagcgccggggaggtctacttccttttggggttgccattttactattattattgccttttttttttcttcaaaaggactggagactgatgcatgagggggctacggaggcgcaggagcggtggtgatggtctgggaagcggagctgaagtgccctgggctttggtgaggcgtgacagtttatcatgaccgtgttcaggcaggaaaacgtggatgattactacgacaccggcgaggaacttggcaggtaaagggggtaccagaagcgtaccctcctggattgtggaaatgcataacgatggggccattgggtggtaaacaaatgcagtttgaatcaggcgtctccctcgccctttctggagatgcgcaaatcatagagaaaagagttactaacccagcggtaaaccgcctgatccaagggcctgggggtggaggagaggcagcagttcagggctagattatgatgcacagtatattgatccagtcccctggacaaaatcagatttaattgtccgtgctaactcttgtcagcccttgcccttctgtgacaacaggacaaacactaagattataattgcaattggagttagcttttatgtgtgatttaaacggagggtacaaactaattaataggttttaaaaatcttagtactttaccctctatctaaattttcagtgtaatttgagcaagtattggtaggtggtaaatggagacttgccagatgttgacattgggcttggattttgaaacttcttccaaccaggaatttaattacctggttggtgttggtggttgctttggtttcatttacaatgttaaatttttaacaaatcaatgagagtctaatatggctatctggattcagagcatacctccattgctgtagcagctgtgattctcagtgtaaaatctttcagtttctaggtaaacaaagaatagtttctttcggggcatctaagggctgattgctgtttcctttgactgtgtattagacagagtgttttgggctctggtcaactttagtagaaaacctagttttcatacatacatttaaaactgaatttatggaatttgactgtggtgtatttacattgtgagtggagtaggcaaaaggatctttaaacaaacaaaatatgtatttacttatatgtgcattgaaatatgtattttcccatatacatctgatgtcctgatacaaagcttcctttttctccatgaaaaggaaattaaaaaacacccacatcctggattgcctaatgagaattatggaaactaagcttaactaaatttttttaaaaattcaaatgatagtgtagaatttttttaaaagttactgtaacagagtatttctctaaatatttagtatcgactgaaaacatagatgggggcctgtgcttaggaagagctctctgtatattgatgatctggtgagtaaataaggaaagctcttcaaacatcacatttcatggatatgtttaagattaaagtttaagagtgtgtgggtgaaatatttggtttaactggaattaaataactttactgtggttttcagcaagatgagtggtatttggagttttcctttgggactggaagaaaaaagcaaaaaaataaattttaatttgatttgcatagtgtggcctgatcgtttaagtgttgttagaaagagagatgactaaaattagttgagattattatattatggattaagtatattgaccttattttcattatgattttttggtaccattatgtgttatgagaaagaaatagaaaaagaggcctccctgtggttggcgaagggagtttttgatctttatttcgtgggcgtgatgatgaggggagggaggtggcttacttatttgtcactagcactttgatttgctcagtgtacatttttgtgtataacgttctccccactgtgcaaggcaaattgacaaattgtttattaaataatttgtgtgacctaggaattttaaagaaatgctctgaaaaactggaagtctgaagtttttaaaaatgaaatgtacagactcatctatcttgtataactgctattgtttttgccaaaaaatgagtgaatgattgttttttggaaaatttttcaagtcctgattttatgtctgccttggatgtagccacttcctgaaaacaagtcctaatgtaaaatggacatgtaggaagatgctgcttatatgacatcacgtgtcactgagggaagattgggagtggaggcaggagtttggtggcaggaaaatggaaatgggcagatatgtggcacaaatg

SEQ ID NO: 124 - DNA, 6203 bp, Homo Sapiens
caaatgcataatgacaacctgaatattcacataagtgattaaaataaaaatgactagaagcatcaaaaactattggaaagactggcacttaggtttccccgtggtggtatgcggtggctgggaagaagttagagaattgttaactagttgataagtgttgcactgggtactgcctcactttgatccccagtttcaatcacttttctctcaaagcatttcacttcattttcactggaacaactttcttttcgcacacacatactcatgtttttaaatttaataatcaattgtgtaatatttaattaaatttcacaaggaacattgtaataggtggaatcaagtttgggaacaagcacaatggattctcatgggacccataactcacctagtgggaacagaagtatgcaggtgcacaccagccgctggcctgagcatttattgtgctgtatcatccctctgcatgttgtacaccacacagtaatggctggtatctgttactggatgagtcagctaaatggaggctggttaagagaccttctactataatgtcatttacagtgcccttgtagggaaccaattatcccactgatgacaggattttctgacttagaacatctgaaaacacctgggaagtatgttgtctggaaagaacatgcagaaaccaaattctagccccagcactcctgcaagtattccataataaatatttgtaagcttgaaagaacaccagcttttaccctattctcaaggttatattattcttttatgtttatctgaggtatagatctcacaaacagccatgaatatgtgaatacattcacatactgatggatctggaattctaccagtcagcctgataaatacccactaataaaaatatctgtagattggaatattttgtttattcatttttgtagaaatgaaaaacaacaaacaatatcctcagagaagaaaaattcctgcatatgcacagtaggtgcttactaaatatatgatgaatgatgtacaggctgaaatatttctcccaatgtatattatgtctgctcattctaatatttgtgatatttatgtacagtgaggaaatgcccagtgtcaaagtggatcctcaacgtgaatatgctgcaggaactgaagtgtgatgtaggcagtttccagaagcactatgtggaggcagtgatctgtaatgcactggtattaaggttattgaaatggtcatgaaattgccatgaaattgcatgcgtgaaatcattgcaaggtttacgtcccagtgaggatggaaatgaagagcttggaaacaggaattggagctttcagtctagaaacaaccttggaagaaatacaagtctcctgaatgttattaaataaatcatattaagagaattcagagcctacagtacttgatatttgacatccacctctctgcagtaacatagcaggactgaagagcaccaaaaccagctagagtcttaatcacgcattagactcagaaacttctattaacatatggcagagggagaacacccttttcagttaagcatgtcctttgattctctctttaagaaatcagtgtgtccatatgcagatgcataatgacaacctgaatatttacgtaaacaaagaaaaaaatgactcaaagcaacaaaaactgtgggaaaataccaacacttaggtttctccatggtaatacgtggtggatggaggaagtgagagaattgtagctagttcatagtgctgcgctgggtagccctctccctttgatccccagtttcaaccactgtacaaacagtcaaaaatcagttttgctggaatctcctttttactctgctactctggctaaagtcttccacttacttttctcacttacaggtacctgaatatgtgcgtgcaaatgtaaaagtctttagatcaaaataggaacaaggaaagtttatccgtttcagtttaggatttggtgggtgtggcaacccaggaagacctgagaaataaccactgtttggtttgaatgatacatttgactgccattaaaatagcatataattatagcctaaatgtagacttaatttttaacagatttatctgaactttcaaaatttgtaccgttgggtgtaacgatctaaaactatcttatgggagatgttacagcagttttcaaatcattgagctaatatgaaatctggactttttaaaacccctctgatctaacctggttacgcagttaacattgtatctgggaaaggggctttcattttacctagtctccagaagtcaatggaattattctgtaaatagttcaggcttttgtctaaatatgtgaagactgacaagactatctccgtgagaatccgcacccccccaccccaacctcccccctccttaatcatgtttcacaaagtaaatctatagacgttcctcctgggttttgggagattccccatcctaaacaaaccagctggaggaaaggaaaggaaggaagaaataaacgcaacacagaagttctcctcagttgacaaaaggtcaaaaatcattaacgtgtaaatgttgctttttccatcccaaagcaccttctcacgtagagtccagggactaggaggactcacaacgcagcgatgggcagccaggccctgcaggagtggggacagagggaacccggccggtggcccgaccctgcagggaagaaggacgtgcggcgagaagcatcggattcggggagggccgggacctggccgagggtgacattaccgagcacttcctggcacagcgctggtcccctccccaaacgcgctatatgtggttctgtacgggactgcctttcccaaagacagccaaggaaaaactaaagatcgacggggacacccgcctcccttcctcgccccaacggtttctcagaggctgtggggacttggtgagggtagggggtagttgtcccaaatcagcagcttcaggatgtaaggtattacagaaaactttgaagttttgttatctgtagcacagggacaggggtgggacaatagagaaggaatgttttcttttcaaaagaaaacacaaacaaaactttatttttctggtccgcggcagcctgtctgctgaacgttgacttgctttcgctttgcagcaggcgacggtcccgggcgccacctgcgcgtcggtgggaggctggtccacgcccgggtcccccgacgcccactgcaaagggcagtgggaatgacagactgtaaaccctctcgcctgcgtccccttcaagcaccagaaacccaagttggaactaattctttctttcggaaggtgcaactcccctcccgcgagctccgcggtgccgggccgagattgccgagaggaagcggcgcagcgctgccgccaaggctcctcctgtcgccggtgcggccgggactacctggcggcgcggcgcgtgcagcgcgcagagtcccgggagcccacgcctccgcctccgcccccgccccctccgcctcccagtccacctcgcccgcccgccctctcgcccggcggagagcacagcccactccctcccacctgcggccgccgggccgccctccacccacacctctgccgcaggccggacccagtgcgcccgcccgtcggtcagtccaggccaggcgcccggcgggccgcgctcacgcagttggcgcaggaggccttacgctggcggcgcagtgcccgccccctgcgctctccccgccccctccctccctcgcaggggccgagcgaatgtagcccgcgagagaaaatggcggcggcggcggggaatcgcgcctcgtcgtcgggattcccgggcgccagggctacgagccctgaggcaggcggcggcggaggagccctcaaggcgagcagcgcgcccgcggctgccgcgggactgctgcgggaggcgggcagcgggggccgcgagcgggcggactggcggcggcggcagctgcgcaaagtgcggagtgtggagctggaccagctgcctgagcagccgctcttccttgccgcctcaccgccggcctcctcgacttccccgtcgccggagcccgcggacgcagcggggagtgggaccggcttccagcctgtggcggtgccgccgccccacggagccgcgagccgcggcggcgcccaccttaccgagtcggtggcggcgccggacagcggcgcctcgagtcccgcagcggccgagcccggggagaagcgggcgcccgccgccgagccgtctcctgcagcggcccccgccgggtgagcagcacggccggggtcgcggcggggacttggagagcgggcagagggcaatgaatgaaccccgggcaccatgcacggcgtcccggggttcagcgcagcgaggctacgcgccgctcgccgggacctacgcccctgagcaccccccgaccccttcggagtcgggcggcgccccggacccagcctgggggaccggacggggacgtgcggaagagtttgttattgtttgcagacatgtgacaggcgtgcgagcctctctgcggggaaccgttgcgaaaaggtgtagggggccacggctggctttgtgggactcctggaatcggggctctccgaggagcccgggggcggggcacggccctgcggcggcgcccccggacgggtgtccccggggcaaaggcactggggggcgaggcccgagcctgaggcgggcggtggtcggaagaggggcggggtgggtgagaagcccgaggtcgggtgggagactgagaggaccgaagagaaagtagcaggtcccagcggccgtgacaggcagagcccctcggcccgcccgggactcgagtccctaggcagataccgcgggctgggcccggacgcaggcggcgcgcccccagcgccggccgcagggctccaggaggacggctcggtaacgcctgtcaaagccgtgcggcgggaggctgcacactcgcggaggcttgcagtcttttaggaagtgcggtttgtctaattgcagcccccaaggggctttgagtgttcctgggaatgcgaactgcactgctaagtcacttgagtgacttctgtttggagtttgaatttggcctttgaagtttgcatttggcggagtggtgtaagagccaggaccggatgtgtcagccattcagtttcaaagcagtggtgactgctccccgcagcccctccggcttggcccggggactgcggcgcgggtgcagtgcttcctgctcggtgccctggcgcgggccgcccgctgaattccaggggccgcagtgcggtgggcttcggctcagatgcgtcttctggtgcatatgaagtacagtatgtgtaaggtaatttagaccagcggtttattggcctcgcccatttttggctactggaaatttttatgttaaaggaaattcttttaagtgtgacagctacatccttgtttgtttgttttttaaaaacctgattaacgtatgcaaagtacaaagtcttgatgggtattttgagttgctggaaatgtttttgtgatagtccctcgtggccctgtagaattccctgacctttattatgagaagaaagcgtgtcattttgtgagacgaatttgacagtaggagtccttggtttggattcattatctaaagtgatctggcattttttgtgcatttgattatttgcttaaaatcacgatccatttagtatttggaagtccccttcctctccccaagaactaaaaaatatgcttcgcactgtaccatggcactactgagaccaaaggagatttgtgactgatacagttttgtgtgcacttgtacatgtaatttattcttacaagagttatgtacctctatagttttcccatttctgtgcagattgtattaaaacttaactggaataattctttgaaggcaacttctactttaaatgaattccagataaaaatttttaaccccaaatttaagaaattgtatctattgagacctaactttttggatacaataaataatttagcaaacgtcagcattctagtactcttaatgagctgtgaatatagtagaagagcatccactgtaaaaataatgtactgaaattgtttaatgttgtctcttgacacaaaataagaggactaaggtggaggcagatagaatttagggactaagtaatccatgcttagtatttgcgttttgtaaccgaggttttttcccctttgcttaaggtgtagattataattgcacagtataagaaaataatgggcttgtaaggat

SEQ ID NO: 125 - DNA, 6203 bp, Homo Sapiens
aactgaggctcacagagcttaaatcacttggccaaggccacaaacagctataagaattacatttaggcagtctgattccaaagatactagtctattctgtatctcatagacaaacaatacatattcacttttttgttgttgttttgttttgagacggagtcttgctctgtcacccaggctggagtgcagtggcgccatctcggctcactgcaagctccgcctcccgggttcaagcgattctcctgcctcagcctcccgagtagctgggactacaggcatgtgccaccatgcccggctaattttttgtatttttagtagagacagggttttcctgggttagccagaatggtctcgatctcctgaccttgtgatccacccacctcagcctcccaaagtgctgagatgacaggcgtgagccaccgcgtccgacctatattcactatttataaattggagagaataagaaaatcaaaagggccaggtgtagtgactcacacctgtaatcccagcactttgggaagccaaggcaggaggattgcttgaacccagaagttcgagaccagcctgggcaacatggtgagaccctgtctctacaaaaaaatacaaaaattagctgggcgttgtggtgagcaccttattcttaggaagctgaggcaggaggatcacctgaggccaaggaggttgagactgcagtgagctgtgatcataccactgtacttcagcctggacatcagagtaagaccctatctctaaaaaggaaattgagaagaaagaaaatcaaagggaagcaaaatcactcactctcactacctcaagataccctctagaagttggtattttagtgtggttcctattgttttctgtgtcagttctctgatttgagcaaaatctttgggacgtcaaacttaaaatcccctttacttccttggaaaccctgtagcattagcccagacatgtccctactcctccttgtggcaaagagaaggatctcgtctttggtccccagagttctggcctaagcctccctccaggagggaagatgagtgttcagacactcagagtagctgggggagacacaggcctgtgaaattatcctggctcaactattaggtcggcagaatcccagtgaagggagccctacctctgagccccatctaagctttggctatgggtggggcagataagcaggaatccatccctataggctcaatgccaacacccttaggtgaaactcttgatgaaacttgaggccagggctccggcaagcagggaaagaacgttggcaacagaggtctccatctctgaggactctgccaggggtcagagatggggcaatggtcaaaaggaaggaacaggccaggcacagtggctcatgcccataatcccagcactttgggaggctgaggcaggaggatcgcttgagcccaggagtttgagacctgcctgggcaatgtagtgagatctgctctctatttaaaaaaaaaaaaaaggaaagaacaagtaaacttctgagaaacaggctgggggaggcatcacgtagctggaattgctgccccataaaacagaatggtatgtgtcactgccacctccctttctcagtcctctctctccccaggttgctagcgtcccccctgggggatcaaactggactgcttcccagcctcagacagagagcagtctgagtcaggcaggaaagtgggacagccggggagctggaccccaccctctgtgagccccgctggtacctgatggcatgtggcttggagagggcaggtgacctggcgtggagggccagagggtaaatcctcaaacaagtggcaacaggccaccaacttgaaagggaaaattgtgtagtgatgggaaatgtgtccaacaaacctactgggtgactaattacaaaggctgggctggagcttcagaggctgcttgttaaacacttcattaagcggcactctgaaagctgccacctgcgcattctgggagctcagaggggaccctgagggggaatgaggcctggaggatggaaccatcttcaggtagactgagaaggagcctggatctcacttccaaacacagtctggagctcataggtcagaggcctcaatgggagaaaagctaaaggaagagggtgcagaaaggagtttcagggaattggtggctatgtgactttgagcaaatctcacccctctctgagacttagtgttcccatctctatggtcctgtgtgtgtcacagagacatggtggggattaaattcgatcgtgaatatgaaagtgcttgggaaactccatggccctacctaaacatgagttatcctcacctgaaccaaggggggaagttacctggcaggattaggaaccccatcctcctgaacctttatgggctctgtcgaggctgaagcagccaggggctaaagccgtccttagcccctggaagggcactgtgaaagtggatctgatttgagaagccgtttcctgatgtgggcagccatgtgatgccagccccgaacaagagggggcagcctggagcctggaaaggtgccagtgcaggtggggcccacgcccagatttctcctgctgactgttctgatgattcacccccacatcccagcctttttacctttactgcagagccggaaagggtgtggggaagagaggagagggaggcaggtcttgggccctggtcccgccccctgctcctccccacccttctctgggcctggccacccagccaaaaggcaggccaagagcaggagagacacagagtccggcattggtcccaggcagcagttagcccgccgcccgcctgtgtgtccccagagccatggagagagccagtctgatccagaaggccaagctggcagagcaggccgaacgctatgaggacatggcagccttcatgaaaggcgccgtggagaagggcgaggagctctcctgcgaagagcgaaacctgctctcagtagcctataagaacgtggtgggcggccagagggctgcctggagggtgctgtccagtattgagcagaaaagcaacgaggagggctcggaggagaaggggcccgaggtgcgtgagtaccgggagaaggtggagactgagctccagggcgtgtgcgacaccgtgctgggcctgctggacagccacctcatcaaggaggccggggacgccgagagccgggtcttctacctgaagatgaagggtgactactaccgctacctggccgaggtggccaccggtgacgacaagaagcgcatcattgactcagcccggtcagcctaccaggaggccatggacatcagcaagaaggagatgccgcccaccaaccccatccgcctgggcctggccctgaacttttccgtcttccactacgagatcgccaacagccccgaggaggccatctctctggccaagaccactttcgacgaggccatggctgatctgcacaccctcagcgaggactcctacaaagacagcaccctcatcatgcagctgctgcgagacaacctgacactgtggacggccgacaacgccggggaagaggggggcgaggctccccaggagccccagagctgagtgttgcccgccaccgccccgccctgccccctccagtcccccaccctgccgagaggactagtatggggtgggaggccccacccttctcccctaggcgctgttcttgctccaaagggctccgtggagagggactggcagagctgaggccacctggggctggggatcccactcttcttgcagctgttgagcgcacctaaccactggtcatgcccccacccctgctctccgcacccgcttcctcccgaccccaggaccaggctacttctcccctcctcttgcctccctcctgcccctgctgcctctgatcgtaggaattgaggagtgtcccgccttgtggctgagaactggacagtggcaggggctggagatgggtgtgtgtgtgtgtgtgtgtgtgtgtgtgtgtgtgcgcgcgcgccagtgcaagaccgagattgagggaaagcatgtctgctgggtgtgaccatgtttcctctcaataaagttcccctgtgacactcctcctgtctctcttccagttcttggcgatgggctgggagtgggactggaatctgacttagagaccctgactttggacctctgagttagggccctgaactccctaggtggctcagtggcccgcacgcaagactttgagtccaggtgaggccggggtccggctctctccatcacggcggccccagtcaaactggacgggaccgggagggtcgggtgaacccacaggaggcgccgtggctcctctgccgggctgaggggaggtgagtgggagccacggcgcgggaggctgacgagctctggtggagcggggcaggaaatagtgaagtctccggcgtgagatctaaggacagcgccgcagtagtgagcggcactgagcacccgatttgcaggcgggtcacagtttcatcaagggctcagatctcagcggaggggagtacgatctgaggaaggggtatagcgccgccaaaaaagcctagatcttaggagagggtcacgtcccacagagttcggagatggagacaaaaggaaacgggctgaaggggaggaaggacgagctgggtgggaagggccgctgggagctgtgcctaccgagcccgctgcctgagctctctgcagccagcaacacgccggaacctgcagccgccttgctccgtcccgccttcgcagccctggactggaggcggggcccgaggccaataccgcccaatcacaggagggagctgccccagggtaccgccccgggggcctgactggccaatgggaaagtgagcggcggaacgcgcgcggcgagtttcccgccgcccgccaggcctggcggacaccacgactcgctgactgactgagaggcgcccccgccgcccgctgagcgccgaggggcggagctttcccggtttcactcagacaagttgccgcccgtccggcccgagagctgggaaccctctagagcagcgggacgagccaggatcgcaaaatgcagtgcttgcccgttgagtcatcagctcacccggctgggcctgggccgggccggccgcgggggttggctggaaaaaggccgccaagatgcccccaccacactccgaaatccaagcagccctggacctgtcgccgagaggcttggattgtgtccctggctggctgtgcgaccttggaaaagccgttatacctccctgggcctcagtttccctcttgtatcataaggggcttggactaaaggctaacacaagagtgaaaatggcggttttggccgggcgcggtggctcacgcctgtaatcccagcactctgggaggccgaggcgggcgtatcacgaggtcaggagatcgaggccatcctggctatcacaatgaaaccccgtctctactaaaaatacaaaaaattagccgggagtgatggcgggcacctgtagtaccagctactcgggaggctgaggtaggagaatggcatgagcccaggaggcggagcttgcagtgagccgagatcacgccactgcactccagcctgggcgacagagcgagactcggtccccccacccaagaaaaagagaaaatttgcgattttggactcagacagcctgggtttgactcccagcctgccttggccaaggctcttaatcttgcttacctttgtgtcctcatttataaacaggggaactgaaaaacagtaccttccttttatagttgctgtaaagtaacccataggacagactcaacaaatgttagctttttttttttttttaagacagattctcgctctgtcgcccaggctggagttcagtggcacgatctcggctcactgcaacctccacctcccgggttcaagcaattctcctgcctgagcctcccaagtagctgcgattacaggtgcatgccaccagcctggctagttttcttatatttttagtagagacggggtttcaccatattaaccaggctggtctcaatctcctgacctcaggtgatccgcctgcctcggcctcccaaagtgctgggattacaggagtgagccactgcgccaggacttttttttttttttttttttttttgagacagggtctggctctgtcacccaggtgcgacagtggcgtgatctcagctcacagcaaactcgagcttctggtctcaagcgatcctcccacttcagcc

SEQ ID NO: 126 - DNA, 6193 bp, Homo Sapiens
catgtgaatctggggtgggggatgcacattcagtccatagtgatatccttgtcttttctgggttctttccctgtaaaggggcttttgtaggccttggctcctaatcaactccaccagacaacacccctcaggaccatgcacagggcatggcacatgtagtaggcattttggaggcttttgcctaactgtcaaagtgactgcaaaagagggcaagtgtctgaacaaggtcttccacagaaatcataataatagccaattagatattgagcactttctatgtgccaggcactttacaaatatgacatcacgcttcctcacaatgaaccccacattatgtaggaacaatcacaccaattcccatttcccaaggctgcatggttaggaagttgcaagctggcatctgaacctggcattctggccccgggccacctgtatatatatatacatattttggagatggagttttgctcttgttgcccaggctggagtgcaatggcacaatgtctgctcactgtaacctccaccacccgggttcaagtgattctcctacctcagcctatcaagtagctgggattacaggcatgcgccaccatgcccagctaattttgtatttctagtagagatggggtttcaccatgttggccaggctggtctctaactcctgacctcaggtgatccacctgcctcagcctcccaaagtgctggaattacaggcatgagccattgtgcccggccccacctgtagtttttgactgctctgtgatgcttctgcttccctggagggtctaagatgtgggcgatgagatcataggttgccctctgacccctgtgttgctttggaccatggggtcattggcacagtgggcggggtaccagaggtaggttctgacactgctctcctgaaccgtgagcatcccagctctgctgcactcacttgctgtgtggccttggacaaggttttagtttctctgaaccttgatcccatctgtaaagtgggtgcagttacagtccctgcgtcactgtgctgttgggtcaattaagaaccaactgtgtgtaaagcgcccagccttgtgcttggcattcaaggccctgccactgcctcctcttattccctggaatgataataacaacagtaaacaacattgtgtgctgtttgtcatgcacttattcttttcctgccacaaggactctcactcgtacttttcagttgttaggtttctatccccattttaaaggggaggaaactcacaggcaaagtgacttgcacaagaaaatgtagctactaagaagtgcagccaggactcgaacccaggtttgactggagtcctcactctcagctcctaagctcctggcctactctccacccttagaagaggtgagatgatgttcttcagagtcaggaaggaaggggctggtgtgtggtggctgaacagcagtgtgacctgagcatctgtgagccaggaggtgagagagagtgtgtggcaccctgtggttgggtagatcattgtgggaggatgggacacgccgtgggagcatgggacacaccatgggagacggcagcaccaccagctgcagggccatgtggacccaggtgatggctttaggcctcatccacaggcttatgatgggaagctcttgaatattttttaaaaattgtcactttagaaaatcatgacaaagtcatttctaaatgtcaactgatacagggtgtaaagtgaaaaagggattttcctctccccatcccacacttttgagatgaaacattgtgatgaatttggaatccttccagagctttctttttttaaagtttttttaatttttaatttttatgggcacatagtaggtgtatatatttatggggtacatgagatatcttgacacaggcatacattgtgtaataatcacatcagggtaagtagggtatccgtcacctcagttatcattcctttgtgttacaaacaatccaattctactcttttagttttttttaaaattattattattattttatttttattttttttgagacatggtctcactgtgttgctcaggcagagtgcatgtgtgtgtgtgcaatttcctttctttcttctctttttttttttttttttttgagacagggtctcgttctgtcatccaggctggagtgcagtggcgcgatgatagctcactgcagcctcaaactccagggctcaagtgatccccccacctcagccttccaagtagctgggactacaggctaatttttaatcttctatagagatacagtctcactatgttgcccaggctcaatcttctttacagagataatagcagctcatgtttgctacaggtccagtaccacattaagcccactgcctgcattatcatgtttgattgctcacaaccctattatgtgggtagcatcgtccccattttccagaggaggaaactgaggccctaatatgcccagaggagattctaccctgccgctgccttcttttcactgaaacagtgtgttggggtctcttatcaggccactctcagctctcattctttgtaatggctgcactgctgtccacttgaggactggagcccctttatttaaccagcccctctctgaggaacacgtaggttgttaatggctttctgtggagagttttaagcggaggaggcccagttgtctgtgaggtttacagagccgcctctggctgcggggggagggtggactggaggggcccacactgctgtgtccaggcctaggatcacagggccctggcctgaaggactggagatagacagggtggaggggaggaatgcgcttgaggaagattcaggaactaccccggggctccccaagggcagagccccacacagggcttggcacgtggcaggtgctctgcgaatacctggagaatgactggggtgggatgtgcaggggttgtcgctgagtcagtgatggggatgggggtgggggggagatgcaggcttagcgggaggtactaggccacttggggacctgctgagctcaaggcactgggaacgccgagggaaaagttcttatagcagcaactcggcacctctcgagggagcgagccatagtgcaggccccctgtctgctgaggagtccagagcccacggtgaggagtggcttcccgaaggaaaggggccacctttccctgggaacctcaggcagccccattgtggggcccccactgcttccccttgacccccgcaagggtctatctctaccttggaggctgcaagtggcggaagagatgaggggggttggcccctctccaaggagcaactcatggtgactcggcagttgggccccagaaccaggaagtgcaaggatagagctctgtgccagggaggagggtggtctctcatgaggtcccacggcatggaagcagccctccgagactaactcccaccctcactgagtcatcgagtgaagagccgtgtagctttcgagaccagcccagccgacatggtggaaccccgtgtctactaaaaataccagaattagccgggagtggtggcactcacctgtaatcccagctactcaggaggctgaggcagtagaattgcttgaacctgggaggcgaagggtgcagtgagccgagatcacaccattgcactccagcctgggcgacagaggagactctgtctcaaaaaaaaaaaataataataataattagccaggcgtggtattcggtgactgtaatcccagctacttgggaggctgaggcaggagaaccgctggaacccgggaggcggaggttgcagtgagccgagatcgcgccactgcactccagcctgggcaatagagtgagactccatttcaaaaaaaaaaaaaaaaggaaaagaaaaagaacgagagagcttggagtaaaaaaaaaaaaaaaaaaaaaaaaaggaaaagaaaaaagaaaaagaccgagagagcttggagtggcctgagaagatgctctgaacacactaacacataaagtgaaaagagggaggcggcagtgtagaatctcctctgggtatctcagggcctcagtttcctcatctggaaagtgggggccacagtgctacccgcatgaccctcagtgggccattcttgctcaaggacgttctgctcggagctttctcaggctttctctgggagtggggtgggctgctttatcctctcacccctcttccaaggccatctggctgctttgtgagagagatccctgggggtaggaggtggggcctgtgagtttcagcccctgattcccacctgcccagtgtggtggccccttttcactctcacccatgctgtgtgacttcaggcaagttcttcaacctctctgtgtcttaatgtcctcaacagtaagataaagacatgattagtatttacctcctagattatcatgaggagccgatgagtcaatgtttgcaaagtacttagagcaaggtccaattcaaggtctgagctctgggagtatttgaataccacggaatgatatttagtcttttcagtgtggcattgcaggaacaaagtaggatgcaaattatacatccatgcccatttagtcttttgtctattctgcaaatagttccagagcacctagtgggtgtcaggcccgtcctggtctctgggggcatggagatggatcctgcctggccctgacagccgcgagtgcacagtggagggcactgggtggaccccagtttgttgaccgtcttgcgttgctgtgacgctggaaggaaacgcaccaccacacccaggtgtttgtcttctaggggcagaattatggggcattttcttttattttttcttttctttttttttaatcttcttgtagttctcaaagagtccactctgaatgataaaagttaccatttacggaggcctggtaacgttccgtgccatcctgagcatgttccgtgtacttttctcacggattctcccagcagtcctgacacgggtgttattcccgatcgatagagaggaaaactgaggcgaagggcggccggccaggattcaaaccagggagtctgctccagcactccggctcttaacctcaaccgtctgcctctccacaaacaccaggatcaaccaccaagaccaaaaaaacagtctcacaaaccatcaaacattgcacttggtggctcaggaccttagcttcgtcttaaaggtccctgttatgctttttctgagtgccccagtgtggagtggtcttcgtgtttgtgagtgcaggggtcaggggttgtgtcttttcttcttgtccccttccaagaggtgacatgtatccttgatactggaagggcccttaaggtctagccctggctctctgtctcccttcatggcacatcagccaagtacccattctcccgtctttgattacctccagtgacagggagctcactcctcaacatttattttattctaaagaaaattcaggctcttagatagttcttcctccataaaaattttttaaaaaaatttttacttcctcttaaagtctcataaacaagtcccctgctttggggtcctgaggcaggacctggctaattcgtctctatgtccccctatagtgaggagcacagggcctgctagtaggtactataaatgctgcaccaggaagcaagtggctagggggcgggctggttgggcccccatcaatccttgggctgcaggtaaccaggtcagcagttcttgtgggacaccagctgggtgagtgctgatgggtatcgtgacctcaatggaataggttgccatagaaactgactttggacctgtccccaggtccattgacttgtccctcaggagaccatggtaatcccttgagctcttcagcaggtctccccagggcctccccaaccccacattctctgagctgggtggtccccagggagcatgcaaaccatacccccattgtgcagctgggtagcctgaggccccaggggcacaggggacaggctgaaattcacacaggcagggggcgtctcatagctgggctgggcgctcagggcaaacagccttgcccgaggacccagccagtcagggggccttttccccactcatgggttctcagaggaaattctggaccgattcccaggccttctgcctccccaaagaataatcggaacctgcctccctggtgtgtccagaattacacaatatcaataacggctgaggtgacctgtgatgcccctagcaccctacagtgtcttg

SEQ ID NO: 127 - DNA, 6193 bp, Homo Sapiens; identical to SEQ ID NO: 126

SEQ ID NO: 128 - DNA, 5999 bp, Homo Sapiens
atttcctgtttatgtcactagactttgaatttcaaataacaaaaattttcaaagtctttgtatatttcaaaatataaatttcacagaaacaattttaaaatgtttcctattataaaacaagttatctttctcattcatccacacagaggaaatacacatctgtgttcagtactttgtgtcctatttctcaacctcaatccattgacagacctcccctgctcagttttacattttttgatgagtgcttcttggcctataaccagctgtgaacacacaaacgaacaggcagccttctcaagtatgggtagggcgcagaagaggaacttactggactggggcacaaagtcagctgcttgtgagactcatcactgggtggaagtgccctgaggccaggacttctatgtctcgtgtctttttggacacagtatccagaaaaagaccagcccaagacccggtcctccataaacacttgcagaatgaattccttggaaagcttttaacaagactctcaaactctcagggtttcttccccttagcaatagaatgaggaaagttacatatgctaccccgattttcacaagtatcaaataatagaaagctggggaatgcatttgtaaaaaagagagcattgtattagcattgacctttttttttttgagacaagtctcgctctctcgccaggctggagtgcagtggcgcaatctcggctcactgcaacctctgactccctggttcaagcgattctcctgcctcagcctcctgagcagctgggattacaggcacgcgccaccatgcccagctaatttttgtatatttagtagagatggggtttctccatgttggccagaatggtctcgatctcctgacctcataatccgcccgccttaggctcccaaagggctggcattacaggcatgagccactgcgcccggccattattgaccatcttagtgagacctccagcacctagtacgggatctggcacacaggaagcactaattgactacttgctcttagactacatgtattttcagcccatttgacctcctacatcgctgatggtttatgtatgacttctagaaattttatttctacatggaagaaacctcgtttcctattcccaccacccccccacccccccccccgcttgtttcccactgtattctttccggaggcacgcctgcagcccagccctccttgcagaaccctgtgacaccagaggcgtgtgtatccagaatcaggcagattcctgaactcccactggtcagccagtgtctagtgctgctcttcataaacaatgcctggagtgtgctcacacgtgtacctcttcttggcaaagacagtaaatggaaggagacaaggagttgtctaataaacttggcattgagatgaaacaggaaacaaagacatgtatccggataaagataaatactgttctgagtttctgatcttgtcaacttcagattttttaagtgcctgtgtcccaggaaaatgatttgcctcactggtgtgcttcatttctttcaatattagacttaaaagcaagccctcctccagtactggattaacagttttgtttgaaagatgtgttttaccctcgggaaccggccatactgatcctatctagtacttccaattctgatttagggatgccataagagaaactttttaaacaagtaattctcttctacttttttgtctattcctcaggtctctcaatggttacagaacccatgtctgtgtctaatatcatggcagctgggacaaagaaaaccaagatgaaacatttgagattgttccagctgaaacaaaccaaccaaaaccccacaggtgccagccttgaggcaaaggcgggacagtgtcaggcgaaatctttgggtcccagcctcagtctccccatcaccatgtctttttcacttaaacacgtttcactgttttgtcatctatagattcaacaatgtgatttggacactgggaataagagaataagatttgatggttgaaataaaacacaccacgagagaaccgtccacaaggaaactctaagatgccaagatgcgggacaggtagaaaggacagggctttgggagtactctgggttttcaggacgaatctgtatcagcctcggcgctgcgaggatattgcatcaggctctttactcctgaacgccgttttagacgcctaagcagattgtgctgctgcctgttcttccccgttctgtgaattctacactgacttcaagtgcacgaatgagctacaagataaggtggaacctgccggccgggcacggcagacagcacctgatcagcgcctcggagggcggagctggggggcttctccactcgggactttgagggacccccgcggagcgctccgcgccactcggcggtctagctgcagagaaagcccctcctcacccggggctccctgtggcccacaggggaccatcccacaccccgtgcagccagcggcggagaaaccagctggaaatgcagtgggggtggagttgcccccgcgaggacccacggaccgcccaattactacggagtcccagcgataacgtttggagccgtttggttcgattttcggaaccggaccagctttccagtaacttgaactccctgacgggtctcggggtccacccaggggtggcgaggcgggctcgggcgaccacggcccgctcagtgcccggcacctgcgcgccccgagggcggccgcattacctcgagccggctcaggctggagctcttggagcgcgacttcctgcgcaggtacacagagaagaacctgcgcacggcgaacttcttcatgctcaggtccatcgccccgcgcccagcccggagcagccgcagggccgggggacgcgcatccccggcatcccaggcgcggggctcaggtccgcgggcgggcacgcgtggccagggagcccggcacggcggccatgggcgcggggcgtggggcgcgagctgcggtcacaaagggcaggccgcgccggccaccgcggccggggccacaatcgctccctccgcctccttctccgcctcccctgcgagtaccagcgccggccacgcgccacgcctacaccacgcccaccaccactaccaccaatcagcgcccgccgctccgcgccccggcacgcacacctcctcctcctccgccccgccccgccactacggccaatcagcgctcaccacccctcccgttcccacccaccaccagcactgccaatgagagcccaccgccccgcccgggagagccccgcctctgccgatacctccaatcatcagcgccgccctgtggttccaggtgcccatccctcctcctctttctactccttcctacaagaaccagctccgtgcagccccgcccccacgcggttccgcccacggccccgcccacagcactgcccgccaatcagtgcccgcagccgccgcatacctaatgagcctcggcccgggacagctcccggcccgggcgagttgtgcagctgctccggagccgcgcagtcgcgggcgttcctgtcacgcaacttcggcccggctgctctttcttccagcttggggccgtcattatgttttccttccttaaaacatccctatgcacactttgtcatcatgtttttctctgccgaaccaaactttaattgttgatcagcaaacgcagccaaaacctcagcggcacagcgagcgagggaccgccgcctgccagcgggccctgcagctcggccaggagccgccctccgcggaaccggcgccttccctccgccggagcggacaaaggcgcccgagggcgggggctcaggcagccctcggggcgcctccctcccgcggctgcagaacaaagacgcatccgccctccgcagccggtcccgctctaggaaacgtctacacagatggcttatcagggcccgcgctgggaatacccgggcggggtgacctgggtctagggcaaggccctcagacccgctgctggcggcagcgccgctcgggatccgccttaaagggaaacacttttttcttttttttcctagaaatgctcaccaagggctgcagcagggccgagaatgcgggctcacgaccccgtgcagcctgctctgttttcctcttgtgcacgtgttgagtttgtatttaaaaacagggagaaaccgagcccattgacatagcaccatcaccacctgcaaagagcagaaacgagtgcggtggtgagttgacaagtcttgcttgctcttttgcagtgcgaactgcaaaatcctcgcgttgttttgctccctggactagtcagatgttgcgttaatacttgtgtagtctattttggctaaggtgggtagagaggtcagaatgtccttaaataagagctttaaagtcatgctgcatccgggctgaggtgaggtcagataggctctctgggtttcctggagacccgcgttgagcggtgctgctccggagtggaagccgggagtttagcaccacgactctggcgctgccccttccttgcttggtgaacttgggtgccgttgcacgttgttcccacgactcatctctaagaggaaaatacgagtgaaacctgtctcacctcccttactggataccaagaggcttatgcaagatcacggatgtgggagtgctttgtgaatttaaatagtgcaattgattttcatattatgtattaaaggatctataatgactattctttaaaaacagaagtgcaggaccccacaaggacaccaaacaccactttttgctccttttcaagatggtgtgccagttaagtgcccatgaaaactgctttgcctgcttcctttaaggttctgctgggagggtagtaatctgtgctctcagaaccagcctcttagtgccctgtatccctgctgggaccctcaggcatcctggctctaggcaaacacaaagacactctgtacccagcacgggaagaggtagatggacctccaactggacacagactccgggaatgagggaggaccaacccgaccatgcttccctcggaaggggagccagtaatactggccggagacaggagtgctgaatgccacctataccaactcatgggcatcctgttcaggacaaaagccccaaggcaggcaggcctaagtcaaggcttgtgttgtaccaacaatagtattttgacctgatctgacaaaattggaaaggaaatatttcatgggacattcattagttccccaaatttgaaggcaacaaaactgttctgttgaacttgggagggaaaatcattcagatttcactggaattcattgctagaacaataaatctgtttgcctttgtttttctcctggtaaaatacacgtataccaaaatctctagtgatcatggaacactacttcatgtgattatgtaatgaaatcctccaaaaccactaaatctagggtaggtataatatcaagacccactgtaaccgaaatccaaattatccttaccaaataccagaaaagaaagtgaacttgataaaggctcttgcccagatgatggaatgggagaggactgaagagaagataaagagcttggtagacctctgagtatctcacatttcctctgactcaagcacagtaagtttgagactgaattccgtggtgactgctgcttctatgagtaccagattagctgatgtgtggtcaatgcaattccacaagtgattatcgagcactaacatctggcactgtggtggtcatttgtgacacaaaatgattacaacatcccaagaagttcacagtcttatggaagagaaggtgagtgaacagacaaagctcatgccgtttttatgtaaagtgaaagaaatgcgtaagagatgaatgagaagccaattctaattggcgaagtcaaggaggagatggcctttgctctgaacccctgagggtaagaagatgagggaataagtttcctggacagacaagaggaggcgggagtcccaggctgaggaataacagggcactgtcaggcagctgtgacaaggtttcccatctctcc

SEQ ID NO: 129 - DNA, 6091 bp, Homo Sapiens
agcactttgggaggccgaggtgggtggattgcctgagctcaggagtttgagatcagcctgagcaacacggtgaaaccctgtctctattaaaatacaaaaaattagctgggcatggtctcagctactcgggaggctgaggcaggagaatggcttgaacccgaagtggaggttgcagtgagccaagattgcaccactgtactccagcctgggtgacagagcgagactctgtttcaaagaaaaaaaaaaggtaaaaaaaagggtaatcttccttttcttattaactttatttatttatttgtttatttatgtttttgagacagagtctcactcttgtcgctcagcctagagtgcagtggcacaatctgggctcactgcaacttctggctcctgggttcaagcgattctcctgcctcagcctcctgagtagctgggattacaggcgtgcgccaccacacccagctattttttttgtatttttagtagagatggggtctcaccatgttggccaaggatggtctcgatctcctgacctcgtgtcccacctgcctcggcctcccaaagtgctgggattacaggcgtgagccaccacgcccggcctcatttttttatttttagtaaagacaagatttcaccatgttggccaagctggtctccaactcctgacctgaggtgatccgcctccctcggcctcacaaagtgctgggattacaggtgtgagccactgtgctgggccgaatggattggattttaaagcatacttcaggcagatggaataagggaatagtctgagtaacggtgatgagaaaagaaagaattggccaggtgcggtggctcacacccatgatctcagcactttgggaggctgaggagggcagatcccctcaggtcaggagttgaagaccagcttggccaacatggtgaaatctcatctttactaaaaatacaaaaattagtcaggtgtggtggcgggcacttgtaatcccagctactcggggggcagaagttgcagtgagccaagattgtgccactgcactccagcctgggtgacagactctgtctcaaaataaaataaaataaataaataaataaaaaagaaataattgtatttgatgacttggtgagtcagctagcataagacatgtgtaccagggagtagtataaaactacaaggttgtttagcttggagttagagcaacttgtcaattttattcccgaggcaatgggaggtgtttaaagtttttttgcgatgctgtctgaactatactttaggaagcctatggtggcaggatgaattgaaggcacaggaaaaggtttcaatattcaatagtccagggaaaagaaacggaggacctgcaactaggtgttggcactaagggatggagctttgcctagattttccctttgtagattcttctcttcctggatggaaaatgataaaaggaaattcttctgatagtaaattataatgttgactccaaaatcaattctagataaaggcgattaaattgcaaacccaggatgcctgtctgaatggtccctgcattcaaagatattttcccctttacaggagcaccggataaatttaactccctaatctgtcaagggctttgtggaagagcctggagggggatcgaaggcggaactgatactgacacacctgggtctgcaaactcccaaaactgaggctcagaattagtaaattagggcagggcacttccctctttggaagggaagttcctattttcaaagttcttccaacggaacttttacattagagaagtgtaattgactgagaagtggaagtgaccaggaacagcatttctgttccctgggcgggagagagaaccccctcgggcggagccagcagcaggtcagcttctgagggggccctcatgctggcggcgccgacctgtggtgcaatgctctgagtaggagaatcttaaatacatgtttgagattcaattcccagaaacgtaactagtcttcacaagccaaaaaaataaaaataaaaaataaaaaaaggaagtgatttcttttcaagaggtcaaagggcctggaagaagaggtcctggcttgagtgtctcaaggctttctggggcctaatccggctggaatgggccgcagcattcatattcctgtccttggtcgtgtcttaatgaagaattgaaaataataaggggtggagaaataactttcctttttctcccaccatcctcccacagtgtaaataaacaaataactctaagctcgatttcctcatttgtcaggggtggggaaagacttgacatcaggactcttccattccatcgccacctgtcttaatttaaacattcccatgacccaccccagaagcgccaacctcccgcccacaaggagcatggaagtcttggtttctggctactgcgcagactccaccttggacctactccccaaccccccgccgctcctttccccgtttctccagcagagggcgcaggcccaaaggttccgccgaccccgccccagcctggccccgccccgccccggcgtaggggcggggaagacgggcacagaaacctggccgcggctttccgggagctgtgggcacgcgagctgctcgaagccggtggcccggggatcgtcgctgcccagtccggccgcggccggccgcttccccgagcttaccagtaagccggtccgcctccgggacgcgccccgcccgccccgggctcgcgcgctctgaaggggcgcgtcccgcgcactcccggcgccgcccactcccctccccacggccgctcctccctccgcccggatagccggcggcggcggcggcggcggcggcggcggcggccgggagaggcccctccttcacgccctgcttctctccctcgctcgcagtcgagccgagccggcggacccgcctgggctccgaccctgcccaggccatggccggcaacgtgaagaagagctctggggccgggggcggcagcggctccgggggctcgggttcgggtggcctgattgggctcatgaaggacgccttccagccgcaccaccaccaccaccaccacctcagcccccacccgccggggacggtggacaagaagatggtggagaagtgctggaagctcatggacaaggtgaaaggccggctgagcgcccgctgttgcagggtgggcgtgggcggagggccgcggggaggggaacgagcggacggaggaagcgggggaggggacgggtctggtgaagccggggaggcgcggagccggggtgaccggccgggggcgtgggggcagggacgaggccgggagggtggggggcggcgtgggggaggggctgccgttgggagtcggggaacgctggggtgccgcgtttggggtagccagacaaagatggagtgggggctggggcgaaggttaactgggaagtcagtggggcggaagtacaatgaggggtgcggagtttggggctctgtgcagggtgtagggatgtaggtcacggaattggcctgggaggttagcagggagggggtgaggaagagtgatgtaccggctggggctcttggctgggtgagatctgactagggaattaggttcatgggctctgactgaggaacctggctggggtcaggacagctctcagggaagctgtgctctgggtgagagtatagtcctttctcattaagatgtaacacgaagataaaagacatattgatgtttaagtgaggcaaggaaagaactttcctccccatctagcgccggctcaagttttttgttaccctcagaaacactggatgtgatccattgctggtgctgagatatgcactgattaaaccacaagttctggttagaactattatcttctgaaagatggactggctgagcctgttaagcagcagcagattctgacttcttaataacttcctccctactacatcgcttgagctgggttctttttttctggtaacggttctgactccttattacaggtcctgactttaaacttgttcgttgagcttctttgattacgcttttttgtttgtttgctttttgcaagtgcgaacaaaaataactcctttatatttagccactaagtttgtcatttgggagaattttacttccttatagttgtgtctatatgatgaaatgtagtcagtctcaagtatttaactgtttaagcagtcggacgctttgtcagaattcaatacgttttcttggtatttttcatattctttaattaattactttgacaaaattcatattgcgtatgaaaagtgattagaagtatctggcacgttttaagagaatggtgttatttcctccagggtaaaatttggttttctttggttcctccctgggcctcggttcctcttctgtaaagttcttcatgggttgctttggactagaaaccgctaataaaatgattatgaagcacttagccaatgtaatgtgcaatttaaatgcttaataagtcctgtgtgtgaattaacactccagtagtgcatgccagtggtttcatagccacctttttagggctggcttttctcatgttaaataattggtattgtaattaatgacacaagtattcgtgtgttgattatattggtggtgtagtactaattttattgttagaaattataataaaatccttacagaaagtttaggtgtgtaaaggaaactttaaatgtgtcgactcctttaaaaaaaacacatcgaagatattcaaatgctaaagtttgttagtttgctttttagggatttatcgttaaggactacaaattttactctggcatagaaaaaatacttttctaatgagtgtctcgtatcagacatgtgggtgcagtacaatcaaaattgtgttgattagtggcctctgcttaagaataatctgtttactaaagagtttctgtattctgtattctttttttttttttgagacggagtttttcgctcttgttacccaggctggagtgcatggtgcgatctcgactcactgcaacctccgcctcctgggttcaagacattctcgtgcctcagcctcccgagtagctgggattacaggtgcgcgccaccacgcccagctaattttttgtatttttagtagagacggggtttcatcatgttgaccaggctcgtctcgaactcctgacctcaggtgatccatgcgccacggcctcccaaagtgctgggattacaggtgtgagccactgggcctggccctgtattcttaaagaataagagtattctgtattcttattaaagtgtttctataaatacagagtaagttgtagatagtcctattctacaaggtagcccaaataaaatcctcccttaagtcttactccttcatctatttaaagtatgtgtattgaattttgatttattctgcagaatgtttaattatttgggaagaataaagaggactcaaagtttagactcaaattgcttttcaggtttgatagtttcacggaaagtaggcttctagcttttcccttccagtgtagggagagggatgttttatttttgtattacttgcctcggaagttgattttaatactgtctgttcccctcttatcacgtatttctagttgctctgaaaacgtagtactttctaatgtgttagtctgatacgtttatactgctttccagattttctgaatacctctgtgatgttactagattgcaccatctcttttacccttgatgttttgagcataaggtgtcctcttttttcactttatttttattgttgaaagtcttaaatgtgtcaccacaccttgacttcatgtgctataagtggtgaagaacctactgtcaaatccacagatgtcccacacatttaattctttttaacaaaatttctgggccgggccccgtggctcacgcttgtaatcccagcactttgggaggccgaggtgggcggctcacttgaggtcaggagctccagaccagctctgccaacatggtgaaatgctgcctctactaaaaaatacaaaaattagctgggtgtggtggcagacgcctgtaatcccagctacttgggagactgggacaggagaatcccttgaacctggggcagaggttgcagtgagccaagatcgcaccactgcact

SEQ ID NO: 130 - DNA, 15001 bp, Homo Sapiens
caggcccaggggcggcgcttaccaggcgtggggggtgggagaggacaggtgcccagccccgagcattcctggggagtcctgggatgggcagaggcccaaatgggccctgggctttcagtgccttcccctcgcctggccccacagacccagggaacagacggcgatcagggcctaccccaggagacgggtgtgagtgaaggggcctcacgtggcctttgtcttcggcatcccagcccagcacacagacccctccaggggaggagcaggatccccagggacccggggtaaggggtccagagacacacagttctctttcttcatctctcgcctagagggtcagctagaggatcacttgggggggtgccagctgcagccagggccgtggcgcgcatcttaacgagttcagcccagacaggatgctgggtgggcggccagccccgacagcagatgcggcagggccccactactccctgatccaggactggggtgacacaggacggggcaggtggaggagacagccacccggggcccagcatcactgtcctcatggccacaggacgcctgcaggcctgcacctgcctactccgggtccctcaggagggtgggagcacagacacatcagccagggctgccctcccagacccctcacacaaagagaccaacccacatggagtcttctccttcactatcctgagggtccccaggggaactggaacctgtcatccaggacttaacttgagttccccaccctgttgtggtcctcagatgccccccactcgaggcaggagtacagtccacttgaagagtggcctctcaatccctgacaccccaggaaaagtgccctgcattgctgggggaactggaaccaggcagtagggacctcgtcctccacaccgaccatgggaagcacccgccacagaggggccttccatctccccaccatcagccagctggcatccccccaccccaccccagtcacccccccaacaccaccccacccacctgcctgcacagctgagggcaccaaacacagagtgggcacagacccccaggttgccacgccaggccctcactccagacgggtacaggcaggcaacaaatggggaggccagggcacgccccaccccacacacagccagagtcatctcctgccagcagccactcccaagggcaatggagaccgcccagcattcaggcccagggggcctcttcagtccctaactctcacacccccatgctgggctcaagaacccccaagtccccacccgctgcacatgtttcagacccgggacctggagcaggcagggtcccagtgcaaccccggcctgggcctcagggtctggcagggaagacggctaggtgccccttcagaaatgtcagcaagtccggatgggggaccccacaccactgccagaagacctgagtggggggccgagtggaggacggcactggggactggtcccaccttcctgccccatggctggtcccctgggcaagggggaagcagcagctccggtcccaccctcctgccccatggccggttccctcggcagcggggaagcagcagttccagtctcaccctcctgctggccccctgggcagtgggaggcagcagctccggtcccacccttcagggttctctcaaggccagccctgggccaggtgggagccaccctgacccttaaccctgtgacactgcacctatccaagaccaggtcctgtgaagccacaagggcaggggctcctgtgcctgatgaaacccgtaaccctccccaccagccagcacatccatggcccagggctccaggcatgggaggtggctgccctcggtggggggtaggcagttggccagactcctgtccctgcccggggggacagcggagaccaggctccctcgactcctcctgcacctcctgggccccacacaaccccagccctggtccctctggcatcccgatgtcccgggtggccctccggcaggagtgaccttccatccccaaccccgctcatccccaggaaggggctggagcacccccagggaaagagggttccttcccagaagtcctcctggaccaaataccggggttctgagaggaagctgctcctgcctggcctcccccaacccaccccaccaccaccacggggaccacatggacagtcacaggcagcccaccctctccacgcctcacacacgtgtcccaggccacactgtgggtcaggccccccaaagcggcacccacttagacatgggggccaggacccacgcgccatgggcaggactgggtgggcccctgagggccagctggtggccctccacgtcccgggactgaccacctcctgagccaccaggtgtgtcagcccccctaggccaccacgtcctcagctccctgaacattctctcaaagtccccagttctcaggaaactgctggataaacacttcgcagagacggtggtggcagcggctggcagggtgccaggcggcaccgagctgcttctccacagcaaagtgagcccagcaggccctgggagcgggcgccagctgacagcggccaccgtggtccccactgccgacacatccatcgccccgacagctgccgggggcccatttaccttctccagcacattgagcagacggctccgctgacggcagcccatgaggggcccgcaacccaccctccccgcctgccaggagaccgcacagctcaccgcgaagggcccggcctgccaggcctctgcccgggcccgggagtacacacccctttaccagcagccctcgaaccctgtaaacaaccaggctggggtgggggcaggggaggggccacacaacggaggccagctgaccccacttggctggagcccccaggtctgtgggtgaaatacatccactgctcctcccggcacaagcccttctgagggggcacaagtggccagtctgcacaaggagaggtgtctgttcccgccaggcagaggactggcgctccacctgcctgggcctcgcccagcccaggacccattctgctctcccagaaagcccaccaggcaggcagggcgggcagggctcatcatgcccatcagctccctgggaaaacggagacttaggggaggtgaccctcagaggcagatcatgaccagagagaccccaggtcctgccgccaaggcaggggttgtaacttgacacaaactgcaaattcttcacctccttccgctccaccatggagcaggcctcagcccgacacacacaccccgggaggaacatggtgcgggcaggcggcaccaccatgaccccgtccacctcgctgaggcacagccggaggcgctggggcctctcttcctgccactccagggaagcacctgggtctcagctttccattctcctggggctctactgggtggggtactgggcctccctggtgctgcccctgacagaccacctgggcctggatgtcctcccccacaggcactgcccgtcacccacccctcgggccggcaaaggcaccccacctgccacacacccatccatcgcagagcccagcacatcccaagaccctgtccctgtccctgtcccccacctcatttttggtctgccccaaacaagccccacccatgtcatggcccaccctgcctactcaggacccctgcagatgaggctgcagcccctccctggcgcctcctactctgcccccgcccactctccccataacttgcagcaggctttgccaagtgccctccacccagtgggttcccagggccctcaccctcgctccctgcgtgggaggaagctgggcatggggacagcacacagtgcctgctgcgagggagggctggccacagtgtcccacgtgtagacactgccctcgggaaaggaagtgggcacgggcacaggctccttccggggctcggccgggggcacgcagccatgcccacagcccctccctcctcccgtctctcttgggcagggcccctggcggttgaagggctccagtgctggcctctcaatccctgacaccccaggaaaagtgccctgcattgctgggggaactggaaccaggcagtagggacctcgtcctccacaccgaccatgggaagcacccgccacagaggggccttccatctccccaccatcttgtttctgccccaacttggagccacgcctggggcaggagggcccccagagcacggccagctgtggagggtgctccttctgatcccccggcctgctgggacattgtggccctgacccccgtggcctcaccccacacctcaccaagcttgtgcagctcagcgtctccgcgccctacacctggctgctgtgcccctggccccagtctgtggggaggccagccagaccctggccagccgaagggcctctctgcattctccaggcccagggagcagccacctccccgccaggcctgcccagggggtgtctccacccctgagctggacaaccagctgagggcctgggcaggtgggcccgccaggttacagggtatgggtggggtctgcagtcaccgggcccgcctggggggtgtgtgagcccaaacacagcgccccaaggatcccaccccaaagcccgcaacattggcagcagagtcacccatgaactcccaaccccctcaattccaacgtttctgaaatccaaacctatcattccttaaggttcaaggaaaacacacctaaaggcggcatggcagggaagggaactcccgttggagatgaggaagtaaggggcctagggttcgcctaacagccccatcctggcctggagccccagggccctctgccaacctgcccggggccccagcgctgggctgggggaaccttctcctgaggccatgggactaggcacaatggtccaagcagacagaagcagcaggcagctgcccacccagggtggcctggggagcaggcccagagccacagccacagccaccagtctcagctatgggagggcccgagggcagggtgctggccccaagccgggccgggtgtgcccaggcagaggggacgccagcgggggccgcgccagttccctccgctcagcctcgtgcaggacttctaggaacccggcctgatgcaacccggccaggcttctcctgagagtggaaggtgtacgggggtctaggccccagcacaggaatcattccacccacattctgtccactctcctgggcctcagtttcccttcccggagtccagccccccacagggcatccctgcccagagagggccagtgaccaagaaacacacaggaagaagagctgtccactcaggagccaccaggcgtgggggctaaggtccagggctggggccagcagtgacccctcacccccactcaaggccacctcggcttcctcttttgttgtttttgaagtgagaactcaacaagctcccaaaacaggaacctccctgatgctggcggcctccaccacagccatgccatgacctccaccagcctgtgcctcctgcccctctcccgggtaggcccagggctgttgggacccccactctctgcccagccctcccaccaggagccagcacacttgcctccccatctctgtccctggcctgcccacgggggccgttccagaccctcaacgctcccccaggggaggcagagcttggcactaaccagcccagggcccgcgggtctcacactgaagccacctagacgcagcctggggttgaccctcacctgacagcctgggaaaaactgaggcccaggaggcacaggcagccctggcctggagcccaaaggttcccacaggctgaggggagagtctgcgggctccctccctcagggtcctgctgggcccctcatcctggcggggtaatgagcagcctccatctgcacacaaacaattagccctgcggggccctccgcagcagctgctctctggagtgggctcagagtcccccacagacctcttctcaagggtgtttactcagcaaagccaaggcctcctccaggatgaaggggagtggcctgtaccctctgaggtcccccacctcacgcagggaccccaggaccagctggatggctgagcagcagctggggatgcagtgaggttctatgtcgctcaccaaagcgaagtaacacactggggtaggaaccactctctccctgcctcagtgcccccccgcagggacagccagtgccaggacttcaaggcggggagagggggtgggaaggaggcccagcctaggcacctgcttggggtcagagaccagcctccatactccccaccgggacgcctggggctaactcagcaggagtggtgagggggctgccctgaggcctggactggggggtctatgccaggcatgggcccggggtagggcatggcaaggactcagatgtccggagactggaccctccgtgagccgcatggacacacggtcccgtgtcacccgggcccggccaggcacccagatccgtggcttggacacgctgcccacacactcaggagcgtctgccgcgtaacccacgcgccccaggcagcttccctcgacccccgcccactcggccttggcctgctgggtcacagcctgccgaaggcagccaggcctgcagctcttccccggcccctctcggacagcgaccagcctgagggagtccaggtggtgcccctgcggccggcacccactcctggcctaggcccagccctttctcgagagcccagagcacctcatcctgggtcccagcatcccggccacccgcctcggccctctcctgacccacttggtccagccatgtggacggggggacgctcaggaagacagccgcgagtggacaaaaacaggctccaggccggggctgcaccagggcagctctccacggggctaggctgcagccaggctggtgcacggccccaggagtactggggcaagcgggcaaggtgagcaagctgtttggggaaagtacctcaaaagagccacacagcctctggccaaagcctggcacggagctatcaaaggaaggaaaactgcaggctggaggccgagttcagccagacctgcgccctggcccaggattgattttttaaaattgtcagccttcaaaaatcaggagacttcacacaacagaacaaatctttgaaaatgcaaacgtctgagcaacactgagcccaccagaccaccaatggccagagctgagctgggctgcttatccagtgagacagccgaaacaggaggggacatctggccccctgtccctataggccccaccagcctcctcactagctcctgcccttaacagcctaagctcaccctccaggaaccatctccctgttagatgtgcagacccagaggcctcgcctgggtccagccacaggtccacacaggcctgcagccggaactcctgtgtccccatgcccggtcccttctgtccctgaagctcctctgactcagagcacacacatcagaacaacagaaagcagcctgggccacttcccagagatgacgctcacctcccaaggagcaggagaaggagcctgcagacactgccaccccacccctcacacacagggcatacccgtcccctctcatctcaatgaccacatcacccctgaaggcaccatcacgccacgtgtggccagcccaagtagccgtggtgggactgtcacctggggattcagctgagaaccaaagtgccccaggccacggtcgtggggagtcccggcaaaggggacaggtgcgggccagcctctgagacaagcaccctgacctgcaggagcaaggctgggggggagtggaacagggcgtctgcaaggggctgcggccgggcctggaggacagtcactgcgtccctccctccctccccacccccagccaggcctgagcactgtgaagcacgggtggggtcagcccagcacagccctgctagggacaggaaggcagctagtacctctaaccagtgttgcgggtggggctggccctgccaggagggtggcacagcacatctgcaagacacacaggggaccccagggacgggagtggcgaaatgcggcaggccccggaggacaggctttcctccgcaaggagcggccggccatgcgggtggacgccacctgctctcggcaacaagaggggctatgcctgccaagggcatatgtcatatccacgccacctcccatcctcagcgcccactacactggggatggaggaggaagagccgggggtagaggtacaggaccctctctcctggcctgaggctaggggccagatgacagagcccagaggctgctgaggctggccggaccccaactcagggccgcccacaagccattctccactccaccaggtctctctcccaccaccgctccctggtgtagatggggaaactgaggcccaaggagctcaatgaccttgctcttggaaagggtcatggcgatagagtggctaaccagggttcaaactcagctctctggacgccccactgggcctgatgtcctgtccctgccaggcccctcctgaaggcacgacatcagcagcagcctgaaaatcacctggcctcgggggagcactcctgcctaggcccagctggctgatgggtgccccagtaactggggcctgggcccctgggcagtcaaggccctggcatctcctgggtcagcccgagatccaacagtctatcaacaaacacacatttgccaaggataaagaagcagcggccccaggcagcagactatgtgacacagagaggaacagggccagggtcggggcagggggtccctgacaccaaagagggctgtgaggtgaggagaggacctccaggcacaggtggcaggactcctggggaacaagcaggggacagcacacggggaggggatggagaaggcaggatgcggcaggaggccttggggggaagcagagccagaagctccccaaggaccacaggcgtctgcagcctccttgtcttcatctcgaggccccgcgtgccatcactggtagctgcccactcaaacactccaaacacacagccagccacacccctgattcccccagcatctcatctcggtcactccttcaccccacccccaggctcctgtggctccttaggcctgctcttctgtgagctcctatacatcccacaatgccccatcttgtgacacctacttttgccacacctccctgtctgctccagctgtgtttggggtctccccactaccagatgtgaaacccatctgctagagggtgtacgtaaagccggggggctgctggcatgagatcactagaacttaggagggaacaagtctggaaaaagaagtcaggagagggcggaccgattccgcctggggcagaagagagtgacttggccagaggacctggacctgaacaggaagcccaccctagcaggacagaggagcaaaacagccacccagactccaccgcaccccgctgagcaacggagggtgggtgaggcagaagggcctgcacagggttggaaggggtggggctatgtccccagctcccatcccacccagctgctggccaggcccctcgggcagcacctcctccataggctgcaaggccaaatgagtgaggagggggacacaggggctgggggacttggctcagccagctctgcagctccaaggcaaacatgccctgtgcccaggcggtacggattccccccacccccaaagctcaggcctgaagcaggcaccaggccaagccaagcagccctgccctgccctcaggagcccttgggcagtgccctgggccgccagcgtgccagaccctggaacagcccagtgtcctcgctgccttccaggaaagccaggagagaggctggcagcagctcccccgcctgccagggcccacaccaggaagccactcagatggccggccctgcacagggcctcatcctcctggcctccccgaggccgtgccctccatgccatgggaagacatggggcccaggacactcaccctaggccagcccaggagccccaggggaggcagcccctcccacccagcagggcacaggcactcacagaccctggggctactacccccatctctccctccccaggcccagccctggcagcgggtactaacctcgtttgtgcagccaaccctccttcacaatagccacgtcgctcatggtgcccgaggctcccgcgacgctcacgcgctcctctcaggctggcgctccccgagcccagctggcctggccacagcctctgggagaagcaaaggaagctgaatgtgaggccacgcctggctaagggcagctcctcgccctgggtgagccagagacccactgcacgtgcctgggggctccacccgcacctgccttcccaggtgggctgccatccctctaagctctctgacccccatctgcccgcctgccttccctctccccaaaacactcagggctgccaagtgtcaaatccatgtaattgaacacagttccctggacctgggcctctccttattctaggcttagagcctccagcccctgccaccaccacccgcaacagccaggccctgagagctgctgccttgctcacctccccattcccacctcccccagccgttggacaaatcacccccatccccaaaaggccttcccagcctccctaacctgatgcaccagctgacaggctgcctcctccaggcagcccctttgacttctttgacccaggctggctcggccttccctaagcccctggtgacagatggccccgtttgctctccctgtccatggtgttcctacccatggatcctgggacagggcacagggctcctccctgctccccagactaggaaagcaaagaaattcaaacatgaggaagacaggaccaggatgcaggccactggcgcaaacgggagtccagagccctccagcgcaagcccaaaaacctcctgggagaaaccccaggcccctcctaaaccacagcgcccctgccggtctgaatctggttcattcatttggccaacatgtaccgggcgtctcaggttttgccaggcccagtgctgggcgctggagacaaagagaggttcagacaagtccgtcagtgaggagcacccagtccagggtggttacagacccataattacagcagtcgggaggcagcaagtaagtgggggagcactggacaggcccccgccctgcagcggcccaccagccaaccctcacctgagcacactttatccattgatcctgcatggcttcctcatttcccctctgatggatgaactcctaggcatccctcaaaacccagttcccacatcaccaactacaggcatccccagaaagagcacttcgcatgctcttcctgtgagcagtcctctgctacccttccagatgggccttcctgaggggaggagggtcctctctgggacctccaggccaggcagagacccctgacgacctctgtggaatggatcccaacatgggtctttccacagccagcttagacgctctccccccaggccacctttctggcctcccgaggcaagggctggacacccacaaagggttgctttgcactgattgtcttaagctacacttagaatggcaggaaggcccactgccttgtgtctaatgccaggacagggaagaccacaccttacccaaagagggaaatgccccaagtacttagcaggatggaaagcaggccagactcgaggaaggcaccgcaggactccgagggcagggctccgagccgcgcacgcctcaggcacagggggctctgacgacactgagtgggcgtggcctggaggcagagggctggactcaaagacctctggatgtccccccacccccacacgggcctgagcccctccaaggcctgctgctgacagagtcagacagctgtccagagccatgtgtaaaaatacatctgtgctcacacagggtggtgtacgtctgcacagaaacgtatacaccaggccagcacagggctgcctgtgggggcggagggaccccgacttcccacagcctccgtacctgccgcctgcctttaccataagcacatattcttgctactattattaagtcacaacttaaaaaaaaatactctgttttcgaaagggctcctccatctgcctccagaaccctggtgtatgagaagtctacacagctcccgggagaggcaaccggacccccaccaacggactccgtccgcccttcgctcggatgagggactcaaagcagtcaagaagtggccacctggagcaaggccgagagacccaggagtgaatgtggggcggcctctggctgcagagcaggggcccaagctcacccgctgaccaaggcagcactcagaggccgtcccgacaggaccaagctcgctagcgccccaggatactcaatctaaggggcaagccccagctgccctccaagccttggcctctgggatgggcgggcaggacctccagggcccacccaagacaggaagcagttccggggcccaggagggtcacagtcctttgtggctagcctgggtaccccgccaccacgtacaacttttcgtccgtgggaaacgaagtctccttccggggccctcccacaaacttgaaggccggccgcggcgagtctttctccaaccccggggcacctccgccggctgcctcgctggcccagcgcccggggagccccacggcccgcaggggcaccccgagccccagctccaggcccggcggcgtcccttctctcgggtcccggcctcgcccggcggagcggcctccccaaggtcatgagggaggctggggccggcagcctgcacccccggcgcccggcgtggggccgccctcccttggccgggcccgcgcgccccgcgccctccccgcccaggcccgctcggccacttcctgctcccgctcctccattctggcggcgccgcggctcgcgccccggcccgaccggccgcgaacaaagcggcccggcccgcggggaggaaatccaggcccgggcggccacggcgggcggggactcaccgggccgccgcgtccgggcgcgagcgcgggcctagccgggccgcggcctccggcgcccgccgctccgcatccccgcgggccggcgctgggcggggccgggctggaggccgcggcgggcgggggcgctgctcggggccgggcctcgcgtgccgccgccgctcggtgcccggtgcccagcgctcggtgctcggccgcctgctcccgtcttcgggccgcgctgcgtgcgctgggccagccgcctgccgcgctcggtcctgccgccgccgccggcccgccctctccccgccccgcgcccgccccgcgcccggagccgcccgcccacatccgcctccgccgcccggggcgtccccaccgcgcggccggcggcgagggcggagcgcgctcggggagcgcgcggccgggctgaggggcagctcccgacgacctggggcctgggctgggccgctaacggagcccggccaccagccagcccgtcccggggccacgccctctctggcctcagtttccccgtctgtaaagtgacccggcgcttctgggctcgctctgccgtgaccctagcagaaggggcccgagacaggtcagggacgaatcccggacttctgcctccgcgcgcggggcgggggtggcttaggttgactttcaggctgccccactctggggggcgtggagggggcggccaagagtgacctaaaaggcccaatcccaagaccttgtgcctctgggggaagtgcgggaggatgccaggacaggaggtcagttggaggtgggcctccaaggagcaggaaggctccgaggggagtcaaccattcacctaggtactggcagctacactcacaaaagggggactttgctggggagtgggagaagaggggcacaccttgcctggctcccaccttgagctgggagcagacaccagacagaggaggagcggtgtctagggtgggctgtgacagctgacagcccagagccctccctgctgggtggacttggtcagcccggacacccagtccgaagtccactgggaggcagatggcccgggtatggaatgagtaagtgggacacagacccctttctcctggacactcacaggagagtgcaggtgactgccaccccgaccccttcctagccagaagttcctccgacaactgcccctcccccattccagaggcccacagttgataataacccttttgtgaaagacagactcttgtgagttaccttcctgaggctgctaagtattggggttgggggagcatttttattttcagccagagtgagttcagctggcagcaggggagggggtgggaggagatgcagacagaggcagcaggttcggcccagtgctcaggacagagtctgcagccaaaactcgggcttcatccctgcctcttggggctgaccaagagaaggactctctccccctgcatgagggcactcgctcctcagacaggggactccccattcctgcctctcgcctgagcacctctgctccctcccagctcagactttgtaaccccaggaagggcccacctccagggggccaagtcagaggcccagtggtctgcgccgcttgggtgggatacctgacacaagggttgcccccagagcctgggcgtctggtgtctgtctctcacccagcaaacctgcaccatgagccacctggggctccctctgggactgtcccacctgcccactgctccccgaggaagagttcctggtatctgtccaccatcctgggctctgccatgcaaggatggaggaaggaattcagggaggaagcagagggtaagagggccatgagacaaggccagcaagtggccgaggcttggggatgtgggagggagcagggcaccctctcatggaagaggcagtgacattgcgggctgttcttgaagtggttggacctcttgcttattttgcactggctgtctccaaggaggcctcccagtcttcccagcctggtgccctggcatctgctggtgcctgcaacccactgtgggccccacactccagtcctgtcttcaccttggcatgaactgccctcccccaaga

SEQ ID NO: 131 - DNA, 4000 bp, Homo Sapiens
tctttctaccctaaagaagagagaggctctcttcatcctccagaagacagaggcctgggaagctgagagagagagagagagacaaagagagagagagagagacagagacagagacagagacactaggcttctcacctcttggtctagtgggttcacacactaactgctcggaagtcccaccttaagtctaactggaagcctgaccgtctgcacctcgccgcagcccttcccgggaaggggctctgggttccctcatattctccccttagattttcaggtcttctctgactcggggagggaagctctcagatgacagagctactctagggaaggaggggggctccctctaggtattctggatgatagtaggatgggacctgcagactaaaacgagagtggggcccctgactcacatgagtgagtggggggtgttggggacggagctccagatctcctggcagaagggaagggcaccccacccgagggaggaggcagccgccgttccagcccgcccaggcgccgggggcgcctcgaggcatcggcccgccctctccgcgccccgtcgggccgggggcgaagtccgacccaggcccgcgggcaggcggggacctgccgggctgggttgggccaggccgggcctggcaggacgcagccccaaagcggcggggtggggcggggccgggccaggcggccgtgggggccccgggggcggcggtcggggctggtcgggactagcagtctgggggcccaggcgcgccctgggacctggcagatagtcgggttccccgcttctggctcggggccccaggacagcgctggtcccacctcttcctgtgccctaatatgggcggcggggagagacttcgggggccggcccgcgctcagtcctgcccgcggactcccgcctgttgccatggcgaccaggccccgctcctcggctgcgtcccccgccgtcgggccaatggaacactccccaagccgcctgcctccgcggtcccctgcaggcaccgcgggcggaaccattgcttgaggggagaggatggtggctggaggctgccgcggctgggcgggctccaagcacccgggcctccgcgggggctcgcacgcccaggttcctcttccgaggcgcaggatgcggcgggacccagggcggggcgcacggtcccgtaggatccgagtgacggagacagggccgggctccttcccccggggctgttgccacacttcctgcctctgcgctctttccccagcctgtttctaaggaagggagtggggttgggcgaccgcgccccagccgtcgggctgggtccaggctctaggagccgacacggtgttgggcaaagcccagggtcaataggggagggttttaggatgggggacagagaatacagatgactaagaggttaccatcgagggggagcagcagtcgtggaagatccagcagtcctggtgcgcgggaccctcaaggccccctcctcacatgtcaactgagtaccctcttattgtcttctctgctccgaagatgtgtccggccccttctaactctctccttcatccgggctagcagatgaccccagtggtccccaatttctggcagacatgtctccatcttctacctggcatattttacctgcctcagtgtaccccaggccgcttactagctttctgcatatctagacttcccctaatgcctccttcccgcttacgggagagcctcagactctggactcagctcccatgagctcctggacccctactcatttcttgcaatttaatgggtcatgcagctccacccactcaccccttttgatctctcccctcctccgtcctgtgaaaattccagtcccgcatccttctgagcccgggacccccagtcaattcctgggtcaggtgtctccttaaccctcccgatttacagtgcttaaccctcatttctgctttttggggtctcccaatggattgtcagtcctcctacccctctcgtattctgggtacctcaggggtttcttcgcacatactgggaccctcaccccacttgctgcgtaccaggtcctggtatttgtcccagtggactccagggaaatcatcctcctccctgaaacccctcactcatgtgcctgggccccccagcacctccttccatgcgtaccccgaggtcctttgagcccctccccctgcagccccgccgagccacccggcccgtggccgctgtttacaaggacacgcgcttcctgacagtgacgcgagccgcctcctccccttccccacgctcgaggaggggggcgcgggggcccggctccggcgacggccaatcggagcgcacttccgtggctgactagcgcggtataaaggcgtgtggctcaggctgagcggctgggaccttgagagcggccaggccagcctcggagccagcagggagctgggagctgggggaaacgacgccaggaaagctatcgcgccagagagggcgacgggggctcgggaagcctgacagggcttttgcgcacagctgccggctggctgctacccgcccgcgccagcccccgagaacgcgcgaccaggcacccagtccggtcaccgcagcggagagctcgccgctcgctgcagcgaggcccggagcggccccgcagggaccctccccagaccgcctgggccgcccggatgtgcactaaaatggaacagcccttctaccacgacgactcatacacagctacgggatacggccgggcccctggtggcctctctctacacgactacaaactcctgaaaccgagcctggcggtcaacctggccgacccctaccggagtctcaaagcgcctggggctcgcggacccggcccagagggcggcggtggcggcagctacttttctggtcagggctcggacaccggcgcgtctctcaagctcgcctcttcggagctggaacgcctgattgtccccaacagcaacggcgtgatcacgacgacgcctacacccccgggacagtacttttacccccgcgggggtggcagcggtggaggtgcagggggcgcagggggcggcgtcaccgaggagcaggagggcttcgccgacggctttgtcaaagccctggacgatctgcacaagatgaaccacgtgacaccccccaacgtgtccctgggcgctaccggggggcccccggctgggcccgggggcgtctacgccggcccggagccacctcccgtttacaccaacctcagcagctactccccagcctctgcgtcctcgggaggcgccggggctgccgtcgggaccgggagctcgtacccgacgaccaccatcagctacctcccacacgcgccgcccttcgccggtggccacccggcgcagctgggcttgggccgcggcgcctccaccttcaaggaggaaccgcagaccgtgccggaggcgcgcagccgggacgccacgccgccggtgtcccccatcaacatggaagaccaagagcgcatcaaagtggagcgcaagcggctgcggaaccggctggcggccaccaagtgccggaagcggaagctggagcgcatcgcgcgcctggaggacaaggtgaagacgctcaaggccgagaacgcggggctgtcgagtaccgccggcctcctccgggagcaggtggcccagctcaaacagaaggtcatgacccacgtcagcaacggctgtcagctgctgcttggggtcaagggacacgccttctgaacgtcccctgcccctttacggacaccccctcgcttggacggctgggcacacgcctcccactggggtccagggagcaggcggtgggcacccaccctgggacctaggggcgccgcaaaccacactggactccggccctcctaccctgcgcccagtccttccacctcgacgtttacaagcccccccttccacttttttttgtatgttttttttctgctggaaacagactcgattcatattgaatataatatatttgtgtatttaacagggaggggaagagggggcgatcgcggcggag

SEQ ID NO: 132 - DNA, 6000 bp, Homo Sapiens
tggactttgaagaacaaggcgaggtagccagggacaggggctgagccttcctggcaggggttacagcctagcaaaagcccagaggggtagttaaaaataaagagtgcttcaaacgctcaataatggaaccattgtgctggccacatcctcctgagaacctcagccgctgagccaggcccttgaagtcggcagtggcttcaggtgggaagctgcatctgtgcttgcagaacctttacttgtctaagttgcctcctctctgataagagcatgtagggtatgaatgagaaagagatttcacatgtgctgagcgggcatcacctcatttcatccttacatgcgtcttctgggggctgtgatatctttagcccactctgcaggttggcatactgaggcttcttacattatctgcaaagtggcagagttgagacttgaacctgggtctggtccaaaatctgtgcttttaagctctctgtcatcccagttctcgaaaagcccagaattttctgttgaactcctggggatgagtttagtgatgtgctcgtacatattgaataaccagctctctggaagaaaaaagaggcttgattggtagcgtattccgatgtccaaggggtaaatactcccactgtggctgacatggagctatcagtgtgacattcttgaatatggagttgggaagagatgagcacagttggttcttgcaagtaggtaagggccagctccagcgtgtcactgggtaaatgtccctgcctcccccccgagcccagtatggccagtaaaggcctttagacatgtctaaggaatggaagagggctgagaaacctgctcctccagctgggggcccgccctgagccctgggaagctgcggttaatctttaagccagccttgcaaacaagtgcggccatttcaccagcccaggctggcttctgctgttgactggctgtggcacctcaagcagcccctttcccctctagcctcagtttatcaccgcaagagctaccattcatctagcacaacctgaccatcctcacactggtcagttccaaccttcccaggaatcttctgtggccatgttcactccggttttacaggtgagggggctgggctgggaagctgatcgacttgtccaccccacagcagaggggcagctagcctagatgcgaacctagatcagtgtagagtaaggctttgctcattcctggtctcctggaaggtatgttgtacccagaggcctttgccttccacattctagggtgctcctcccagctcctctcagcagggacctttgcccagggaatagaagcctgacctgtctgggccttaatttcccatctgtgaaatgggagaactttcaaagaaggaatatggaggcaggtgtgatatttaaagctggacccaggcccacctttccctgtgctaggattccaggacaggtaaggagccaagggtggggtgcccagccccaaaaggatagccctggagcctgcgccagggggtaagaggggagtctttgtggcctaaagcagcatttcctcaatgtcccgtttttctgctacatttcctgccctggttcagaggtacttagcctctttacttacttggaagtgtgactgccactcagatgccctggtcagcccctcctaagcagtaataattagaactaggggacttccgatgggctgccagggatgttttgcccttatgcacttaaaatgaacccgtaactattaaaataaatgtcgctcctccccaccctgtccctcctgccccagcccctactttgagaaactcaggtcaaggctaaagtccaaggcctggttcttgtcagtgcctcagtttccccatctgtaaagtggggcgatcttccgccgctcaggccaggtggtggttaggattaaaccctgaagtcgacctgagcagcttagcatggcgcctggcccagagcgggcgctccacgcccgctgatattattaccaatcgtgatttcgggagaggcggatctggggcgtagaaggtgggtgggttggggagggcattttggcctgggggcggatggggcccgcggggtgcggcgccctggcggagtgggaggcggggcttctgtgcccggtgtccccaccccgcccggacccccagctcgggccgcccctgggtctctcccgggtcaccggcggggaatccgtccccgcgcgcttcctccttcctcctcctcccggctgcctgccgggcccctcctcccagctcgcgcgctccctccctcctcttcccctccccgggccgccgccgcctcctcctcctcctcctccctttctctctcgatctgtctctcccggcccggaatccattccggcctgggagccggagcggccaggccgccgtctgcccgtcccgctggacgtcccgcggtccgccctcccgtgcgtccgtctgccggtgagcccgcccgcccgccggcccaggtgagcgccccccgcccctccgcggaccccccgccccggccagcgcgggggagcccccgccccggaccaccctggcgtcggatcgcgggccggcggggactcctgtccacccccccaattcccaccccccctccgggccaagccgcgatacccaagcgccgggcgggcgcacggggccatgcccggcgcggccttttgttgtgatgcagcggggggagggggctgggcggggggggcgcagggttcctggctgcgtggggaccccctccagctcatgctccccataggatcccccagagaagccagcgagctgggccctagcccccgggccaggtctaggccaaatctgaaatctgagccagtcggcgccgcctctgcctgggctgcccggccctgcgccccccggccccgggtgggaggtggggggatcggcagggcgggctgaggggccccggggtcagggcgccaggccgaactgccaggacctccctgccctcgtggggcctcgggtagggcctggtgctgccggcctggaagggactgggccagactgcgtttggtctcccctgcccacagcccccagcctcgcccctgagcaggcccagctaccagccggctcagaagttggcaaaagttttgggggttggccaccgggccaggtccacctgtctgcctgggctgggattggggtgggtttgagtccccaccagggctgccacttgccctgctgtgtgtcctcagacaactgcctgcctctctgagctgggttcctcattggtggcaggtgggcctggctggaattgctaggctggtggaaggatggggtgaacagaaggggctcacctgtgtggtatcctttcagcccctgcgtccttcaggtggacttaggagtggacagagcctgtgtgtgcccctgggcaagacctcctgaacttcatggactctgtacaatttggggcagtggttgctgggtcacctggggtaagtccaggcccagccacagccacagtgcagctgggatcagacttggtttcaagggtgggccaggctggtcctgttgcagaccctcttctcagccccctggctgggggatcaaggcaccgagtcttcttgtctcacccagtgacctgggccaagagactgcccctctaagtccctatacgtgaaatgagaatcctcaggcgaagattctaagcgcttctgcaggtagaggcttggcgtgtagtagatgctcaataaatgaattgttcactggacacattggctgagaaagatgggtgagatgtgaggttgctggctagttcattctagaagaggatgggttggtgccttgagaaagaaatagccctggcaccgtcctgccagccagcagctgggtgaccgtaagcaattcacttttcccttctggcctcagttttgccacatataaaactgggccagtggtaatgacagctgccaacatctactgaacaccttttaggaggtacagactcttgtttatcttcattttgctgatggggaaactgaggctaagagaggggaagtgacttgaccaaggccctatagttggaagctggaatgaaagcccagacctcagagaccacagtctggctgtccctgcatccctccagtgatggggcagtggaggttcgcaagacaggactgcacacacagcagtgtcggaaaagactgctctgctgagggattgaatgaaagccacgaggcctttttggtgatgtggtgatgtggtctttccacccaaggaaatgatttacagtgtgtcacctctctcagctgactgcctgcctaggccctcccgcgtgcccctgggcctttgctcctaaactgtgtccctcccagagtgccctctcctccaggtgctgcttatctgcccttgccccgccaggcttagcttaggcccctctcttctaggaggaaggcccgtggctctctctccctgtcccctagctcttgttggagcatgacttatccacagctcagcctggttcctgcttttgcttctctgattgtgaccaggggggtggggtggagggatgtctggctcccccaagccccaggaaccagagaggagatggctcagtgacctgttgagggaccttctgcccatctccgtggtcctcagctgaccccattttctcaaacctccccatgtataagcatttgtgacccctgtattgagcacctgctgcgtaccaggaacttggaactcgggctgagcagtattgtgctggggttagcagggagtgggagctgtgggagtcatggaggcttctagaaggtggcagggcctgagctgaggacgagcaagagttcacttggcaaagaaggggagagggagctcttttttcccttcccaggggccctgaggtggtggggtgtggtcagcctggttggatacttgctggggagctgggaacaggtccttggcctcccagaagtttgaatctggagggtgagcaaagttgcaaacaagttgccagttgagttactatataatcacagatatgataaggactcagggagagaggcctagggtacacaggaatcttgaagagggcatgtaggggttgaccaggcatggagttagggaaagggcttgccaggcagcaggaagtgcatgtgcaaaggccctgaggtatgtgccaagacgtgctgtcatggagaatcagtgggggaagctgtgaggctggagcgtgcacaatgaaggggagtgggtaagaggtagaatgagggggtgtatcagcagggctggaccatgctggggccttgtgggccctggggaggagtttggccttcattgtcacacagggggctgatcggtgtcccctgtgtgaacagccccaagctggaggccagaggtacagagctgaccaatagaaatagatctgatgatagacctagatctgtaggctggactccaaaattttatggaggcctagatcaggtctcaagaggagcgggtatttgaggctgggctttggaagtggagtaggagttcactagcagcaaggctggagaggatgagagccgggggtgtgggaagtgcaatgctgggtggctggaagctgggagtgaggtagggagcagggaggggtcagcccgagagatggggaccaaaggtttggtaagggcttaagagtcagacaggcctgggtttatgttctgaccgtcccacttgctgtgtgtctttggatcatttactgtatcttttgagagacttagtttctttgtcatgaaaatggggacaacagatacctccttgttggattagggttaaaggagggctgtgtgcccagtgtctggcaccggtaggtacttggcaaatgggacctgctttgcgctgttgcattggacaggtcactcggcctctctgggtctggccctgctagctctgtggtcaagcccttgcctgggtgatctcatggagtctgaaggtgccggttggggcagggctggctcgggagaggatgttggcagccaaggccgccaatgtgcagggtgactttgagtcctgccctg

SEQ ID NO: 133 - DNA, 6000 bp, Homo Sapiens
gtctggtacattaaagtaatatatctttaatttttcttttcttttttttttttttggaggcggagtcttgctctgtcgcccaggctggagtgcatggcacaaactcgactcactgcaacctctgcctcagcctcctgagtagctggagttacaggcgcccaccaccacgcccagctaatcttggcatttttagtagagatggggttttgccacgttggccagactggcttcgaactcctgacctcaggtgatccgtccaccttggcctcccaaagtgctgggattacaggtgtgagccaccatgcccagcctaattttttttaaatcattgcggacttaagtcccataatatttttctctatatgtttctacaattatatgtgttactgggcatggtagtatgcgcctgaaatcccagcaactcaggaggctaagggaggctgaggcaagaggatcacttgagcccaggagttcgaagctataatgcactttggtcatgcctgtgactagccactgcacttcagcctgggcacatagcaataccctatctctaaaaaataataataataataacatttgttttttcttttacctttagaattcttgccacatttccccattttaaatgtgtcttgtttctataaatagaccatatttttaaaaatctttatccatacttgagcaaaaatgctagaataaatggaacttattttactgatgaagtttattacttagttggctaattaaaaatagaattgttatactattttattgttgattaagaattattttatttataatcaagattagaccagaatgataagacatttgaaaagtttttaaaattactatctaacatatgagcttctatcatgggacaattgctattctaattcctttgcttgtgttatctcatttaattttatgagatagttatcaaccttatgagggtaggtactattattagtcccatttcatagaggaggcaaaagacaaagcaagggtcacacacttagtgaaaaaggggaaataagattctactccagtctgatttctgagcccatactctttatccattgttataatgtttttttaaaatacaaaactgtttattgtatgtggttctttacaaatatgttcaccaaagacagacataatttcacatgtagcacccagtaaattgagggaatttatcattaaaattcaaataattttttatcttgttcactttttgtagcagtgttttattcttcccttatgaatgtgaagtttcattaccttttataaaataattattcttcaattcaaatactttatgtatccatcattttatttacctactgatttatttagtggattcctttggataaaactatattatgtataaaagtaactaaatgtaatcataataggaaatcttattttacctttagttttccttttgtttgacttttatgagcaaaattatatatataaatatatagaaataataaatatatatttatattatgtatatagtatattatataatatatattataaatataaataagttttttagtgacgtatgtagcacacatgcataaaagtatacaaatcataattgtatagttcagtcacaaagtaaatacccatgtcttctgcttttaacaaatgcacacatttctgtggttttattcctacaattggagctgggtcacagggaatacatatgctcacttttattagattatgctttccaaattggttgtaacaaattataccccaatactcttagtgtatgagatttcctattactgcataaccttaccaccccttggcatcatcagtctttatagtttagccattcttatgtatagtgatatctccatgagattttaattttcattttctgtatgactaataatgactcccttttcatgtttattaactatttgaatatgaccttataaagtgccttttccaatcaatctctttcctgtttttcgtttggttgatctttgtcttcgtgatttgtaggagtcatttatatactttgatgaagacttttcttgatgtattatttttgctttaaaattttacataggtggaatgaatggctgaattatgatatatacattcctgatcttcctcgtgctgctcgactttgcctttccatttgctctgttaaaggccgaaagggtgctaaagaggtaaagtatttcagaaggaacaattatgtttacctttaaaaactcctgattataccgctgattgaattttttcacaaattggatgttattttatatttaagaaaataataataaacctatttttaaaattttaataaatgtatcatggaagaataccttgggagagcttcaggaatttatgatgaatatgttttgagttcttattgataccatttttaaaaatgcaaagtgactatataacagggattgcatgcaaatatctcatgcttgctttggttcatattttctatttataattaaaatacatgtaatttcaaatggggaaaaaggaaagaatgggcttaaaccttgaaaaatcaattttttttttttagatattcccattattatagagatgattgttgaattttccttttggggaagaaaagtgttttgaaatgtgttttataatttagactagtgaatatttttctttgttttttaaggaacactgtccattggcatggggaaatataaacttgtttgattacacagacactctagtatctggaaaaatggctttgaatctttggccagtacctcatggattagaagatttgctgaaccctattggtgttactggatcaaatccaaataaagtaaggtttttattgtcataaattagatattttttatggcagtcaaaccttctctcttatgtatatataatagcttttcttccatctcttaggaaactccatgcttagagttggagtttgactggttcagcagtgtggtaaagttcccagatatgtcagtgattgaagagcatgccaattggtctgtatcccgagaagcaggatttagctattcccacgcaggactggtaaggcaaatcactgagtttattaagtatcaattataatctgtggatttaggtagatactttctctatggaaaaggatccatatattttactggcatagatactatgaactctaggaccaatattgcaatagaattaagttctctatatgctaatatttttactgcacctctgcttttttaaagccctagcttgccttcattcatttaacaaatatttattgaatgccgactatgtgtaaagcactgggaaaggcactaggtaataaagtcatgaactaaacagaccttcattgagtatgcactctaactgtgaaaacagacattaagcagataaaagcagaaatataagattacagttgacccttgaacaacatggatatgaactacactggtctacttatatgtggatttttttcaataaatatattggaaaattttttggagatttgtgacaatttgaaaaaaacttggagataaactacattgtccagaagtatcaaaaaaattgaagttaggtatgtcatgaatccataaaatatgtatagatacaagtctattttatcatttacgaccataaaatatacacaaatctattataaaaagttaaaatttatcaaaacatacacacacaaacacagaccatacatggtaccactcatagtcaagagaaatgcaaacatatataaagatgcagtattaaattgtatctgcataaaattaactgtagtacatactgtactactgtaataatttcatagccacctcctgttgctattgtagtaagctcaagcattgcatatatccacttaaaatgctatgtaggctgggtgcagtggctcatgcctgtaatcccagcactttgggaggccgaagcgggtgaatcacctgaggtcagagttcaaaaccagcctggcaaacatggtgaaatcccgtctctactaaaaatacaaaaagccgggtgtggtggcatgtgcctgtaatcccagctactcgggaggctaagttaggagaattgcttgaacccgggaggcagaggttgcagtgagccgaggtcacgccattgcactccagcctgggcaacagagcaagactccgtctcaaaaaacaaaacaaaacaaaatgctatgtaatgctgatcatctctacatgagtacttcatcacttcagtaaattgtttattgcagtgaaaagtgatctctcacagttcttggatatttttcatcatgtttagtgcaataccgtgaaccctgaataacactatgagggctgtaaggagtgcctctagtgatgctagaggtactctcaagaagcagagaaacgtcatgacgttacaagcaaaagttgaattgcttgatgtgtaccatatattgaggtctgcagctgcagttgcccttatttcagacagacaactaatcttgtaaacagacaacataaactttgtttgtttttgtttttttgagatggcgttttgctcttgttgctcaggctagagtgcaatggcacaatcttggctcactgcaacctctgcctcccgggttcaagtgatcctcctgcctcagcctcctgagtagctgggattacaggcatgcgccaccatgcccagctaatttttgtatttttaatagagacggggtgtctccatgttggtcaggctggtcttgaactcctgacttcatgtgatccacccgcctcggcctcccaaagtgctgggattacaggcgtgagccaccgcgcccggccaaactttttttttttaataagagatggggtaggtggatcacacctgtaatcctagcattttgggaggccgaggcgggtggatcacgaggtcaggagttcaagaccagcccggccaatatggtgaaaccccgtctctactaaaaataccaaaattagccaggcgttgttgtacatgcctgttagctactcaggaggctgaggcaggagaatcacttgaacctgggagatggaggttgcagtgagccgagattgcgccgctgcactccagcctgggcaacagagtgagactccgtctcaaaaaaacaaaaaacaagagagagatggggtctcactgtgttgcctgggctggtctcgaactcctgagctcaagtgatcctccctcccctacctcccaaagtgctaggattacaggtgtgagccatcatgcccggccaaaagacaaaataaatgtatagtatcagtaaatacagtacagtactgtaaatgaattttctcttccttatgattttcttaataacattttattttcactgtcttactctattgtaagaatataatgtatagtacatataccaagtaagtgttaatcaactgtttatatttctgttaagacttccaatctacagtagtcatttgtagttaagtttttggggagtcaaaatttacacatggattttcagttgtacaggagatcagttgcccctatcccctatattgtccaagggtcagctgtataaatcacattaagtgccaggaaggaaaaaacaatagtgagctaagaataactaactgaggatttgtggggaaaaggcaaatatatatatattgggttcaggaaagacctctctgagatgataaccttgaagttgagactgaagtacagctatacctctgaggtattgtgagtggtctagttctagaccactgtactaaagcagaaatcacaatagagtcacaaatgttttggtttcccagtgcatataaaagttctgttcacattatactgtcatctgtaaagtgtgtaatagtctgtcatctgtaaagtgtgtgatagccttacgtctaacacaacaatgtacatactttaaaaatattgctcaaaaatgctgatgatcatgcaaggcttcagcaagttgtaatctttttgctggtggagggtcttgcctcagtgttgatggctgctgacttaccaagctggtgg

SEQ ID NO: 134 - DNA, 6000 bp, Homo Sapiens
gatgaactttaaaaacactatgctatgcaagccaactacaaaaggatagctatttattgtatgtttccacttatataaagtaccaagaataggcaaactggtagagatggaaaacagaatagaaataaaaaggaattgagggaaaggggcagttatgggtatgaagtttctgtttgggatgatggttaagtgctggaaatggatactggtgatggttgcacagcactgtgaatgcacacctaaaaatgtctaaatagtaaattccaggttatgtatatttcacaattaaaaagagataaatggttaatctaatgtgaagtatagccataggaatccatacttgtcactggtgactataaaaataggtgcaccatgcatgagcgtatgagatgcttaagtcaattctgtattttctttttactttaaggatcatgccattttagaattccagtttctctaatgaagaagcttggaaaggagttaagaggcttgtccaaagccaagagttttcagaggtatatcataaatatgttttcttaaaaataccgtaactcctgatattcacattgggttcagctttttgaaaaacattagaaagaaagtttagaaaaacaagttcatgtatatgctggtttttacaaatcaacggtgctcatcaatttactttaaaaactaatgcaacagaaaaggcaagcctgctgagggaaaaatatctggtgaacagcagaaaagtctttcttcccccaagagtcaaggaaagggggaagagaagaaaaaggagagaagagaaaatgaaccaaaaatcacatttttaaaagtgtgacaagctcaaagacagtaatttcaaagacgaactcaaaagaaaatcttcttgacagttttaataacccaaacaaacatttcaaactagctaacataaactaatttttcttaattaccatcacttcattactatcattatcacatataatttacattaacattttctattatagaatgatatttcccccaagtgacacagtatgctaaacacatagaaattatacctattaacatacctgcttaatataagaaatggtagcttcccgaggtacctccaactggatataaatcccagtgggcaaaaggaaatccacaggtatggagccatcagatgctatctgtgaatccaccgcccagatgtcaaggatgtctgccatagcaggaggcattatgaaactgaagcacattcataaccacggggccctagaaatcagtaattaaaacatagcaaaacaaccatcagccaaattttataccaagatatgataaagaccactaatctacaattagtccttagatttcaatatagccaataatgtaacaggaggccaattaaataatgtgatattttaaaaaccaagagtaagtcagcagaaataaattatttaaatacacttttatcacttcacaaattatatatatgtacattatccaatccataccaccaactaaaggaaaaaaattattcttatatacatataaataaaaatatatacacatacatatgtacacacacacacaccacattgattcaaattcaacatagatatttgacatctgaataaactgcatgcttaaggattacagggtcctaagaaatttagttaaccagcacttgacaggtgatttttctccaaactttatttagaaaatattagcttcttaggctgagtttttctctgcaaattccaatgaaaatgacaatcaagagggccctctctcaacaagaacaatttgcaatcaagagggccctttctctacaaggacaattttttttttttttgagatggagtctctctctgttgcctaggctggaatgcagtagtgacatctcagctcactgcaagctccgcctcccagttttacgccattctcctgcctcagcctcccgagtagctgagactacaggcgcctgccaccatgcctggctaaattttttgtatttttagtagagacggggtttcaaccgtgttagccaggatggtctcgatctcctgacctcgtgatccgcccgccttggcctcccaaagtgctgggattacaggcgtgacccaccgtgcccagccaacaaggacaattttctatcaacctcacggcccatcccctaagcattaaaaacaccaaatcgctcaatacagatggcaaggccccttgtgctatttctctggcctatttttcttgctctcccatcactctacagcccgagactggtatcacagtgccttctgccttcctgctgctagacctatgttcacatgaggaataaactcctcatatcaaaacaaacgcactatcccaacaaatgcaccctttaatagtgccatttaagtcttacctattccttaagggcttccttcaagaagatacaacaataataattggaagaacatgagcgctaaagttaaatgaaccaaggttcatttaacaattatgccattaatgaaagtgtcatatcaaaagagacaggaggccgggcacagtggcccatgcctgtaataccattacttggggaggcttagatgggtggattgcttgagtccaggagtttgagaccagcctgggcaacaaacaagaccctgtctctacaaaacatacaaaaaattggccaggcgtagtggtgcatacctgtagtcccagctacttgggagactgaggcatgaggattgcttgagtccaagaatctaaggctgcattgagctaaaatagtaccactgcactccagcctggacaacaaagtgagaccctgtcttaaaaaaataaaaattaaaaaacaatttttagaacttcttttgctaataaatggaaaaagaataataaattagaaaatcacaattctgcaagtgctaatgaactaacagatctaggcaatgatcattaatagatgctaaagacataaataataataaggtgaaaggagaagaaactttacaatcgtccgtgtctgtcttgttgacactacaggaatcccctgatcttagcattactaaaagtgggactatcagacattatgtgtctcctcatgaaatgcaatagtcagtacttaccattcacacaaaacaaaactgaacttgaatctaatcaaggctttagatctgatctatgtgctagtttacaggaaacagagaaaaaagttaaatacttcaaggaagcaatcagccaagtagagaatgtggcatcttcaataaaacaaattatatggtttctccagctaatcaatatcaagaagaggaggaagaagatggtggaaggactgttaaagaatttaaaaaacacttaggagacacagccaaatccaatgttagctggaacaaatcaactataaaaaactatcttagccaggcactgtggcccatgcctgtaatctcagcactttgggaggccaaggcaggtggatcacaaggtcaggagttcgaggccagcctggccaatatggtgaaaccccatgtctactaaaaatacaaaaattagccaggcatggtggcgggtgcctgtaatcccagctactcagaaggctgaggcacgagaattgcttgaacctgggaggcagaggttgcagtgagcctagacagcaccattgcactccagcctgggcaacacagcgagacttcgtctcaaaaaaataaaaatacaaaaattagtcgggggtggtggcgtgtgtctgtagtcccagctactcgggaggctgaggcagaagaatcacttgaaccaggaaggtggaggttgcagttagctgagatcacgccactgcactccagcctgggcaacagagtgggactctgtctcaaaaaaaaaaaaccaactatctttgggccaggcacggtggcttatgcctgtaatcccagtactttgggaggccgaggtgggtggatcacctgaggtcaggagtttgagacaagcctgactgacatggcgaaaccctgtctctactaaaaatacaaaaaaattagccaggcatggtggttcaagcctgtaatcccagctactcaggaggctgaggcaggagaatcgcctgaacccaagaggtggaggttgcagtgagcagagattgtgccattgcactccagcctgggcaacaaaagcaaaaatccatctcaaaaaaaacaaaaaacaaacaaacaaaacctatctttgaaataatctgggaaatttaaatatggattcattataagctccttgaggagatataatgtctagtggtcttacttttagccatgctaagattgatcacagaattcaggtattgtcaacatgctttttaaagtactgtttctcaccacagtatatggaaaggtctctatactcaggaactcttaaccaataaacttccataaacacgaacaaaactacacagtcactacacatgttattaaggcactagtcctaaaattaagcaaatcacttcagagcagcctttgaagatctggtgtaggagcttctcaatcttgcaagtaataagcattcaataagtatttgctgaatgaaaacatgctgtattaacttataaagaccatactttgcagggccaggtagggtggctcagcctataatctcagcactttgggaagccgaagcaagtggagtgcttgagcccaggagtttgagaccagcctgggcaacatggtgaaaccttgtctctactaaaaatacaaaaaaattagccaggcatggcggcaggcacctgtaatcccagctaccagggaggctgagtcaggagaattgcttgaccccagagggtggaggttgcagtgggccaagattacaccactgcactccagcctgggcaacagagtgagagtctgcctcaaaaaaaacaaaacaacaataaaaaaatatatatatatactttgcttatattcaaataccaccatgcaaagacagaggtggaagccagctactgaacaagtaactcaagtactatgtctaaccaagagctgccaacaaaagctggaggaaaaatgaaagttagtatgtatgtatgtatgtatgtatgtatttgtttagagatggagtctcattctgtcacccaggctggagtgtagtggcatgatctcagctcactgcaacttctgcctcccaggttcaagcaattctcctgcttcagcctcctgagtagctgggattacaggcacacaccatcatgcccggctaatttttgtatttttagtagagatggggtttcaccatgttggtcaggctagtctcaaactcctgacctcatgatccacccgcctcggcctcccaaagtgctgggattacaggcatgagccaccgtgcccggcccagaagttagcatttaaaattgaggtgggtttatgaaacatcagccctctgtcacagaattagaaacataataaacctgtacacgtccctagtttcttcaacacagatttttgtcaagaatctcagaactgaaaccaaatcacccaattaatacaatactaataaaagagcatgaaactagaaaaataaaactctgggatctcacccttaccagacagctggaaatggtaaggcatctgagacataatgcccagagcagcaatcttttcaaagagactgactgcatctcaccagcactcccatcctatagcatcaactgccaagatataaaattctaaatttctaagccattagagaaaatgcattaaggtagatacaaaaatttcttgatgaaggccaggcgcgctggctcatgcctgcaatcccagcactttgggaggccaaggcgggcagatcatggggtcagaagttcaagaccagcctgaccaacatggtgaaaacccgtctctgttaaaaatgcaaacattagctgggcatggaggcacgcccctgtaatcccagctacttgggaggctggggcaggagaatcgcttgaactcgggaggcggaggttgcagtgagccgagatcgcaccactgcactccagcctgggcgacagggcaagactccatctccaaa

SEQ ID NO: 135 - DNA, 6000 bp, Homo Sapiens
caataggtgcagattttaatctaagtaatgcaaagattcattctactttcccacccccaacacatcagttagcaggcaggagaaagagaaaataaaaatattgcatagaagaccatagtgttttgccccagggttgcaagcattgatatctcacccattaccaattcccagtcattgaatgcctacagtgtttggttctgttagagaacagaacatttaaaacacttgactctttagatcatgaggcttacattccaagaagccagtactcttcttgggtgatttttttttcccactttattttatgatgtgcagcatcataacatcacactaacctaacccacatttcaaaaaaatcacacgaatgtggcctaacctatatttctaaaaaaggttgaattcattgccagcattcaataattggaaaatagtccataaaaatctgtattttcagcttctctaggaaaattggaaaatttgggctcacattcctgtgcggcaacaattagctaaactctagttcagctgcccgctttaagaccagccatttgtactctactgtacccagagggctttcctaatagcgcctttcttaagtggctcctccaaagcagtggttcctaaaatctggcttcccactggaataatgtgaggagcttgaaaagttactaatgcctgcatttcaccccagagattttgatgtaatccatctggggtgcagaccaggtattgagatttttataagctcctcaggtatttgcaatgtgtagagaaaactgagaacccctgtctaagatagggcttctcaaagtttaacttgcataggaatcacctgataatcttgttaaaatgcagattttgattaagtatgcctgggatagggcctgggattctgcctttctaacaagctcttacatagtgccaaagctgctggtctatgggcctcacttgagaagtaaaggtctaagccatttgtatttcacattggctttgaaccctaagatacattcttaggtttcaagtctaatgaaagctaattctagcactcacaatattgatgtagctggaatgatgatgccaaatgagagtatcctaccatactttggggagaattctttctcagcctatagctactcagcctttcttgacattggggggtccttgacttcttatgccttgtatgtgacacccctgtatcacccctttcgttgcaaattgtacatcttctgctatttcgagctccttgctggtgtcactacctgctggccaacagtttggccattactgattgaaccatggtgtttgggtacttaatgtgagtattttattgcagaggttttcaatcagtgtttccagaagccttagagtaatagttctgaaaccatagggcatgcatcagatcacttggagagcttattaaaatacagattgctaggctccaccctcagcattcctgattcagtgaggacaatttgaatttccaacaaattctcaggagatccagatgtttctagtccaaggatccagaggttctagacagaaggaagggaggtggtgcaatgggcctcttggtcttgttacatgacttcttatcttatagttgtatttggggattctagactagattttattaaataaaaagattatttttaaaaaagcttgaatactgctgttttgttgcctttgcttttgtttcatagaaatcaattgaaggtgaaaataaataaaaatgctaatactagtgatatggggagatatcatcagtttaaaacaaatgaaatactgaatttatttagtatatgaaaagagagccttattttcttcccttgggacactctttatgatgaaaaaacgtaaaggaaatacaatgtatgctggaaataaattactaaagactgtgtctaaatgaggaggtgcatttgggaattttattgtttttaggtttgcgggtgaacagaatcccactgcaatagtgcataagactctttccagctatctccagaagaaggagataactagcaaggttttcactgttagagtttgttcagagcggaacctaaaggaaatactgggaaggtcacagcagtttcatctcagcttattggattggatcaaagtaattctactgcaaggcaaggtatatcattccatttacagacagagaatgcatgaagtccttcatttcacacagtaggtgtgaagaaggtaccttggtaaatttcctatttgctttcagataaagtgtattcttaaacatgatgtgggtagctgcctgtttttgtgtcgcctctgcaagagacatcttggaataatagaaacaccagtgtctgaatagcctaaagtggagcttacttttctgttaggtgagtcacctttaaaaatgatattttttaaggataagcgatgaattttaggacgttcttccctctacttccaacgtccacaagaataaaccaccaaattcaacgttttacagaggccaagtgcttaggttttgtgtgtttgtttttaagagttttcttgcaaggaaactgggagggaactataaaagggctttaggcaaacagggtgggcgggtgcagggctttaagctgcagaaaggagaatctggaaagagcttttaggaagcagattctcacatgttttaatatgaaagagtggcacacgtggtgctggcattccatcttaccatcagtggaaggtttgaaccaacatcaaatttttctggagcaacttaggtaattattacttgaagaatatgcatttcaaaactaacacctttaagagacaatgtaattcacctgcgcttccccgccccccccgcccgcgccaaccccaccccccgccaaccccgcccccgactccgcgaacgccgaggggcccgtggtctgcctgagtgacctccatttgctctgtcatctcaggactagaagccatcagccagcgtacgccctcagaaaactctcttcccttctcgcgggtccgcctggctcccggaggcggcggtgccaggctgccggagttagccagcggcaggctgcgggcgcccgtccctccggttcaccctttcacccctccttcacccccggagcgccaggcgggtgccgcgggttttccgcccactcggaaggcagtgctggcgagaccaggaattgcagggcctctccgctttggcgagctctggaatccgagtcctccccaccccagccactctgctggggcgctaggggctcgaaaaagcctggggttggctgaaagacactcggattagagacgcagccagcctccagggaggtctgaacttgtcttcgacctccccgaacccctccgcctctgcgctgggagacgcccagcagccgggcgggcccgggacgtgtagagccagagcactccgcagcggaggcagcgcgcggcacggccgcccggggcatccccgcggctggggggcggaaggcgagggcggtggcaggaagggtccgccaggcctgagctcgctcccccactgccagccgccggctcggaggcccgagccgtgcggacggaaaggggcggagccgcgggctctggttggtgtgggctcgggggcggggcgcgcggggccgggccggaggcggggctagcgccgggcgctggagctgcgggcgcacggagaggagtcgccagcagctggagcggagttggaggaagcagcggcagcggcgagggcggcaggctagctgtcggagacggcaagcacggatcgggcacggccggcgggtcgcagccgggctggaggccggtcggaaccgagcgggcaggaggccaccgctgcagcgcgggccccgcagaggaaggaagccggcgggcggggtaggtaggcagcagcagccccgggtgtgtgtgctcgggcgggggaggcggtgcatgtgtgcacggctgccgcgactctcttcctgtcactggcagcggcttctccttctgcagagccccgccggggggaagcgggctggccaccggccctccccgcctccggcatctcctggccgccgggcagcactacccccgcgcgcggccggcgtcctgtgagatccccgccatcctgactcccgtttcccccgtcctcctgcgagctggtcctgcacgccgccggtcgcatttgcccccggagttgccgacgagctcgggcttcctcccaccctccgtcaccgcacacttcggagggtccccgctgtcgccttgctgcagttttccggggcccctcaccggaggagagcgccctggccgctgccttcgtgttgcgggaaggagcgctcccttcccccgtggccctccagctgcagccagggtcgctgcccgggcccttcccggggcgggcgaggcggcggtggtccccggagctcgtcccctaacccccgccttccgaagtttgccgccctcctcttccggggtgggggaagtgcgcctcggggcggttggtcgctggggccctaactcagcgtttattgccagccaagcttgggcaggttgttggaggcatatttagtggggtcttggaaccgcccggaaatccagcttttggaacgtggggcgaggcgggagggacctgcccagcaatatggagccggctggggagagccagggagcctgcaacccggagctaaaatatcgtgggcaattctctggaaaccacagctctaacctaagctcagaaactgcccctcagatcacaagacaaagagaacagaaaacctctggccaggcactcctgtacagaaatacactttgataaccagaattggagcctgaaatgcaaggatatatgcagaatggctgttacgtgttgaatgcagaatgtgtgtcaactgggtttgggggaattcttctgtttcccggggcgctattaatatcggaaaggtctcacttccaccgttaatcccttgagctgcagcgctgttggtgtccgagtgtgagtctgctctttatttgggggcttcatgattttaggttttttttcttttttctcttcttttcctctttgtcagccagtgcgaagtaccaatggataaagcagttccgggttttgaatgcaacataagattgtcattttggtgtgatgaggctcaagttttagtaatcaggagggatattcacagagcttattggtcaaggcttgatgtggagttatattttaatgcttcattagttctgttacgttttggcaaccttaaagatggttagatattagctaggaagggttggagtgggcagacaggttcatttcttaagcaggttattagaatattagattgtcacagtttgaattactaggaatttggtgacttctgcacagaaggccacaagtatcttttaacattgaaaaaggaagaaaaagcaactcactagctatacaactttttgacagattacactgttcttgaaaaaccgtttagaagaaagcagataagagttttcttaggtgcaaaagttgattaaactttaggaagcaagtgtttttgaccagtataaagaaaataagagtaatgtgtgggggtgtgtgtgtgtgtgtgtgtgtgtgcgcgcgcgtgcctgcggctaaagtttgggaagaaatgttggttcagagttaaggtttaagttggaaaggccagtggaggaggctccctgccttgcagaactgctgggtattgtcactgcttgcctcttcagcttttatatgcaggtaggtactagataatcatattactttttccagagaagtggatagatttttatgattgggagaaagtttaatgtatctgatactggcttgcaaagtgtaatgtgcatttacttttaactttcatcttgacttgggacctgttcttagttgcataacagaactctgcagtgtacacactgctatttgatgttttatctgctttttaaaaataatgatatcagtgagtctcttcctatccatgatgctgtatagtcagtgtaaaaagcattttgtttcccatttattgaatgttttttctttag

SEQ ID NO: 136 - DNA, 6000 bp, Homo Sapiens
agagcctgattcataaatcttgttttaaatgctctgggcttggttctcaacccagactaaaggcaagcactaaggtagagggaaatgacattcaaagagttttacttgtctctgatttaatttttattggtttaaaatgtggtctgacattagagggttgcttcaaaggtgaaaaatgaaactttgaaaaattacatgtttgtagatgcgtagaactaaacgggcaagccacactaggttttgtcaaacaatagttttatttgtgtcctgagagacacaggtattttggtatgtatgtgtttaggaggggtatatagtcagttttacttttgttttcacagtgcagatgtctctttgtctcaagggacaaagatctgagggagaattgcaggggggactactttattctgctaagcagtggggatgcctttatcagaaacctggtagaatgtgtcagagtttatacatacgtaaacctgggcttatttatatacttaaatggatgttttccttagcataatgtcagttaagaccagtggatatggagcaaataatttgaattaccctaaaaggccctctgttctaagttgtcttaagttaaaattatgaagagaggtattcattttacccttagatgaagattttggttaatttttgttgtctattctttttttcatggtctttgttcataaatgatgtccagaaaaagaagaagttttctaggttgaaagctgcttgtgcaacatttgccacttgatggtgacttgtacatatgaaatatagtattcagtttgtaacttttgaacagtttaaggatcaagagacattttcctaactatatctgctgagaagtgaaacaatgggctgtatttgcctctgaaatgagttttacgaaactttgaggaaagggagaatgatacatattgttttaaagaatccagaaggtaaagttagttttccagtgtgtctaggcctttgaggtcccagagaaatgctgacattaaaataaaagttttcctacaacactagcagcttcgtgaaaactgtacttttgatttactaattagtgagtcatatagatcaagtgacagtaatacaattatgtacattagttggtgtcaaatttggacatacgaaatatacagaaagttgatggttttctcccaaagcaggaattactgattcagttctaccagcagagggctcccttttttaagctaataaagaacatgtgtcttgcagatcactttttaaacactaaaattcaacgggaaaaagattcagctcacactttcctaatataataggacctctttggtagatgattgtacatattgtgagaaatttgtttaaggcaaagtttttccaatctatttcaagactttctatacgttgagagagtactgctttccagtggcttattttcttctgaaacagaaaatatactggtggacttaacagagcattttaatcttagaaggttttgacatgaaacatcatgtgaatccagacaggtatgcttaggagactgatgtttccaatgtttctagctttagaaaggctatttttaaaagtagggcaagattatgcagctcaggatgcaagggtattctctgaactaaccatatgtccctatgatcagatggcagattcacttatagactgttatttccattgggaaagtttttcaatattatatcagttgcactaaaggaaagtttgtaaaatcactttcattgtgggtttaacagcactttccagatatttcaagtaaccctgaagctagttgctgctgttggcctgtgtggactttatgtgaccactggatcactttcccatgcagagtatgagggtattattgaaagaacctatgtcttcaaagggaatgaaatgttttgttttaatttaagcaagctaaaaatagaaaacagaaaaaaccagagttttgttaggggtgtgaaattttttgcatgtggcttaaaagattaacttcagttttgtccatttttttttacgttctctagcaaagggaagtgaggagcagggacaatgggtagagaagggcatttgaaaccatcagaagattgggttctagtcttagggctataatcttctgtaaaccacttcacctccctgggtcagatttcgttttcccctctatggcatgcaggaattgattgaagtgaactctaaattactttctggtgtaaagtttggtgatttccctggataaccttaaagctatctatgctcatgcaactgaaaattttcttagatcaaattttaattaaatagtagtcagtaatcccaagtctggtccattgccactttctcaaataaagggcaaacatccgcttagaaaggtatgcccttctctgcccttctatcctttaccccattagctggcacataaacctaatgcagagacaccttttaattagcaggtcatatggccatttaaatgcgagttgcaatcgacctcataaaaatagccgcagtgttgttttattctgaatcgtcacatgatcatggagtatagtatgcatatggtgtggggtttaatattcgtccgaggatgccctcctactacttactattgaacatttttgtaatctcctccctgcccgagttgctcacaagggctttcctgttacacctgcagggctgtctgtgctggtgtgtgggaggaggtgcaagaggtggacacgagcgaggcgctgtgttctgggttgttccaagaggttcaggcctttacaagtgaggctttgattctattttttgctgaactagctcagccacttcctgtgtttggctgtgcatagtgcctcgcttcactgtcggctacttgagccccgcgagccagccagcgcgctcagcagccagtgagactattttaggtcccctcacaatggccttctcatttcccaggcgaaaatgagcaagttggtcttgcattggccacttgtcagccgatgacaactttgacttgggctcccctccccctcccgaaatccctagctcagcaaatatttgaacctgcccaagttaatcatgaagctgcgatctttatctaagggagacgtgcgagcgcctgggctcctttcctccccgatacagtagcgaaatccagttggcttctcaatgaggagccggcagtgagcggcggtggcccggacgcactgccgggcggggcgtggggcggagggacgagccgagccgagccaagcggagctgggccactgtgcacgcccggagggtcctggcggcgcccccgctcctgcgcgcactctcggcgccggacacgagcactgcctgccgggaacaggctggggggaggtgcgggggcttggcccacttggtggaagaacagctttggggattttttttttttcattgtcggatacaggcatttcaaagggaaaccgttgaaatgcataacctgcaaagtaagttgccttgaatttgtgcacttctctgttccttatctgagcggtgcctttctgtagtttgtcttggagtacgtgtgtgtgcgtgcgcccctgtaagcgctgcctggggaggacagatgggagattaggggagacactccccctgtcctcgagggggacagtggctgggaaagatagggtttaggttggaatttcagtaagaaggtactaattacaacgtgcttggttggaagttggtgccaggccagggcttggagagaccatgggaaaatcacctgtctccctgccttctccctgagttagtttgccacagaagatccaacagccagactggtttgcaccgacggttcccaaatgcatggactggcactctgggctgttacacccgccacagctgctcggagaacttgtctccttgcttcgggggagggtcgacattttaattaaactaaaaaagaatgtttttctgaatcttagggcatacagccacttttaccatttttatttgaatttgagttcaggtaaacttaggcaaatagaaaagtgggagagggtgggaagagacaaggtgagcctgcttttcccaatactgggaaaatgaattaaactagacgggggacgtcagagaacagaatgccttgcctttggtctgctttttaatatattttatgatcccaaattttacagaaagtctcaagggtttctgtgttttttaaatggtcaaatatgtgacatacatgtgtacatagatcacagagccccactgtagttttttaaatgagccacatttaccttggggaagagcccctccccccccgccatcataatattgtgaatgtaaagagagattggttcacaatgagaatgtacagtaggctcctataagggtgacaggattatatgcagaatgactttgaagagccaaaattgatttatttatgttaagtagtgctaagaaggaatatttgtcccggagtgaggcatttgagatagagggggaaaagcaaaaaaaaaaaaaaaaaaaaaaaaaaagtgattacatcatcttcccgttcaagcagtattagtagcgaagatgggttcatcagtgaaatattttgcaaagataaatatacctccactctgcattctgatctatagcctctttctttttggaagaagcattttctttgcccagtttttttaggcagtcacattaaaattctcattaataatgttgacagacaattacgtttattatttctgctaataggcatctgcattcctattcagaattttcattgttagtctataaagtctagttttaactttggaatgtttggtagaggaggacatctatacattttcttttaactgtcctttctaatgtggtacatttgtgacagtgtttgaattctgggttttcagtgaattatggaggactaaaataccaggagtagtccgtactgcttctcttatacatgagagatatctaaggactataaaacataacttaagtatacccttttaatgcctttgtaagatttttaaaccaaggaatgactgggctatctataaacccagatgcactaagtggggagaaaagctcggagctgcagcatatcagcttttgtcaacctgccaacagcagagcgtaccatgctgcaaggagtaataaacaaggaattagaaaactcgctgctggagaacagtcaaattaaacacctttttgaaaggatgagcatgtatatattgcagttctattaaatgtagcttcttagtgaggttggcattatgttaaggctggtatggaagagaactgatgaagcaggagtggtctggtgacatttttctgacttgattggctggggcgtgtgatgtaataggtttcagtgcagccccttataggttttaaaatgaattccaagacaccattacaaagaaagccggactcttttcttataactgagctcagccaaggaaactcttgcacaaatgtacaatactgtttggaatatggaagacctggatttagaatatgccaagacagatataaattgtggcacagacttgatgttttatatagaaatggacccaccaggtaatactgcagtattattgtagagagttagttaatttcgtggctttttaatttttcgaaagctactgtaaaagatcctttttggatttctgtttttattaatttgtttcattgataaaaattagtttgctcatggcttaaaaattaaacagattgtttgactgtctgtggaagcaagcagctcaggctgtgtgtggtaaatgcttattcttacttgaatggatatgaattgaactccagtttttcactggtgtcttttgttaatcgagatccttccctgggtgagttatgttgtgggatattgtccctgtaattaaaatgatgcatcttttgtgctgcttttctctgttgccagtggatgagaacagtgtagcactttgcagtgataacacttggtactttagaaagcatgtaaaatgtagcagtgattacaactcagttctctaaatgttgagactttgcttgctctct

SEQ ID NO: 137 - DNA, 16 bp, Homo Sapiens
ggacgcctccgtcttg

SEQ ID NO: 138 - DNA, 16 bp, Homo Sapiens
gaggagctagcgcaga

SEQ ID NO: 139 - DNA, 16 bp, Homo Sapiens
ccataaccccagccca

SEQ ID NO: 140 - DNA, 16 bp, Homo Sapiens
accgaaccgacccgtg

SEQ ID NO: 141 - DNA, 16 bp, Homo Sapiens
aacccgcaccgcctgg

SEQ ID NO: 142 - DNA, 16 bp, Homo Sapiens
aaactgctcacatcgg

SEQ ID NO: 143 - DNA, 16 bp, Homo Sapiens
gacggggtttcggaaa

SEQ ID NO: 144 - DNA, 16 bp, Homo Sapiens
taccgagtctctggtg

SEQ ID NO: 145 - DNA, 16 bp, Homo Sapiens
ggtcgcactgggatca

SEQ ID NO: 146 - DNA, 16 bp, Homo Sapiens
cttgcacagggtcgca

SEQ ID NO: 147 - DNA, 16 bp, Homo Sapiens
cagctgctacagcgct

SEQ ID NO: 148 - DNA, 16 bp, Homo Sapiens
gagggggtgagaggca

SEQ ID NO: 149 - DNA, 17 bp, Homo Sapiens
ggcaaggggggcggggg

SEQ ID NO: 150 - DNA, 16 bp, Homo Sapiens
ctggctgggtaggggc

SEQ ID NO: 151 - DNA, 16 bp, Homo Sapiens
gccctgctgtgggtgc

SEQ ID NO: 152 - DNA, 16 bp, Homo Sapiens
gctgggacctctgaca

SEQ ID NO: 153 - DNA, 16 bp, Homo Sapiens
gggctgaagaaactcc

SEQ ID NO: 154 - DNA, 16 bp, Homo Sapiens
tctagggacgccccga

SEQ ID NO: 155 - DNA, 17 bp, Homo Sapiens
cccgagcgtggtgttta

SEQ ID NO: 156 - DNA, 16 bp, Homo Sapiens
aggtgtccgcgcacta

SEQ ID NO: 157 - DNA, 16 bp, Homo Sapiens
tttccaggcaagggga

SEQ ID NO: 158 - DNA, 19 bp, Homo Sapiens
cctgtccctcaaatcctct

SEQ ID NO: 159 - DNA, 18 bp, Homo Sapiens
ttcctccggtgctggcgg

SEQ ID NO: 160 - DNA, 16 bp, Homo Sapiens
tccgagcacttagcga

SEQ ID NO: 161 - DNA, 18 bp, Homo Sapiens
gccaaacacggcaaccga

SEQ ID NO: 162 - DNA, 16 bp, Homo Sapiens
caaccgacgggaaggc

SEQ ID NO: 163 - DNA, 16 bp, Homo Sapiens
caggcgagtaagcgcc

SEQ ID NO: 164 - DNA, 17 bp, Homo Sapiens
gagccccggcagcgtga

SEQ ID NO: 165 - DNA, 16 bp, Homo Sapiens
gcgcgctggggctgag

SEQ ID NO: 166 - DNA, 16 bp, Homo Sapiens
gccctggaggtggcca

SEQ ID NO: 167 - DNA, 16 bp, Homo Sapiens
accggggctgtgcggg

SEQ ID NO: 168 - DNA, 16 bp, Homo Sapiens
cacttcgctgcggtcc

SEQ ID NO: 169 - DNA, 16 bp, Homo Sapiens
gatgtcccggcgcgcc

SEQ ID NO: 170 - DNA, 16 bp, Homo Sapiens
gcagcggtcttaggga

SEQ ID NO: 171 - DNA, 16 bp, Homo Sapiens
gcaagctccgggatcg

SEQ ID NO: 172 - DNA, 16 bp, Homo Sapiens
ggcgaggcgacagccc

SEQ ID NO: 173 - DNA, 17 bp, Homo Sapiens
cagccctcccgcacgct

SEQ ID NO: 174 - DNA, 17 bp, Homo Sapiens
ggccttcccgaaggcac

SEQ ID NO: 175 - DNA, 17 bp, Homo Sapiens
gcccaccgacctagtgg

SEQ ID NO: 176 - DNA, 17 bp, Homo Sapiens
ttctccgcccgccggta

SEQ ID NO: 177 - DNA, 16 bp, Homo Sapiens
tccgtcaaggagtacg

SEQ ID NO: 178 - DNA, 17 bp, Homo Sapiens
gtcggcactagacgcgc

SEQ ID NO: 179 - DNA, 18 bp, Homo Sapiens
ggagattctacgagcaat

SEQ ID NO: 180 - DNA, 16 bp, Homo Sapiens
atgccgagaacgcgag

SEQ ID NO: 181 - DNA, 16 bp, Homo Sapiens
agcgatccgagcaggg

SEQ ID NO: 182 - DNA, 16 bp, Homo Sapiens
caccgtcggggtagga

SEQ ID NO: 183 - DNA, 16 bp, Homo Sapiens
aacgcattcggaaggc

SEQ ID NO: 184 - DNA, 20 bp, Homo Sapiens
aatcaaacagaaagagagac

SEQ ID NO: 185 - DNA, 16 bp, Homo Sapiens
tccccagggtcatcct

SEQ ID NO: 186 - DNA, 16 bp, Homo Sapiens
gaatgcccgccggtac

SEQ ID NO: 187 - DNA, 16 bp, Homo Sapiens
cattcaccgcggggct

SEQ ID NO: 188 - DNA, 17 bp, Homo Sapiens
ggaaagcaccggcatct

SEQ ID NO: 189 - DNA, 18 bp, Homo Sapiens
tgacacctacgctgtaga

SEQ ID NO: 190 - DNA, 18 bp, Homo Sapiens
accgagcagggtccgaac

SEQ ID NO: 191 - DNA, 17 bp, Homo Sapiens
ccagcgagggaccccgg

SEQ ID NO: 192 - DNA, 16 bp, Homo Sapiens
cagcgccgcagctcag

SEQ ID NO: 193 - DNA, 17 bp, Homo Sapiens
tgacttcctgacggtcc

SEQ ID NO: 194 - DNA, 16 bp, Homo Sapiens
ctactctcaggtgctc

SEQ ID NO: 195 - DNA, 16 bp, Homo Sapiens
caccccgttagggccc

SEQ ID NO: 196 - DNA, 16 bp, Homo Sapiens
gaaactctgggcactc

SEQ ID NO: 197 - DNA, 16 bp, Homo Sapiens
caccccggacggccac

SEQ ID NO: 198 - DNA, 16 bp, Homo Sapiens
gacggcgaccgcaaag

SEQ ID NO: 199 - DNA, 17 bp, Homo Sapiens
cacgcggagatacccgt

SEQ ID NO: 200 - DNA, 16 bp, Homo Sapiens
ggcgcgctctcgcaga

SEQ ID NO: 201 - DNA, 18 bp, Homo Sapiens
tctacgtcctcgacaacc

SEQ ID NO: 202 - DNA, 16 bp, Homo Sapiens
gtctgcatctccaggt

SEQ ID NO: 203 - DNA, 16 bp, Homo Sapiens
cggtcctggccagggt

SEQ ID NO: 204 - DNA, 18 bp, Homo Sapiens
tattgtcgatgattcagt

SEQ ID NO: 205 - DNA, 16 bp, Homo Sapiens
aaccgtcctcgggagc

SEQ ID NO: 206 - DNA, 16 bp, Homo Sapiens
ctcgggagccgactat

SEQ ID NO: 207 - DNA, 20 bp, Homo Sapiens
agtatgataacgaaccacaa

SEQ ID NO: 208 - DNA, 16 bp, Homo Sapiens
gaggccagaggctgca

SEQ ID NO: 209 - DNA, 16 bp, Homo Sapiens
ctccagacataaggag

SEQ ID NO: 210 - DNA, 17 bp, Homo Sapiens
tgagccacctcctggca

SEQ ID NO: 211 - DNA, 18 bp, Homo Sapiens
ggctcccagaaagccttg

SEQ ID NO: 212 - DNA, 16 bp, Homo Sapiens
ctccaacacagcagag

SEQ ID NO: 213 - DNA, 16 bp, Homo Sapiens
agaacgtgaactccaa

SEQ ID NO: 214 - DNA, 16 bp, Homo Sapiens
ccaccccagctgcaag

SEQ ID NO: 215 - DNA, 16 bp, Homo Sapiens
tagacaagtctccctc

SEQ ID NO: 216 - DNA, 16 bp, Homo Sapiens
cctcgggcgcctgaga

SEQ ID NO: 217 - DNA, 17 bp, Homo Sapiens
ccacttgccgggcaacg

SEQ ID NO: 218 - DNA, 16 bp, Homo Sapiens
gcctgggcatgatgaa

SEQ ID NO: 219 - DNA, 17 bp, Homo Sapiens
gcctctcgtgcccgccc

SEQ ID NO: 220 - DNA, 16 bp, Homo Sapiens
cctcccggacacctac

SEQ ID NO: 221 - DNA, 16 bp, Homo Sapiens
cctggagaaactttat

SEQ ID NO: 222 - DNA, 16 bp, Homo Sapiens
ccccgggccctgcctc

SEQ ID NO: 223 - DNA, 16 bp, Homo Sapiens
gcttaggttaccgctc

SEQ ID NO: 224 - DNA, 16 bp, Homo Sapiens
tcccggccgcccgcaa

SEQ ID NO: 225 - DNA, 16 bp, Homo Sapiens
atctgccacgccgcgc

SEQ ID NO: 226 - DNA, 16 bp, Homo Sapiens
agctcgtcgcccatgc

SEQ ID NO: 227 - DNA, 16 bp, Homo Sapiens
gcagccgcaggcggtt

SEQ ID NO: 228 - DNA, 16 bp, Homo Sapiens
agcgggtaacggtttc

SEQ ID NO: 229 - DNA, 16 bp, Homo Sapiens
aggaccgcccccgcac

SEQ ID NO: 230 - DNA, 16 bp, Homo Sapiens
aggtacaacgggacgt

SEQ ID NO: 231 - DNA, 17 bp, Homo Sapiens
atcgagctgtctcgtaa

SEQ ID NO: 232 - DNA, 20 bp, Homo Sapiens
tctcgtaaggaatatcggaa

SEQ ID NO: 233 - DNA, 16 bp, Homo Sapiens
gaaagacagttgtgaa

SEQ ID NO: 234 - DNA, 16 bp, Homo Sapiens
ccagacgcggccgcct

SEQ ID NO: 235 - DNA, 16 bp, Homo Sapiens
acaacgtcagtgcgca

SEQ ID NO: 236 - DNA, 6197 bp, Artificial Sequence
  chemically treated genomic DNA (Homo sapiens)
tcgggagtttaaaggtaggaggtagggatgtgatttttataggtttaagaggagttagattattttagtgcggttggaagtttttatgttatattttatttttttcgtattttaacgtagtttatttggggaattggagtaggatttaggtttaaatttatatttttagttaatttaaattttgattttattatttttaggttatataggttatttttttgaattttagttttcgtatttgtaaaatggaatttttttttttttttttttttttttttttttttttttttttgagatagagttttattttgtcgttaggttggagtgtagtagtgcgattttggtttattgtaatttttgttttttaggtttaagtaatttttttgttttaatttttcgaatagttaggattataggtatttattattatatttggttaatttttgtatttttagtatagatagggttttattattttggttaggttggtattgaatttttgatttcgtgatttatttttttcggttttttaaagtgttgggattataggtgtgaattatcgtgtttagtttgtagaatggaattttaatattaatttgtttaagtatatgtttatgttattttaaaagataatttttgtaggttaggtgtagtgatttacgtttgtaattttagtattttgggaggttgagggatgtggattattggagtttaaaagtttaagattagtttgagtaaaatagggagatttttatttttattgaaaattgttttaaaaaaattagttaggtatgatggtgtatgtttgtagttttagttatttagaaggttgaggtgggaggattatttgagttagtgaggttaaggttgtaattagttatgatggtgttattgtattttagtttgggtgatagagttagattttgttttaaaaaaataatgaaaaatttaaaaagatgatttttttgataattatgggttgttttggggatttaatgagatggttttatatatagttggggatagggttagtgtttgaaaaataggtggtaattatataaaggattttgatattaggggtcgttttgagtttgttagagttatgtagtggtagttaatgttattgttgttattatttggttttaaaggaattattttaataatttttaatatgtttttattaattttttgaaaatattatttaaatgaaaatatatagttaaaaagagttaatgttttgtagatatttttttttattcgttaaggttttcggatattagtttgagaagttgggttttagggcgttttgtttttaaagtagaatatggtttgttttttttatttttggttgttatttgaatttagttagtttttttttatataggtttttttttatttatttgtgttttttttttttggggataaagttttggatttttattatagtttaggttttgagttttgttattttgtttttttttttttatttattttttcggttttagttatatgggtttgttgttttattagtatatttagatatcgttttttttgcggtttttatttggttgtatttcgtttagtttattttttcgggtttttatattataggggttttttagtagtttttttaagttttttttttatttagtttagttagatttttgtttttttttttagttatattaagtatttataggttaatgtaatttttttgttattttcgatcgtatttagaattatacgtggtatatagaagtgatttaattaatatttggagatagatggaatatataaatgattaagaatagttaaaggttggtttttgaggttgtttagtaattaggtttttagggtagtggggagggggtgttttttatttttattttttttttttgggttttttttgggaggggttaaggttatggtattgggggtggagagaagtagttatattttatattttaagtaggtatggaatggagttatttttggattattgaggtttattttgtgttagttttgtttaggagaagagaaagtagaaaagaaattatgatgataatagtgataattttagttatagtaggtagggtaagaagatgaggttgtttttaaaaggtagtttcgtcgatagagtagggtttaattattatgtttattattgatttttagtaaatttaataatttttttatgttcgtttttttttttgtataacggggacgatcgggatagcgagttgttaggttgtggtgaggatgagtgagagtagatattttaagttttgtagtagtgtttagtattgagaggcgaattatttacgagaatgattttaatattttatgtggttttttgggttttagttttttatttacgagatgggagtgttaatattgtttattttttaggttgttgtgtaggtttgtagagttaatatgtagcgtttggttgggtaggagtatagtggtgggagtgatttatatttttgtttggagtttttttattagttaataggttttattatttttttttaaggattaataacgagtttgtgtttattgttttgtagagttttttttgtgtttttaggtgtttttagttttgtttggtaattattaggagtagtattagtttaaatttatttcgtcgtttttttaggaggtttgtgttttttaacgtagtagtttcgtgtattttttttatcgttttatttagtaggaaggttttcgtttatagttgagtaaaatgtattttagggagaagaaataaggttttagagttttatagttatcgagaggggtgttaagagtagggtttttatttacgttagttattttcgggattaggttatttagtagttttagttgggtaagtgtatattaaaaatttattagattatgaagaatttgaagttaggttggagaagagaatcggggagcggtaattgttttagtttattcggaaagggtttataaagtggtaaatcgaggaagatttgggtttttggttttatttttagaaataatatttgcgaacgagtttttttagtaggacggttgggttgaagaaatttttgttgggatttttgatatgtagtttttttttggtcgattcggtttgttgtttttcgttcggtatagttagagtatttgggttttgttgtgggtgtcgagttggtagtgggttttgttttaagggggttaggttgagtttttatttagcgttttttttatatttatttttttttttttggttttgtttttaggttgttttttttagttgggtttttcgttgtttggttggttgtttagaagagtttgttatggaattattttatcgtgcggttcggaggtttgtggttgagggtttttcgttgagagttttgggaagttgaagagaggttcggggaggggtgattttgggttttttaggggtttggagtttaagtttgaaagatatttttttttattttaatttatttcgggggttttttggagattttagtggtttgttttgaggggttttgttttttttaggaagatattttggaatatattttaaaaaaaaaaaaaaaagttagagcgtttgttttcgtattaagttttaggggtgagtttatgggtgggattagaagttatatttattaggggttattgagttgtggtgggggaatttttggaagtttagatttatagtttgtttttaatattttttggttgggggatttagtataagttatagaggttttttaggttttagtttttattatttgtaaagcgggaattagagaagattttttttgggtttaatgggtttttatttagatttttttatggtttttttatagtattttagtttttatttatacgttatttttttagggaggttttttttgattatttagttatagtggagaaatatgtttatatttttaatttggtttttatttattttgttttcgtaatattaattatatttgagtttaattagagatttgggtgttgggcgttagttataagttttggtttttttaattttagaggagtattgggaatggcgtaggtttataggtttacggtagcgtggacgtagggttagcgggtgttgtttgtattaggtgtgattgttgttttgcgttgttatttagtattagttcggttggttgggttggggaggaatgggtagagaaattagtttaatgagtttttttttttttttttttaaaagtaatagttacgggttttggagaatacggtgtgaaaattataggagggaggtaatttttaggtttttgttggttgtaaggtagtgatgttattggaggggaagtgggaggtttgtgaaacgttttgtttcgtttagttaaatttatttacgtttttaggtaggagtttgtgatcggtttttgggttatttgttaatattttgaatttgattaggttgtttttgttgaaattttaaatttttttatagatagtttataaggtttttagtgaaagggttttgtttgtttcgtagttttaggatttattttttttttgttttttcgttttgttaagttatataggttttcgtgaggtttgtttttgtattttattaagttttgttttttttttagatttttgtattgtggttttttttatttggagggttgttttttttttttttattttatatgattgttttattttgttaaattgggattagtttagaggttttttttatagtcgtatgtatttaaagaagtgtttagtttgttatttgatttgaattcgttgtttagtttttttttttttaatcggttttttgtttattaatttgtttcgggttggttttgtttagttttataaggatagggattttggtaagtatattgttgtatttttagtattgatgtaacgttggtatatacgaggtgtttagtaaatggtggcggatgagtgaaatttttttttcggttttataatatttttaggatttatttttattttttatttaggtttataggttagtgtagtatagtttttgttaatttttgtaggtatttttgttgttttttttgtttaggtttagtttttttgttatttttagagttgtgagttgtggtgggttgggaattaggggtagtggtatgtatttacggttttagttatttaggagattgaggtaggaggattatttgagtttaggagtttaagattagtttgagtaatatagcgagattttcgtttttataaaaaatttaaaaattagttaggtatggtggtatgtatttgtagttttagttatttaagaggatgaggtggaaggattattaaagtttaggaggttaagtttgtagtgagttgtgattatattattgtattttagtttgggtgatagagggaggttttgttttaaaagaaaaaaaaaaataagtatagagtttgatttttgaaaagattttagtgtgtttattttggaggcgtttagggttgtaaagttattgcgtggaagaggagtgggttcgggagttgtttttgttagttttgatttgattgtatgtttttttcgatttttgtttttgtatttgtaaaattgagatgttaattttagttttgatttttttttagtgttttttgatacggttttgtgaattggtaaaggtttttaaagtttcggtagaaatattaagaattataattgttaagatagattaatagtttattatgtgtcgggtattgtttttagtgaggagatattttcggtaggtttattgtatgttagaatagttatgaatgttttttataaattaatttatttagtttttataataattttattaggtgggaattattattatttttatggtatcgatgatgaaatgagtttataagggttggggagtttgtttaaggttatatagttatggagtggtacggttggatttgaattttgtgtttttattcgtttttatatatttttttatagaggttggaaattagaatattgaagttttggattttagttgggttaggttggggagttggatttcggaatgttcgaggggattaaaagtagggggtgggggaggttggatgttttcgttttataatataattatgattgttaattaagatttatatagtattaggtattattttaggagtttttcgtggattaatttatttaatttttataatagtttaaggtggat

SEQ ID NO: 237 - DNA, 6197 bp, Artificial Sequence
  chemically treated genomic DNA (Homo sapiens)
gtttattttgggttgttgtgaggattaaatgaattaatttacgagaagtttttagaatggtgtttggtattgtgtaagttttggttggtagttatgattatgttatggaacggaggtatttagttttttttattttttatttttggttttttcgagtatttcgggatttagttttttagtttggtttagttaggatttagaattttaatgttttggtttttagtttttgtaaagaggtgtatggaagcgagtgagagtatagggtttaaatttagtcgtgttattttatggttgtgtgattttgagtaggttttttaatttttgtgagtttattttattatcggtgttatggggatgatgataatttttatttgataggattattgtgaaggttgagtggattaatttgtgggaagtatttataattgttttggtatataataagtttatcggaaatgtttttttattaagaatagtgttcgatatatggtgagttgttggtttgttttagtaattgtaatttttagtatttttgtcgggattttgaaggtttttgttagtttatagaatcgtgttagagagtattaggaggagattagggttgaaattagtattttagttttatagatgtagaaatagaggtcgggggagatatgtaattaagttagaattgataagggtagttttcgggtttattttttttttacgtagtggttttgtagttttgagcgtttttaaggtagatatattggagtttttttagaggttaggttttgtgtttgttttttttttttttttgagatagggtttttttttgttatttaggttggagtgtagtggtgtgattatagtttattgtaggtttgattttttaggttttagtgatttttttattttatttttttgagtagttgggattataggtgtatgttattatgtttagttaatttttaaattttttgtggaaacgggagtttcgttatgttgtttaggttagttttgaatttttgggtttaagtgatttttttgttttagttttttgagtagttgggatcgtaggtgtatgttattgtttttggtttttagtttattatagtttatagttttgggagtggtaggaaggttgggtttgggtagggggagtagtagaagtgtttgtaggggttggtaggggttgtgttgtattggtttgtgggtttgggtgagaggtgaggatggattttaagggtattgtggagtcgaggaaaaggttttatttattcgttattatttattgaatatttcgtatgtgttagcgttgtattagtattgggaatatagtagtgtatttgttaaagtttttatttttgtggggttaagtaagattaattcgaaataggttaataagtaaggagtcggttagagggggaggagttaggtagcgaatttaaattaggtgatagattgggtatttttttagatgtatgcggttgtggggagggtttttgagttgattttagtttggtaaggtgaggtagttatgtgggatgggaggagaaggaatagttttttaggtggagggaattatagtgtaaaggtttgaagggaggatagagtttggtgaggtgtagggataagttttacggaggtttgtgtggtttggtagagcgagggagtagggaggagatgagttttggggttgcggggtaggtagggtttttttattgggagttttgtggattgtttgtgaaggagtttggaattttagtaggaatagtttggttagatttagggtgttagtaggtgatttaggagtcggttataggtttttgtttgggggcgtgggtagatttgattgagcggagtagggcgttttataggttttttattttttttttagtagtattattgttttatagttagtaaaggtttgagggttgttttttttttgtggtttttatatcgtgttttttagagttcgtggttgttatttttagggaaagaggaggggaggtttattgggttgatttttttgtttatttttttttaatttaattagtcggattaatattgaatagtaacgtagggtagtagttatatttgatatagatagtattcgttgattttgcgtttacgttgtcgtgggtttgtaggtttgcgttatttttagtgtttttttggaattggaaagattagggtttgtgattggcgtttagtatttaggtttttggttgggtttaggtgtggttgatattacgaaggtaaaataaatgagggttaggttgagagtgtgggtatgtttttttattatagttgggtgattagggaggatttttttgaggaggtgacgtgtgggtagggattggagtgttgtgagggagttatgggaggatttgggtgaagatttattagatttaggaggaattttttttgattttcgttttataagtggtgagaattgaagtttggagagtttttgtagtttgtgttgagttttttaattaggaagtgttggggataggttatgaatttgggtttttagagatttttttattatagtttagtagtttttggtgagtgtgatttttgattttatttatgggtttatttttaaggtttggtgcgggagtaggcgttttggtttttttttttttttttgaggtgtgttttagggtatttttttagaaggagtagaattttttagaataaattattagggtttttagaaggttttcgggatgggttgggatggaaaggagtgttttttagatttgagttttaagtttttggaggatttagggttattttttttcgggtttttttttagttttttagagtttttagcggaaggtttttaattataggttttcgggtcgtacggtggggtggttttatggtaggtttttttggatagttagttaagtagcgagaggtttagttgggggagatagtttgggagtaggattaggagggagggagtgagtgtgggaggggcgttgggtgggagtttagtttggtttttttggggtaggatttattgttaattcggtatttatagtagggtttaggtgttttgattgtgtcgagcgagggatagtaagtcgggtcggttaagaggagattgtatgttagaggttttagtaggagtttttttagtttagtcgttttgttggagaagttcgttcgtagatgttgtttttaagggtgaggttagaaatttaagtttttttcggtttgttattttgtgggtttttttcgaatgggttggggtagttgtcgtttttcggtttttttttttagtttggttttaagttttttatggtttggtgggtttttggtgtatatttatttagttggggttgttgagtgatttggtttcgggggtagttgacgtgggtgagaattttgtttttggtatttttttcggtggttgtggagttttggggttttattttttttttttaaggtgtattttgtttagttgtaaacgggaatttttttgttgagtggggcggtggggaggatgtacggagttgttgcgttggaaagtataggttttttgaggaggcggcgggatgaatttgggttgatgttatttttggtgattgttagataggattgagggtatttgagagtatagaaggggttttgtagggtagtgggtataggttcgttgttggtttttgggagagagtggtagggtttgttagttgatgggagggttttagataggaatgtgaattatttttattattgtatttttgtttaattagacgttgtatattagttttataaatttgtatagtagtttgggaggtgggtagtgttagtatttttatttcgtagataggaaattgaggtttaggaagttatatagaatattggggttattttcgtgagtagttcgttttttagtgttgggtattgttgtagagtttaaggtgtttgtttttatttatttttattatagtttggtagttcgttgtttcgatcgttttcgttgtataggggaggaaacgggtatagagaggttattggatttgttggaagttagtaataggtatgatggttgaattttgttttgtcggcgaagttgttttttgaagatagttttatttttttgttttgtttgttatgattggagttgttattgttgttattatgattttttttttgttttttttttttttagatagagttggtataaagtaggttttagtaatttagaaatgattttattttatgtttgtttgggatgtggggtgtggttgtttttttttatttttaatattatgattttggttttttttaaggggggtttagggggaagagatgaggatgggaggtattttttttttattgttttaggggtttgattgttgaatagttttaggagttagtttttggttgtttttggttatttgtgtgttttatttgtttttaaatattgattgaattatttttatgtgttacgtgtagttttggatgcgatcggaggtggtagagaggttgtattggtttgtgagtgtttggtgtggttgaaggagggaatagagatttagttggattgggtgggagaggggtttgggaaggttgttgaggagtttttgtgatgtgagagttcgaggaagtgggttggacggggtgtagttaggtaaaggtcgtaaggaaggcgatatttggatgtgttggtggaatagtaggtttatgtagttggagtcgggggagtgggtgagggggagagagtagggtggtagggtttagggtttgggttatgatggggatttagggttttatttttaaagagaagggatataggtgggtggggagggatttgtgtgggagagagttggttggatttaggtggtagttagggatggagaaagtagattatattttgttttggagatagggcgttttagagtttagttttttaaattggtgttcgaaggttttggcgggtgggaggaggtgtttgtagggtattgattttttttagttgtgtgtttttatttagatgatatttttaaaaagttagtaggggtatgttggaaattattgggatgatttttttagaattaagtagtgatagtagtaatattagttgttattgtatggttttgataggtttaggacggtttttgatgttagagttttttatgtaattgttatttattttttaagtattggttttgtttttagttgtgtgtgaagttattttattgggtttttaggataatttatggttattagaaaaattatttttttaaattttttattatttttttgagatagggtttggttttgttatttaggttggaatgtagtggtattattatggttgattgtagttttgattttattggtttaagtggtttttttattttagttttttgagtagttgggattataggtatgtattattatatttggttaatttttttaaaataatttttagtagagatgggagtttttttattttgtttaggttgattttgaatttttgggttttagtgatttatattttttagttttttaaagtgttgggattataggcgtgaattattgtatttggtttgtaaaaattattttttgagataatataaatatgtgtttgggtagattggtgttaagattttattttataggttgggtacggtggtttatatttgtaattttagtattttgggaggtcgaggagggtggattacgaggttaggagtttagtattagtttggttaagatggtgaaattttgtttgtattaaaaatataaaaattagttaggtgtggtggtgggtgtttataattttagttattcgggaggttgagataggagaattgtttgaatttgggaagtagaggttgtagtgagttaagatcgtattattgtattttagtttggcgatagagtgagattttgttttaaaaaaaaaaaaaaaaaaaaaaaaaaaaaaaaaaaaaaagattttattttatagatgcggaagttgaggtttagagaagtgatttgtgtagtttggaagtggtagagttaggatttgagttgattagaggtgtgagtttgggtttgagttttgttttaattttttaggtaagttgcgttggggtgcgggagagatggggtatagtatgggagtttttagtcgtattgggatgatttggttttttttgggtttgtgagagttatatttttgttttttgtttttaagttttcgg

SEQ ID NO: 238 - DNA, 6201 bp, Artificial Sequence
  chemically treated genomic DNA (Homo sapiens)
gtttagaggaggaggtagggacgtcgggaagtaataattttgattttatttcgtcggttttatagttttttattgttttaggagtttattcgtattttaattttcgtatttcggatttgtggttttagtttagatttatattattaagtgtatttatttagttttcgttattttggatttaggtgtgtaggtgtcggtttaggtatttagttatttatagggcgatgttgtttattaggggcgatatttttcggttgacgttttttatatatatgattttatcgaatttaaagaaggttataatttttttttagtttatttcgtttttgaagagtttttttattatcgtggtaaagcgttttcgcgcggtgaagggcgttaggtgtagttggttggatatttcggcgaagtcgcggcggtagcggcgggagaagtcgtcgtcggtttggcggagggttaggtggattataggtggtatcgggttgagcgtaggtttcgcggcggcgtcgggggtagtcggggtttgtagcggcgaggttttggcgatcgggtttcgggatgcggttggatggggcgtgtgttcgggttgggaggagaagatgttcggtgcgggggcggttttcgggggcgcggcgtttatatttttcgtattttattcgtagtttttttgcgatagtttataatggatgtattttattattatttttcggttatcgtattttgtttttttagcgtgcgttattttttttagaggaaaagtaacgggggttaacggtatttttcgttttagtttttattttacggtttttagagaaagaagaggagttataatttagttattttattggatgtgttttgtatttttggacgagggggtgtttttaattacgcggaatatttgattttggtgttttttttttggtatgagatgtaggaaatttttattttaatttttttcggatttttattttatgaggtacgttattattagtaagtattgttaatattagtttattttttttgtgatgttgaaaggttaaagaaaaaataaattaataagtaaaaaattaggtgcgtttttttgtatatattgagtgaaagtagggtatatatattataagtaatacggttaaaaagaatgtattaagttgtttggaaattaaatttattcgaatgtattttaagtaaaaaattttaaaggtttttattgaaagttatattaaattaattttttgtgtagagaatttatttgtattttttaagtatagtatgattttttgttaagttttttttttgtaaaattaaaataaatgtataaggtaacgattttattaatttttagtattttttagttatagttgatttgaaattttttaatgaattaggagtcgcggggagagggagtaaaaattaggaggatttttagatcgatttttagatttttgttttatagaaatgttaattcgtaggaattttaatcggagattttaagagttcgagaaaaaaaaaaggtagcggcggcggtagatgaattataatttttagttcggtattcgtagaagttttgtgatgttttttttttttcggtaatttatacgcgcgtatatacgcgcgggtataggtatgaatttttatttacgggatcgttttacgtttttttaggagagagataggggagaggggacgatgaaggagtcggggacggaggtaggaatttttttttgattaaatttcgaatagtaaatgtatttttcgaaaagttgttggataaatgaaggtaggacgcgtttggttcgtcggtgtcgagcgttagaagttcgcgttgtgtgtggtgcggcgaggggtggggagaaggaggtggtgggggagggttttattttttttttttttttttaaaaaggatgattgttacgaagtttttttttttggattttttttttcgttgtattttatcggcgtatttcgttttcgggttgcgtatttttttttttttttttggttttgcgcggcggcgttggttacggtcgtttttcggagttttcgtcgcgtagttcgtttcgagcgttgacggtcgtcggtagggagggttcggagtttcggtattttcgttggtagcggcggcggcggtagcgcggcggggttacggagagcggcgggcgggagcgcggcgggcgggcgggtaggcggcgcggaggggcgggcgcgggaggaagggggcgggagcggggttgtggtgtttgtttttttattttattttttgtatagttcgatcggttttttgtgcgtaacgttatacggtttatttaaaaaaagaagaaagaaagagtttttttttgagttattcgatcgtttttttcgtttcgttttttggttcgggttaaaggcgtcgcggtaggttcgggagtggcgcgtttcgtcgggggtatatggcgcgcggggtcgcggtcggggagggcgcgttcgggtcggttattcgttcgtttcgttgcgttcgcggggttcggttagtgggtggcgcgggcggtataggtttttcgcgcggtcgcggcgcggtgggtgtgcgcggggttttttgtttaggtttgcggtaggtcgcgtgcggatttggtggtcgttggggttcgcgacggggtgggggttttcggggaatcgtacgcggtcgggtcgggcggacgacggagtgcggaggggggcggttggcgggagggtgcgttatgaaaataagggttggaaaagcgtcgggaatcgtttggattttttttggtcgtgtgagtgtgtgtggagtgtgtgtgtgtgtgtgtgtgtgtgtgtgtgtttcgtttggattttttttagtcgtgtatgtgggagtgtgtgtgtcgtttggattttttttagtcgtgtatgagagtgtgtatacgcgtttatatatatatacgttgtgttatcggcgttcggtcgtcgggggaagatttaggttaatgtcgttttttatcgtttttagtagtgggattttagcgttgttttgttgtgaagataggtgattttgtacgttttaagtaatgtttagggacgtttcgagcgtggtgtttatttttaagtagttttttaggtgttcgcgtattatatacgtacgcgtattttcgttcgtgtttatttgaatatttagttcgtggtttaggttatgtagaatttagcgttttagggaaggggtttattaagggttttacgatagtttaagttaatgttttttttttgtttttaatattttttatattggtttagtgttatacgatgaggatttttatatagtaatttttaggtttatcgttttaacgttggggtgggtgggtttttaaaggtttttatttttgtttcgtagttaattttagttggtcgtatttttttaaatgaggtatatagatatatatatatatatttatattcgtagacgtgtgtacgcgtaagtagatagttttaaattaattagtatgaatagtttttagtaaaaaaggataagaggataaataagttgtacgtgtgtatttttatttttaagagtttttgataaagtattaagaaaagaaaaaggttttttagaagtatagcggtttatttaatagggttcgagtgtaaatatatagggatattggattattggggttaagaaagatgataaatgagtattataatgtgtataaatatgttatgattttttttttttttttgagatagagttttgttttgttgtattttggaggttggtgtgtagtggtgcgattttagtttattgtaatttttgttttttaggtttaagtaattttgttttagttttttgagtagttgggattatacgtgtacgttattacgttttgttaatttttgtatttttagtagagacggggtttcgttatattggttaggttggtttcgaatttttgatttcgttattcgtttgttttagttttttaaagtgttgggattatagatatgagttattgtgttttgtttgatatttttattttgttttatttttattttaaaattaaaatattttttaaaaagttagaaaagtatattaaattatgatttttttaatttttatttagttggttttttttttttttttttaagagatggtttttgttatgttgtttaggttggattcgaatttttgggttcgaaggatttttttattttagttttatgaatagttgggattatacgtattgttattttttttgggtgtttttattttatttttttatttattgtattttattagtttaataagttaattttttttatataggaatgggggtttgggtataaattttttatttaggtaagaggggatgaaaggagatttttttttttgtttttttgatggttgggatagagttttttttatgcgcgtgggaggtgttttggtttggatagatattgggtatagattgatttagaataaatgtttttatataaatttatattaattgtataatagtatggtttagaaattttgaaagcgtattttaaagttttaaaattatttaagaggaattgaaaggttttaagtttttaatatttagtatatgagtgaggaaatgataggataaatttgtaaaagaaattgtatttttgtaaagggggtagttagaaggaaacggattttttatttttagagaaagaaaagttgattgattttcgtttttttttgtttttatagagttttattttatggatttttttagattgattttttatgtggtattttggttataattagttttgagataggtttgtattgtagtttttggttaggggttatattttttttgggaatgttttagatatttttttaaatgaaagagtgaaattatttttgcgtttagattttatgtttattagattttattttaaagtataagggtaagtatttttaggaagtatgtgatattgattattcgtttttgggtaatgttgaggtgggggagggaatattagtttgaggtaggagtaattggatttgaattttagatttatgtttgagattttttaataattttataaatatatgtatagtggattttttattttttaagatgttttttatttgtaagagttaatggatgatttttttggtagttttatttggttggattttataagtagcgtggtattaggaagagaaaaaaaataagatgtagggaatggagattgtattaagagtttgaatggtttgtgtttttttttcgtttttattttttaggttattaaataaaaagtttttgattgttagttttcgttatttgttggttgttttatagcgttattttttttatttatttaagaaagtttttttatttattattaatataaatattttttaagtttatgaaatttaaaaggtatattattttaatatgaatatattaatgtttaatataggtatgtatcggttaggtgtggttgtttatgtttgtaattttagtattttgggaggttgcggtgggtgtattgtttgaggttaagagtttgagattagtttgtataatatgataaaattttatttttataaaaaatataaaaattagcggggtatggtggtgtgtgtttgtagttttatttattttgaaggttgagataggacgattatttgagtttaggaggtggaggttgtagtgagttgtgattatattattgtattgtagtttgggtgatagattgatattttgttttaaaaaaaaaaagaaaagaaaagaaaaaaaaaattatgtgtgtgtattaaatttttttagttagtaaattttttattgaaaatgtgggtagaatgagattattaattgaggatattgataattaataggttagatggaagagtaaattatggttttaatttgaaatggaaattaatttataaataaaatgagttgattagagagaataaaaataagtagtttatatagtttgtataaaagaaaaatgaggtcgagcgtagtggtttacggttgtaattttagtattttgggaggtagaggtgggtagattatttgaggttaggaatttaagattaggttgattaatatggtggaatttcgtttttattaaaaatataaaaattagttaggcgtggtggcggggatttgtagttttagttatttaggaggttgaaataggagaattgtttgaattcgggaggtagagattgtagtgagttaagat

SEQ ID NO: 239 - DNA, 6201 bp, Artificial Sequence
  chemically treated genomic DNA (Homo sapiens)
attttggtttattgtaatttttgtttttcgggtttaagtaatttttttgttttagttttttgagtagttgggattataggttttcgttattacgtttggttaatttttgtatttttagtagagacggggttttattatattggttagtttggttttgaatttttgattttaggtgatttgtttatttttgttttttaaagtgttgggattatagtcgtgagttattgcgttcggttttattttttttttatgtaaattatatggattatttgtttttattttttttagttagtttattttatttatggattaatttttattttaggttggggttatggtttatttttttatttgatttattagttattaatatttttagttaatagttttattttatttatatttttaataaaaagtttattagttgggaagatttgatatatatatatgattttttttttttttttttttttttttttttttgagatagggtattagtttgttatttaggttgtagtgtagtggtgtgattatagtttattatagtttttattttttgggtttaagtgatcgttttattttagtttttagagtagatgggattataggtatatattattatgtttcgttaatttttgtattttttgtggagatagagttttgttatgttgtgtaggttggttttaaatttttggttttaagtaatatatttatcgtagttttttaaagtgttgagattataggtatgagtaattatatttggtcgatatatatttatattaaatattagtatgtttatgttagaataatgtattttttgaattttataaatttggagaatatttatattgatgatggatgaaagaatttttttggatggatgaagagagtaacgttgtgaaataattagtaggtggcgaaaattggtaattaaaagttttttgtttggtggtttggggaatgaagacggaaagaaaatataggttatttagatttttgatataatttttattttttgtattttgttttttttttttttttggtgttacgttatttgtagaatttaattaggtaaagttgttaaaagggttatttattggtttttataagtagaaaatattttggaaagtgaaaagtttattgtgtatatgtttgtaaggttgttggaaggttttaggtatagatttaggatttaaatttagttatttttgttttaggttggtgtttttttttttattttagtattgtttaaagacgagtagttaatgttatatattttttgggaatatttgtttttatgttttaaaatggaatttaataaatatggaatttgaacgtaggaatggttttatttttttatttgaaagagtatttagaatatttttagggaaaatataatttttagttaaagattgtaatatagatttgttttaagattgattatagttaagatgttatataaggaattagtttgggaaaatttatagagtgaggttttgtgggagtaaaggaagacgaaaattagttagtttttttttttttggaagtaggggattcgtttttttttggttgttttttttgtagaagtatagttttttttgtaggtttgttttattatttttttatttatatgttgagtattaggagtttgaagttttttaattttttttaggtaattttggggttttaaaatacgtttttaagatttttaaattatattgttgtgtaattggtatgaatttatgtgagaatatttattttaggttaatttatatttagtgtttatttagattaaaatattttttacgcgtataaaagggattttgttttaattattagaagggtaagaaggaggatttttttttatttttttttgtttggataagaaatttgtatttaggtttttatttttatgtgagagaagttggtttgttgggttgatgggatataataaatgaagaaataaaataaaaatatttaagagagatggtagtgcgtatagttttagttatttatgaggttgaggtgggagaatttttcgagtttagaagttcgagtttagtttgggtaatatagtaaaagttattttttaaaaaaaaaaaaaaaaggttaattaagtaaaaattaaaaaaattataatttggtgtgtttttttggttttttaaagaatgttttgattttagagtaggaatgagataaaataaagatgttaggtagggtatagtggtttatgtttgtaattttagtattttgggaggttgaggtaggcggataacgaggttaggagttcgagattagtttggttagtatggcgaaatttcgtttttattaaaaatataaaaattagtagagcgtagtggcgtgtacgtgtaattttagttatttaggaggttgaggtagaattgtttgagtttgggaggtagaggttgtagtgagttgagatcgtattattgtatattagtttttaagatataatagagtaagattttgttttaaaaaaaaaaaaaaagttatagtatatttgtatatattgtagtatttatttgttattttttttgattttaataatttagtgtttttatatatttgtattcgagttttattaagtaagtcgttgtgtttttagaagatttttttttttttttggtgttttgttaaagatttttggagataaaaatatatacgtgtaatttgtttgtttttttgtttttttttgttaggggttatttatgttgattaatttaaaattgtttgtttgcgcgtatatacgtttgcgagtgtgaatgtgtatgtgtgtatttatgtattttatttgagaaagtgcggttaattaggattggttacgaggtaaaggtggagatttttaggagtttatttattttagcgttaggacggtgggtttgaaagttattatatggaagtttttatcgtgtagtattaaattagtgtaaaaggtgttagggatagagggaaaatattgatttaaattgtcgtaaagtttttgataaattttttttttggagcgttgagttttgtatggtttgggttacggattaggtgtttaggtggatacgggcggggatgcgcgtgcgtgtgtagtgcgcggatatttaggaagttatttgaaagtaaatattacgttcggggcgtttttagatattgtttaaaacgtgtagagttatttgtttttatagtagggtagcgttgaggttttattgttgggggcggtggggggcggtattggtttgggttttttttcggcggtcgagcgtcggtaatataacgtgtgtgtgtgtaggcgcgtgtatatatttttatatacggttagaaagggtttaggcgatatatatatttttatatatacggttagaaaaggtttaggcgagatatatatatatatatatatatatatatatattttatatatatttatacggttagaaagggtttaggcggttttcggcgtttttttagtttttgtttttatggcgtattttttcgttagtcgttttttttcgtatttcgtcgttcgttcggttcggtcgcgtgcggtttttcgggagtttttatttcgtcgcggattttagcgattattaagttcgtacgcggtttgtcgtaggtttgagtagaaggtttcgcgtatatttatcgcgtcgcggtcgcgcgggaggtttgtgtcgttcgcgttatttattggtcgggtttcgcgggcgtagcggagcgggcgggtggtcggttcggacgcgtttttttcggtcgcggtttcgcgcgttatgtgttttcggcgggacgcgttattttcgggtttgtcgcggcgtttttaattcgggttagggagcggggcggagggggcggtcgggtggtttagaggagggtttttttttttttttttttttgaatgaatcgtgtgacgttacgtataggaaatcggtcgggttgtgtagagaatgaagtaagaggataggtattatagtttcgttttcgttttttttttttcgcgttcgttttttcgcgtcgtttgttcgttcgttcgtcgcgttttcgttcgtcgtttttcgtggtttcgtcgcgttgtcgtcgtcgtcgttgttagcgaaggtgtcggggtttcgggttttttttgtcggcggtcgttagcgttcggagcgggttgcgcggcgggagtttcgggaggcggtcgtagttagcgtcgtcgcgtaggattaggaggaggagaaagggtgcgtagttcggaggcggggtgcgtcggtggggtgtagcggaagagggggtttaggggggagaatttcgtagtagttattttttttaggaaaagagggaaaaaataaaatttttttttattatttttttttttttatttttcgtcgtattatatatagcgcgggtttttagcgttcggtatcggcgggttaggcgcgttttgtttttatttatttagtagtttttcggaaaatgtatttgttgttcggagtttaattagaagaggatttttgttttcgttttcggtttttttatcgtttttttttttttgttttttttttggggaggcgtgaagcggtttcgtggatagagatttatgtttgtgttcgcgcgtgtgtgcgcgcgtgtaaattgtcgagaaggggaaaatattataggatttttgcgaatatcggattgaaaattgtaatttatttgtcgtcgtcgttgttttttttttttttcgagtttttgagattttcggttgggatttttgcggattgatatttttgtgaagtagaagtttgggaatcgatttggaaatttttttaatttttatttttttttttcgcgatttttgatttattgggaagttttaaattagttataattggagagtgttgaagattgatgggatcgttgttttatgtatttgttttggttttataaaaaggaaatttgatagaggattatgttgtatttaaaaaatataagtaagttttttgtataggaaattggtttaatgtaatttttaatggaaatttttgagattttttatttaaagtgtattcgagtaaatttaatttttaggtagtttaatatattttttttagtcgtgttatttgtagtgtgtatgttttgtttttatttagtgtgtatagggaaacgtatttgattttttatttattagtttgttttttttttaattttttagtattatagaggaagtagattgatattaataatatttattaataataacgtgttttatgaaataaagattcgaaaggaattggaataaaaattttttgtattttatgttaagggggaaatattagaattaagtgtttcgcgtgattgaagatattttttcgtttaagaatgtaaagtatatttaataaaatagttggattataattttttttttttttttgggggtcgtggggtgggagttggggcgagaggtgtcgttggttttcgttgttttttttttgggaaggatggcgtacgttgggagaatagggtacgataatcgggagatagtgatgaagtatatttattataagttgtcgtagaggggttacgagtgggatgcgggagatgtgggcgtcgcgttttcgggggtcgttttcgtatcgggtattttttttttttagttcgggtatacgttttatttagtcgtatttcgggattcggtcgttaggatttcgtcgttgtagatttcggttgttttcggcgtcgtcgcggggtttgcgtttagttcggtgttatttgtggtttatttgatttttcgttaggtcggcgacgatttttttcgtcgttatcgtcgcgatttcgtcgagatgtttagttagttgtatttgacgttttttatcgcgcggggacgttttgttacggtggtggaggagttttttagggacggggtgaattgggggaggattgtggttttttttgagttcggtggggttatgtgtgtggagagcgttaatcgggagatgtcgtttttggtggataatatcgttttgtggatgattgagtatttgaatcggtatttgtatatttggatttaggataacggaggttgggtaggtgtatttggtgatgtgagtttgggttgaggttataggttcgagatgcgggggttggagtgcgggtgggtttttggggtaatgggaggttgtggagtcggcgaaataaaattagagttgttgtttttcggcgtttttatttttttttttggat

SEQ ID NO: 240 - DNA, 6213 bp, Artificial Sequence
  chemically treated genomic DNA (Homo sapiens)
ttgggatttattatttagttatatttattatgttatgaaatatattttaaaaaaaataattaaatttattttttttattttaattgaggttttatattttgattattatttttttattttttttattttttagttttagtaattattattttattttttattgttaagaatgtaattgttttatattttatagataagtgagaatatgtgatatttgtttttttgtgtttggtttattttatttagtataatgttttttaattttaaaattttaatttttttaagtataaaataagaaggttagtttaattaattttaaaatttttttttgtggtaggttgaataatgtttttttatttttaatgtttatgttttaatttttaaaaatttttaatatattaatttatgtggtaaaagaggttttgtagatgtgatttaattaatggttttgagggagattatttagaatttttagggtgggtttaatataattttaagtgtttttattagagggttatagttagagagaagatataagaatggaagtataggttatagagaaaatatagagattatgagttaaggaatttgatggttattagaagttggaaaagataaggaaatagattgttttttagagtttttaaaaggaatgaaattttgtggatttatttttgatttttgatttttagaattgtaaaataataattttgtgtttgttttagttaatatatttgtgataatttgtaatagtagtagtaggaaattaaaatattttttaggtttatgatttgagagtttattaaataagagatggttatttttttggtttttaaattattttggaaataaagttatttttagagaggaattttaaaatattgtttgtagttatagtaattttaaaatttgagtgttgtatggtggaagtagataatttattttaggataattgttatttgttatattagtttgaggatggtggtgttaaagaggagttatttatttttaggtatattttatattaaatataaattgtataatttgtttaaattaaggaattatattaaattatattatggttattaaattttgttttgagaaagtgaaattgatttagtttttaaagagataaagagaaagtataagtaaattaaattgtagttataaaaagaaagataaaatgttgtagtatatttattgttttgtgtatttaatgaagtttttcgttttggttataaaattagttttaaaggttttttttatattttatagtatgaaaaatttaaaaagtaatttatatgtaaatatttaaattatgatagaaatttaaagtaaaaagaaaatgaattaattgaattaaaatgtgtaggatgtttaaatttatttgataatatatttatttgataatatattaatatgaatttagtattttaaaatgttatataaataaatgtttttatattaaatattaatgtagttaggattttaagttaatattatttttttttttttatatgtttttttttcgtttttattaaaaattgttaaaattatttattttttttttttttttttgtttttaaataaataaggttttttttaagatattgtaggattataaagttaaattttcgggtttaagttgttggtaaaattttagagatgttaagttatttatgtattaattatttttaaatttttttttaatttttttataaaataggagtagggagaggagaaatatttttgtttaaaaatgaggaattgaaaatttttattataaataaattatattaagtaagttaaagatagtaaaagagtaaaaatgttagtagatatttttaaaatggtaattatatattatttttggaatgattatatgaatgtggtttattattttttaagtttttatagtaaatatatatttatttgttttatttagttaaaaataaatataatatgtagttgtttttgaataatttttttttttttttttttttttttttttttttcgataaagttttattttgttatttaggttggagtgaagtggttttatttcgttgtttattataattttagtttttcgggtttaagcgatttttttgttttaatttttcgagtagttgggattataggcgtttgttattattttcggttattttttgtatttttagtagaggcgaggttttatttgttggttaggttggtttcgaattttcgattttaggtgatttttttcgttttgattttttaaagtgaagggattataaggcgtgaggtatcgcgttcggtcgtttttgaataatttcgattaaaatttatattcgatatttattttaatatatattatagatttttattgataattttttttagtaagaaagataagttttatttaggtatttgtgaattggaggttaagtagttttagtatattttatatttttttaagattttttttttattttaaacgttcgtaaattttgtatttgataaagagtatatttttatttaatataaatatgtttttttttttagatttttttagtattcgagagatttgtacgcgcgtggttttttattttttttttttggttttttaagtttttagggcgtcgttaggaggaggtttgtgattataaattttttttgaaaattttttaggaagtttttttttttttcggagaatcgaagcgttatttgattttaatttttttgtaaatttcgttttttagagtcgttcgttattttttgttttcgttgtagattttttatttatttggatcggttttcgatcgtaattattcggtgcgttgggtagcgttttcgtttttagtagcgttcgtattttttttattcgatttcgggtcgcggtcgtggttagttagttagtcgaaggttttatgttgtttttcgtcgtcggttttatgttgtttttcgtcgttcgttgtttgtttttttttttttcgtagtcgtcgagcgtacgcggttcgttttattttttggtgattagttagtttttttttttttttttttcggtgttggcggaagagtttttttcgattttgttttttaaattttttggagggatcgcggtatttttttaggtaaggggacgtcgtgagcgagtgttcggaggaggtgttattaatttcgagtatttagcgaatgtggtatttttgaagtcgttttaggttgggtttttttcgggggtattagtcggaagtagttttcgttagagttagcgttggtaaggaaggaggattgggtttttttttatttgttttttatatcgtttttcggtttttttgtttttagtcgcgttttttcgtttgttagtaaaggcgtgtttgagtgcgtttattttgttaaaaagaaattcgttttcgtttcgtttttttttttcgcgatataatttttttaattgttaaattgaatcggggtgtttggtgttatagggaaagtatggtttttttttttaattataagaaaaagtaaaattatttttttttagttgtgagagttttatcgagaatcgaaattatttgtacgattagaaagtgtttttttatttttttaatttttgatttttaggagcgcggggtttattaagttagaaattttagtttaaaggattttttttggagagtcggattgtttttttttttttttttttttttttttttgcgtgtaaaacggttgtttggggtaagggttttttagacgtgtatattgtttggtataagagtagattttgaaaagatgaggtttatttaatacggacgggggagaattttgtttgtaggtagataggaaaatggggagggagttattggaaggacggattttatttttaaagttataatttttagattagaaaaagtgtttagtgttttagaagtagagttgtatagtgatttaaagattagttttaaatattgttttgttttttttatattttttatattttttttttttattgaaaatattttgtatttttcgtaattataaagggggaagggaatatgagtgttttttgttttataggggttgttgtgagtttaaatgatgtattaatatatataagttttaagaatagtgttatatattttaagttaatatttgttagtttttgaattattcgttttgaggattggtttgtaattttgttttgaggtatagaaagaaaatgttttggagtaggacgcggtggtttatatttgtaattttagtattttgggaagtcgaggcgggtagattatttgaggttaggagttcgaggttagtttggttaaaatggtgatatttcgtttttattaaaaatataaaaattagttggttatggtggcgtacgtgtgtaattttagttatttaggaggttgaggtaggagaatcgtttgaattcgggaggtagaggttgtagtaagtcgagatcgcgttattattttttagtttgggtgatagaatgagatttcgatttaaaaaaaaaaaaaaaaatgttttggatagaattattattattatataaaaggaaagttcggatgcggtggtttacgtttataattttagtattttgggaggtcgagataggcggattatttgaggttaggagttcgagataagtttgattaatatggcgaaattttgtttttattaaaaaatataaaattagcggggtttggtggcgtatgtttgtaattttagttattcggaggttgatgtaggagaatcgtttgaatttaggagaaggcggaggttgtagtgagtcgagatcgcgttattgtattttagtttgggagataagagcgaaatttggttttaagaaaaaaagaaagaaagaaagaaagaaagattaagaagaatttattttttgaaaagattatgggtattttttattatttttatttataaagaaaagttaaatagtattaaagagtataataagcgtaaggaggtaaaagttttaattttttttgtgattattattttttaagtttattaaaaatatgtattacgttttaaaaaatggattgtttagattttgttgatgttttaagtatatgtttaatttgtttattggataatttagttttgtttaaaagttatattttaatttttggttgatttaaattttgtagatttagtatattttgtatttttagtgtttgtttgattttaaaatatgtagtttttaaaatgaagttaatgaaaataatttgggatgttaagtatgttattaaaatttataatgtattattgtattatttatatttttttcggggtattttttaattagttgtgtagtaatgatagggaaaatttaaattatcgataaataaaattattttagtttagtttaagatattttatgatggaggaggaagaaagtggttgttaggatgggagggagggaatatatttttattattaatataatggttttttttttttgtttgtttgttttgtgtgtttttttgagatggagtttcgttttgttgtttaggttggagtgaaatggtatcgtacgatttttttcggtttattgtaattttcgtttttcgggttcgagtaatttttttgttttagtttttcgagtagttgggattataggtatatgttgttatatttagttaatttttgtattattagtagagacggggttttattatgttggttaggtttgtttcgaatttttgattttaggtgatttatttattttagttttttaaagtgttgggattataggtatgagttatcgtgttcggtttatagtggtttttaatgggggtgggagagtgggaagagtaggtttttttaagagtttgttgaaataaatattttttttttaaaaaagaaagtaggtaatgattttttttaaaaaagatgtgtttatttgtatatgtatttttagataaaatttttagtgaatttagggatttttttgaaattttattatggatttttatattaagaatttttttagtttttgtgaaaaatatatatagttattggtgaagaagatgggagatgtaattatataaaaataatatttggatgtattataaataggtgtaaaagttgattgttttggaaatattaagaataagttttagatatgtatattttatattttgtagtagagttttggaaggattatggtatttttgggtggggttattttgttttagaaattgaagtttattattt

SEQ ID NO: 241 - DNA, 6213 bp, Artificial Sequence
  chemically treated genomic DNA (Homo sapiens)
ggataatggattttaatttttagagtaaaatggttttatttaaggatgttataatttttttagagttttattgtaagatatgagatatatatatttaaaatttgtttttggtatttttaaagtagttaatttttatatttgtttataatgtatttaaatgttgtttttatatggttgtattttttattttttttattaatagttatatatattttttataagagttgaaagagtttttgatgtaggaatttatggtagagttttagagaaatttttgaatttattgaaagttttatttagaaatatatgtgtaagtgaatatattttttttaaaaaaaattattatttatttttttttttgagaagaaggtatttattttaatagatttttgaaggagtttattttttttatttttttatttttattaagaattattgtaggtcgggtacgatggtttatgtttgtaattttagtattttgggaggttaaggtgggtggattatttgaggttaggagttcgagataagtttagttaatatagtgaaatttcgtttttattaataatataaaaattagttgggtatggtagtatgtgtttgtaattttagttattcgggaggttgaggtaggagaattgttcgaattcgggaggcggaggttgtagtgaatcgagagagatcgtgcggtgttattttattttagtttgggtaatagagcgaaattttattttaaaaaaatatataaaataaataaataaaaagaaagaattattgtattagtgatggaaatgtgtttttttttttttattttggtaattatttttttttttttttattataaaatattttaaattaaattaaaataattttatttatcgatagtttgaattttttttattattgttatatagttaattgagaggtatttcgaggaaaatataaatggtatagtaatgtattgtagattttaataatatatttgatattttaaattgtttttattggttttattttaaaaattatatgttttaaaattaagtagatattaaaagtataagatatattgggtttataaggtttaagttaattagggattgaaatataatttttaaatagagttggattatttagtaggtagattaagtatgtgtttaaggtattagtaaagtttgagtaatttattttttaaaacgtagtatatgtttttgataagtttaaaaagtagtagttataggaaaaattagaatttttatttttttgcgtttgttatattttttagtgttgtttaatttttttttgtaagtgagggtggtggagggtgtttataatttttttagggagtaagttttttttggttttttttttttttttttttttttttttttttgagattaagtttcgtttttgttttttaggttggagtgtaatggcgcgatttcggtttattgtaattttcgtttttttttgggtttaagcgatttttttatattagttttcgagtagttgggattataggtatgcgttattaagtttcgttaattttgtattttttagtagagatagggtttcgttatgttggttaggtttgtttcgaatttttggttttaggtgattcgtttgtttcggttttttagaatgttgggattatagacgtgagttatcgtattcggattttttttttatgtaatagtgataattttatttaaagtatttttttttttttttttgagtcggagttttattttgttatttaggttggagggtggtggcgcgatttcggtttattgtaatttttgtttttcgggtttaagcgatttttttgttttagttttttgagtagttggaattatatacgtgcgttattatggttagttaatttttgtatttttagtagagacggggtgttattattttggttaagttggtttcgaatttttgattttaggtgatttgttcgtttcggttttttaaagtgttgggattataggtgtgagttatcgcgttttgttttaaagtattttttttttatgttttaaaataagattgtaagttagtttttaaagcggataatttaagagttaataggtattagtttaggatgtgtggtattgtttttaaggtttatatgtattaatatattatttaaatttataataatttttataaagtagggggtatttatatttttttttttttttataattacgaaaaatgtaaggtatttttagtaggaaagagaaatgtgagaagtgtgaaggagataggatagtatttgaagttggtttttggattattgtgtaattttgtttttagaatattgagtattttttttggtttaggaattatgattttgagaatggagttcgtttttttaatgattttttttttatttttttatttgtttataggtagaattttttttcgttcgtattaaataaattttatttttttagagtttgtttttatattaggtaatgtatacgtttgagaaatttttgttttagatagtcgttttatacgtaggaggggaaggggaggggaaggagagagtagttcgattttttaaaaggaattttttgaattagggtttttgatttagtgaatttcgcgtttttgaaaattaagggttgagggggtagggggatattttttagtcgtataggtgatttcgattttcggtggggtttttataattaggaaagaatagttttgtttttttttatgattaaaagaagaagttatattttttttatgatattaaatatttcgatttaatttggtagttaggaaggttgtatcgcggaggaaggaaacggggcgggggcggatttttttttaatagagtgaacgtatttaaatacgtttttgttggtaggcgggggagcgcggttgggagtagggaggtcggagggcggtgtggggggtaggtggggaggagtttagttttttttttttgttaacgttggttttggcgagggttgttttcggttggtgttttcgggggagatttaatttggggcgattttaggggtgttatattcgttaagtgttcggagttaatagtatttttttcgagtattcgtttacggcgtttttttgtttggaaagatatcgcggtttttttagaggatttgagggatagggtcggagggggttttttcgttagtatcggaggaagaaagaggaggggttggttggttattagagggtggggcggatcgcgtgcgttcggcggttgcggagagggggagagtaggtagcgggcggcggggagtagtatggagtcggcggcggggagtagtatggagttttcggttgattggttggttacggtcgcggttcggggtcgggtagaggaggtgcgggcgttgttggaggcgggggcgttgtttaacgtatcgaatagttacggtcggaggtcgatttaggtgggtagagggtttgtagcgggagtaggggatggcgggcgattttggaggacgaagtttgtaggggaattggaattaggtagcgtttcgatttttcggaaaaaggggaggttttttggggagtttttagaaggggtttgtaattatagatttttttttggcgacgttttgggggtttgggaagttaaggaagaggaatgaggagttacgcgcgtatagatttttcgaatgttgagaagatttgaaggggggaatatatttgtattagatggaagtatgttttttattagatataaaatttacgaacgtttgggataaaaagggagttttaaagaaatgtaagatgtgttgggattatttagtttttaatttatagatatttggatggagtttattttttttattaggagggattattagtggaaatttgtggtgtatgttggaataaatatcgaatataaattttgatcgaaattatttagaagcggtcgggcgcggtgttttacgttttgtaatttttttattttgggagattaaggcggggggaattatttgaggtcgggagttcgagattagtttggttaataggtgaaatttcgtttttattaaaaatataaaaagtagtcgggggtggtggtaggcgtttgtaattttagttattcgggaggttgaggtaggagaatcgtttgaattcgggaggttgaggttgtagtgaatagcgagatggagttattttattttagtttgggtgatagagtgagattttgtcgaaagaaagaaagagagaaagagagagagaaaaattatttagaagtaattatatattgtgtttatttttaattgagtagggtaaataaatatatgtttgttgtaggaatttaggaaataatgagttatatttatgtgattattttagaggtaatatgtagttattattttgggaatatttgttaatatttttgtttttttattatttttagtttatttgatatagtttatttgtgataagagtttttaattttttatttttgaatagaggtgttttttttttttttatttttgttttgtgagggagttaggggaggatttaaaagtaattaatatatgggtaatttagtatttttaaaattttgttaatagtttgaattcgggagtttggttttgtagttttataatattttagaagagattttatttgtttaaaaataaaaaggaaaaagaaaagtggatagttttgataatttttaatggagacgggagaagaatatgtagaaaaggggaaatgatgttggtttagaattttaattatattggtgtttaatataggaatatttatttatataatattttaaagtattaaatttatattagtatattattaaatggatatattattaaatgggtttaagtattttatatattttaatttaattgatttattttttttttgttttggatttttattatgatttaaatatttatatatgggttattttttagattttttatattatgaaatataagaaaaatttttaaggttagttttatgattaagacgaaggattttattgaatatataaaataataaatatattgtaatattttgtttttttttttgtagttgtaatttggtttgtttatattttttttttgtttttttgaaaattgagttagttttatttttttaggataggatttaataattataatataatttagtataattttttgatttaggtaaattatgtaatttgtgtttagtatgaaatgtatttaaaaataagtaatttttttttaatattattatttttaaattaatataataaataatagttattttaaaataaattgtttatttttattatgtagtatttaaattttaaggttgttatgattgtagatagtattttaaaatttttttttggaaatggttttgtttttaagatgatttaggaattaaagaggtgattattttttgtttaatgaatttttaaattataaatttgggaagtgttttagttttttattgttgttgttataaattattataaatgtgttagttaaaataaatataaaattattattttatagttttagagattagaagttaaaaatgggtttataaggttttattttttttggaaattttaaggggtaatttgtttttttgttttttttagtttttagtgattattaaattttttggtttatggtttttgtattttttttgtggtttgtgtttttatttttgtattttttttttgattgtgattttttaataaaaatatttggggttatgttgggtttattttgaaaattttggataattttttttaagattattaattaaattatatttgtaaagttttttttgttatataagttaatgtattaaaagtttttgaggattaggatatagatattgggggtgggggggtattatttagtttattataggaaggaattttagggttaattaaattagtttttttattttatatttgaagaaattgaagttttggaattggagagtattatgttaaatgaaataagttaaatatagaaagataaatattatatgtttttatttatttgtgaaatataaaataattatatttttagtagtaaagagtagaatggtggttattagagttggggggtgggaggaatggggagatggtaattaagatataaagttttagttaagatgggaggaataagtttgattgttttttttgagatgtgttttatagtatgatgaatatagttaaatagtaaattttaa

SEQ ID NO: 242 - DNA, 6193 bp, Artificial Sequence
  chemically treated genomic DNA (Homo sapiens)
taaataaaaataatatatttagtggcggaagggaaaatatatattaatatatgtaaatttaataaatattaagatgtaaagagagaatttatagtaatagaaagggtgaatgtataagatagatgataaatagtatttttatttaaaaattaaagggatgaaagtttatgaatattatatatttgaatttattttgaggaggaaatacgattttttattaaataaatgtaaattttaaaaattagttaatgtaaatttattgtgtttaggttagaataaaaaatgtataaattttttataaagtttatgttttgataaatattttaatgtaattttttaattaagatatatttttagtgattaaatgaaaatatatatataaagtagtaagtgttttgatttttaataaaattttattttttatgtatatatgattaaaataaataaaagtagttgagtttaagagtaaaaaaaaggaatattgatataattggagttattttattataatagaatagttatagtatttttaagcgatttgtagttatattaatagatatttatttagatatattgtgaagaaaaaaataatatttttttttaaaaagtttttttttatatatatatatatgagaattttaaattaaaaagaaaatattgtatcgatagatgtgtttatagtaaatatttgtaagaaagagaattgatgtttttttgaaaatatatttaatattttttttattatttaatttttattaatatttttttttttaaatgaaaaataattttatgattttggagatataatgatgtattttaaatatgtacgaaagttatatgtatttttatagaatgaaaagtaagattgagttatttgtaaaaaagaaatgggaattgaatttgtttatcgtttatttattaaggtatataagagtattattttaatgttattatatattttttttaatattaaggtaatattgataattttttattatataaggaagacgaattttagaattatttttttggttagtaaaggttttataattgttatataaagggattttggttatatttagatatatttaaataaaatgtataattgaaaatgagataaagttttttagaatttttaaaaaatattttttttaatgttgaatttttttttaagtaaaagaaaaaagaggtttttttttgttataattaagaaatattttaaagatttatataatagtatttttcgttttatatttttattttgtttatatagagtagtaaataaggtgtattttttttgtttaagaaattagtattttaaaaatatgttatttttttttgaattttaagcgtgtttaataatgcgagaagtagattgttttttttcgtttttttaatttgttttatttaaaagtaatttatttaatattttgtcgttttttggtagtttagtttatttattcgtatttaattttttatttggattaaaataaatttttttaaattgttattgattgttaatcgcgagaggggagacgcgtaatatgtatttagttgggaatatatagttatatatatatataggtataaatatatatagttttatttatattttagatagtaatttgtttttataatagtattgtattaaaattagttgaattttttttgttaggtgcggtagggtgggggtgggggaggatgaaaaacgaagtttttcggggtatttatagtttttaatggattattttagtatgcgtgttgtaattatattagggatgtattcgagagtttttttttgtgcggtttttttatttggattattttgtgttttgaataagtgaggttcgtttttgtgtttttagaattttaagtatagagttatatacggaataataatggtacgttaattttcgcgttttaaatgggtttatttgtgggtttgataattcgtttagggaaacgagaagagacgaagcgagggcgcgagttagtgtcgtttgagacgaggaagaggatagttgtagaattaatttggattatattttttgtagaaattttgaaaagggtttttcggtatagtttaattcggagtcgtatagttaatattaaattgttgcggattcggagcggggttttttagtggtagaggttgaattagatagtttttagtaggtcgtttcgtagaaatttttttcggttaagtttgtatgtcggtcgttaatgtttttgaatgggttaatgtgtataattaatttattgagggaaaatatgaagggattcgaagtggggagggagataaaaagagatgtatttaagaggtcgtttggaatgttaagttcgtgttggtgtgatttcggaggtggttggagcgcgggatttggtatgcgtgaagaatttcggagtaattgggagggtgtaaacggttagtataaacgttttatatgtgttattcgaaggttattttgaaagattcgataattgtaatttgttatttattaggtaaaggaggcggcggcggcggcggcggcggagcgggaaaattatagttagtcgtttttttggtgaggttagaaggatatttttcgggggtttaaagcgttttttatcgttattttcgggggttttattattttaagttattttttacgttttagttattatttttggatggtttcggaaatttttttggttttttaaaaggtattttttggttacgttaagatatcggttttttttagatttttttcgttttatttttatttttaggaaattttagtgttagaaattttgagttttattgtattgtaggtgttgttattagttttgtaagtcgtggcgggttagtttcgtcgcgttgtttttcggggttaattagttttttgtttgtttaggtatttggggttcgagttttttagtaagtagtggtcgcgtatttatcgtcgttgtcgttttcgtttcgggtggatttagtgattcgtaggttcggtagtttggtcgggtagtaaatagataagtttgaaggatttcggttaatagtaagttgaattataggaagaatttttttcggagttaaatacggtaatcgacgggaaggtcgggtttttggtttaagtgtgttaagtttttttttttttttttaagaggttaggtaggcgagtaagcgttttttaagttaatggggagagggtttcgggaagtcggcggaagaggtttagaatttcgggtttcggatcgaggcgcgttcgtttgttgtatttcggttgttcgggttgggcgcgagttgcgtttgacgttataaggttcgggcgattgggggcgtagcggtcgttagtagtatatataggtgtaaagttcgattttttgagcgtcgttttttatcgtttttcgggttcggttcgggagaggtttagttagtatcgttttaggatcgcggtttcggcggtgcgggttttgttttcggggattcgatagggatagaagagttttttttgattggggatttgggttttttatgtttcgaataataggcgttattagaagggatttcgtttaggtttttaaataaaacgttcgggaaagaaaagtagggggttaaggagagaaaagagggatttagagtgattttttacgataaataaagtaaacgtatatatatagggtaagttttaaatggaaagaggggtgatcgaaagtttagggaagaggtttcggttaagcggtttttttacgtttttcgggatgggtgaagagggtaggggagttattcgaggtagtttcgtcggcggttgtaggttcggcgatcggagtgttagaaggaatttatttgattgagaatcgttgggttggacggttttcgtcgttacgagaaggtttatttagatttaaagttttgtcgtcggttttattttttggaagttttagatttcgtgttgataattatatgtttaaatggtatatttttttttcgggtacgcggaggagattttttagtcgggcgcgcgtgggggtgcgaggggggcgggcgcggcgcgcgcggtgtggcgatttttagggcgggcgatcgagttcgcgttcgcgggtttagggtcggggttcgaggagggggcgagtgtgagcgcgtgtgtgcgcgtgtgggagtgtgttcggtgtgtgcgtttggcgttttgggtcggattgtgtagttattttttcgcgtgagttttcgtttgttcgttttttttttatttttttttttttttattggttggttaataataaaaaaggaaggggggcgaaaggtttttaaaaaaagttgattgtaaagaggcggtaggttttcggttttttttcgtagtcgggttatgttttgttttttttttagtttttttgtatttttagtttaaatcgggaggggagcggggcggggggagtttttcgttttttttcggatttcgtttttttttttttttttagttttttttatatttgttcggcggttgcggtaattaaagtttcgagcgttatttttagcgtttcgcggtttttagttgtagtttatagagaaattaataagattttagaaaaaaaaaaaaaaaaggtgcggggggcggtgggaataaaataattttttacgtaattaggtcggttttgtttagtcgcgtaaatttcgtttatgttttgatttaattagttacgttttttttttttttttttaaagggaaattttattggtttagttattttttaaaattttgggttttcggagttgggaaaatatttgttagggaaagggagttttttggtgggggtaggggaagttggatttaaagggtttatcgaagttatgtattgaagtattcgttttttttttttggtagaggtttgggatagttggtttgttgagtggacggattattggagggtcgtttacggaaattttttttttttttaaataagaaagttagtatttttttcgttgttttacggtgtttatttatagataagattttttttagaaataaaagttaatgttgtttttagtaaaaagttttcgttcgtagtattttgttatttatggtttataattagaaagtattttaaaagtgtgtatagtaagtaattggtagtttttgaggattaggtagtggtaggggtataattatcgtttcgtttttcgtttttagttatgttattttttcgattatttttatatttttaaattgattaatattgagttaaattaaatttttatatttataaaggtatattttttgatttttagattttatgttttttttttatttttggagtttatttttattaagtagattttagtttaaagttattgatttgattttaaagggttagaaattgtttttagtttgaaagaatttaaggaggttatattagaatataattaattttaaatgattttgtttattttatagtagatttagttttaggttttttttttgtttttattttgtatatttatggtttttaatttggaggttattgttagttacgaaagtttttgattttttttgaatttaaaatattttgggattgggttattttaatgtatatattttttgttttttatagttttgaaatcgtattttggtaagggttagaatttgttgggggtagttattggtttgttatttgtataggtattttatgtatgaattattttttttttttggtttttttagaagtagtaaatatataaataaaaagtattaggggagtttaaaaattaaattattttgttttttatttgagattttgatttttattttttatttttttatttatagttttattttttaagaatttttatggagttgagaatagataggaggtatagatgtttgaagtttgaagtttttttttttttagatttatagtaaataataggttttatgaagacgtttaataagttgagcgtgcggttttattagaagtagtttagggtagagaggaattaagtttagagtagatgacggagatttgattagaatggtattgattgtagtaaaattgtgtatattgttttttgggattatttttgtttttttttttttttttttttttaattattttttttttttgttttttttttttttatttaatttttttttattttttttgttttaaatttttttgaaatttttaggtattttttttttataaaagttattttttttta

SEQ ID NO: 243 - DNA, 6193 bp, Artificial Sequence
  chemically treated genomic DNA (Homo sapiens)
tgaaaagaagtagtttttatggaagagaggtgtttgagaattttaaaaggatttaagataaggggaatgagaagagattgaatgaaagaagagaaaatagagagaaagagtaattaaaaaaaagaaaagaaaagaaaataaagataattttaaagagtagtgtgtatagttttgttgtaattagtattattttggttaagttttcgttatttgttttaggtttagtttttttttgttttaggttgtttttggtaaaatcgtacgtttagtttgttgggcgtttttatggagtttgttatttgttgtgggtttaagaaagggaaagttttaggttttaggtatttgtattttttatttgtttttagttttatggaaatttttaagggatggggttatagataagagagtgggaaatggagattaaggttttaaatgaaaggtagggtggtttgatttttaagtttttttgatattttttatttatatatttgttgtttttagaaaaattaaaaaaggaaagtgatttatatatagaatgtttgtataaatagtaaattaataattatttttagtagattttggtttttgttagggtgcggttttagagttgtaaaaggtaagggatatgtatattgaaatgatttagttttagaatattttagatttagaaaaggttagagattttcgtaattagtaatgatttttagattagggattatgaatgtgtagagtgaggataaggaaggggtttaaagttgggtttattgtagaataaatagaattatttaaggttaattatgttttgatgtggtttttttaaatttttttaggttggggataatttttagttttttaagattaaattagtggttttggattagaatttgtttaataagaatgaattttaaaggtgaaaaaaaaatataaaatttaaaaattaaaggatatgtttttataaatgtgaaagtttagtttggtttaatgttggttagtttagaaatgtgggagtaatcggagagatggtataattgggggcgggaggcggggcggtgattatatttttattattatttaatttttaggggttattagttatttgttgtatatatttttaaagtattttttaattgtggattatgagtggtagagtattgcgggcggaggttttttgttgaaagtaatattgatttttatttttagggaaagttttgtttgtagatgagtatcgtggggtaacggagaaaatgttgatttttttgtttaaaaaaaaaaaaaattttcgtaagcggttttttaatggttcgtttatttagtaggttagttgttttaggtttttgttagggagggaagacgagtgttttagtgtatggtttcggtgagttttttaaatttagttttttttgtttttattaagaggttttttttttttgataggtgtttttttaatttcggaggtttaggattttggggagtggttgagttaataagatttttttttggaagggggggggaagggcgtggttagttgggttagagtatgggcggggtttgcgcggttgagtagagtcggtttggttgcgtggagggttgttttatttttatcgtttttcgtattttttttttttttttttttggagttttattaatttttttgtgggttgtagttggagatcgcggagcgttggaaatgacgttcggagttttaattatcgtagtcgtcggataagtgtgaggaaagttgagaggaaaaagaaggacgggattcggggagaagcgagaagtttttttcgtttcgtttttttttcgatttggattggaggtgtaaggaaattgaagaaggagtagaatatagttcggttgcggggagaggtcggaaatttatcgtttttttgtaattaattttttttggaaatttttcgttttttttttttttttattgttgattaattagtgagagagagagaaagtgaggagggagcgagtaagcgaaggtttacgcggggaaatagttgtatagttcggtttagagcgttaagcgtatatatcgagtatatttttatacgcgtatatacgcgtttatattcgtttttttttcgggtttcggttttggattcgcgggcgcggattcggtcgttcgttttgggagtcgttatatcgcgcgcgtcgcgttcgtttttttcgtatttttacgcgcgttcggttgggggatttttttcgcgtgttcgaaagggggatatgttatttggatatgtaattgttagtacgggatttgagatttttaaaaaatgaagtcggcgataggattttgggtttgggtgagttttttcgtggcggcggggatcgtttagtttagcgatttttagttaggtgggttttttttggtatttcggtcgtcgaatttgtagtcgtcggcggggttgtttcgagtggtttttttgttttttttatttatttcgggaggcgtggagggatcgtttgatcggggttttttttttgggttttcggttatttttttttttatttgaaatttattttgtatgtgtgcgtttgttttatttatcgtgaaaaattattttgagttttttttttttttttttaattttttgtttttttttttcgagcgttttgtttgggagtttaagcgggattttttttggtggcgtttgttgttcgggatatgggagatttaaatttttagttagaggagatttttttgtttttgtcgggttttcgagggtagaattcgtatcgtcggggtcgcggttttggggcggtgttggttgggtttttttcgagtcgagttcgaagggcggtggagagcggcgtttagaaaatcgggttttgtatttgtgtgtgttgttggcgatcgttgcgtttttagtcgttcgagttttgtggcgttagacgtaattcgcgtttagttcgggtagtcggagtgtagtaggcgggcgcgtttcggttcggggttcggagttttgggtttttttcgtcggtttttcggagttttttttttattgatttgaggggcgtttattcgtttgtttgattttttaaaaaaaaaaaaaaaggtttggtatatttgagttagaagttcggttttttcgtcggttgtcgtgtttggtttcgggaagagttttttttgtagtttaatttgttattggtcggagttttttaaatttgtttgtttattgttcggttaggttgtcgagtttgcgggttattggatttattcgaggcgaaagcggtagcggcgatgggtgcgcggttattgtttgttggagagttcgagttttaggtatttgggtaggtaaagggttaattgatttcgagaggtagcgcggcggggttggttcgttacggtttgtaggattaatgatagtatttgtagtgtaatggagtttaaagtttttgatattagagttttttggggatgaaagtgggacgggagaggtttgaggaggatcggtgttttgacgtggttaaggggtgttttttggagagttagagagattttcgaaattatttagggatggtgattggagcgtgggaagtagtttgaggtgataaagttttcgggagtggcgatagggagcgttttaggttttcggagggtgtttttttgattttattaagaaaacggttagttgtagttttttcgtttcgtcgtcgtcgtcgtcgtcgttttttttgtttagtaaataataagttataattatcgagttttttaaaatgattttcgaatggtatatgtgaggcgtttgtgttggtcgtttgtatttttttaattatttcgaaattttttacgtatattaggtttcgcgttttagttattttcggaattatattaatacggatttgatattttaagcggttttttagatatatttttttttatttttttttttatttcgagtttttttatatttttttttaatgggttgattatgtatattgatttatttaaaggtattggcgatcgatatgtaggtttagtcgagaggaatttttacgaggcgatttattgggggttgtttggtttagtttttgttattgggggatttcgtttcgagttcgtagtaatttggtattaattgtgcggtttcgagttgagttatgtcgaaaagttttttttagaatttttgtaaggaatgtaatttaaattagttttgtagttgttttttttttcgttttaggcgatattagttcgcgttttcgtttcgttttttttcgtttttttgggcgaattgttagatttataagtgagtttatttagagcgcgaggattagcgtgttattgttgtttcgtgtgtgattttgtatttgaaattttgggggtataaaggcgagttttatttgtttaaaatataaagtgatttagatgaaagggtcgtataaagaaaagttttcgggtgtatttttggtataattgtaatacgtatattaaggtgatttattggaaattgtaaatgtttcgggggatttcgttttttatttttttttatttttattttgtcgtatttggtagggaaagtttagttggttttaatgtagtgttattataaaaataagttattgtttggggtatgagtgaggttgtgtgtgtttgtgtttatgtatgtgtgtggttgtgtgtttttaattaaatatatattgcgcgttttttttttcgcggttagtagttagtagtagtttggaggagtttgttttggtttaaatgagaaattaagtgcggataagtaaattaagttgttagagggcgataagatgttgagtgaattgtttttagatgaaataaattaaggaaacgagggaagataatttgtttttcgtattattagatacgtttggagtttaggggaaagtggtatatttttgaaatgttaattttttaagtagaaggaatgtattttatttattgttttatgtgaatagaataaaaatatagggcgggggatgttgttgtatagatttttaagatattttttaattgtaatagaagagaatttttttttttttttgtttggaaaaaaatttagtattagagaggatgttttttagaaattttaaaggattttgttttatttttaattatgtattttatttagatatatttagatatagttaaagtttttttatatggtaattataaagtttttgttaattaaaggaatggttttaaaattcgttttttttgtataatggaaaattattaatattgttttggtattgaagaaaatgtatagtagtattgaggtggtatttttatatattttagtagataaacgatgaataagtttagtttttattttttttttgtaggtaatttagttttgttttttattttataaaagtatatatagttttcgtatatatttaagatatattattatatttttaaaattatggggttattttttatttgagaagaaaaatgttaataaaagttaagtggtgaaaaaggtgttaaatatatttttaagaaagtattaatttttttttttataagtgtttattgtaagtatatttatcggtataatgttttttttttaatttgaaatttttatatatatatatataaaagggggttttttagaagaaggtgttatttttttttttataatatgtttaaataaatatttgttagtataattgtaaatcgtttggaaatattataattgttttgttgtgatgaaatgattttagttatattagtattttttttttttgtttttaaatttaattgtttttatttattttaattatgtatgtatagaaagtgaaattttgttgaaaattaaggtatttattgttttatatatatatttttatttagttattggaaatgtgttttaattaagaaattatattagaatatttattagagtatgaattttgtggaagatttatgtattttttattttaatttgaatatagtaagtttgtattggttgatttttagagtttgtatttatttgatggaaaatcgtattttttttttaaagtggatttaaatatgtagtatttatgagtttttatttttttggtttttaaatagaagtattatttattatttgttttatgtatttattttttttgttattatagattttttttttatattttagtatttattgagtttatatgtgttaatatatattttttttttcgttattaagtatattgtttttgtttg

SEQ ID NO: 244 - DNA, 6207 bp, Artificial Sequence
  chemically treated genomic DNA (Homo sapiens)
gtttgtttagtttttttaaagatttaaagaatattatttatttgttttttaagtatttaaaaagtataatcgtttatatttattttggttggatgaggatatgtatttatttatttatttaagagatatttattgttagatttggtggtttacgtttgtaatttcggtattttgggaggtagaggtgggaggattatttgaggttaggagtttaaggttagtttgggtaatatagcgagattttatttttataaaaaataaaaaattagttgggtatggtggtatgtgtttgtggttttagttatttgggaggttgaggtaggggtattgagtttaggagtttaaggttgtagtgagttataattatattattgtattttagtttgggtaatagagtgagattttgttttaaaaaaaagaaagaaaaagaaaaagaaaaggggtatttattgaatatttattatgttttaggtattgtgttagattttaagtgaatattagtatatgaataagataaaggcgaaaagttattaaataagtttaagttgatttcggtatatgtatttttttgatttttggtttcgtgttttgattataattttttattattagattagatttttttaaataaataattatttttgtatgttggggatgggttgtgtgcggtagtatttacgtaggcggtatagatagtagttttttatttaatgttgtaataatattaggttaaataatgtgtattgattttaaaagtgtggggttaggttttttttaagtgttatagggagagtgtaaagtaggaaaagtttatcggatgaggaaatattgtagagggaaagtgaatttttttttaatttgggttaaaatttagatgtggaattttatttttttttttatttttggatttttagataggaggaatttagtatatagataattatgaattatatatattttggttttatatgtttagatttgtttagagtatgaaatttttgttttgttggaaggtagcgtcgtgtttacggaggtatataagtatttgttttaaagttattttgatttgtagatttgtaaatggtaaaaataattttatatgtttgttttgatttgtttttatttttaggttattttgtgtgagttttattttttagaatgtgattttgtagttttgaaatggatattatgagtagattgagatgtgagaatatgttagaatgattataggttcggatgttagtggggtaggagagggagtttgagattgtattggtttatattgtggtttttggttgagtatttggtttgtttggatgatgttttggttttatttaatttttattattttattatttagaggatagaggatttgagttttatttttgtattgtagttattttttttgggatttgtttttaagtttttttttgtgttgtttggtattttttttttattttttttaaattatttattgttattttgtaagttcgattgatttgttggtttttttatgagattggaatttttttgagggtcgggataggtttattttttttattatagtgagtattagtttttagtttagttaatagttttgttaaataaataattgaataaaattatttgttaaataatggtttgttttttttagaggatggatttagtttgttttttttagaggatggatttagtaagtttttaattttggttataatggtgttagaaggaaagagttaagttatttggaggaaataggtttatttaaagatttttttttttttttttttttttaattggtaaaggtaggataagtgtatttgagataaattttggatataaaattttgatatattttttaggtattggtcgagatgttttggatttgaaagggaagtaaattaaattattttaggtttttttttttttttttttggagatagaattttgttttgttgtttaggttggagtgcggtggtacgatttcggtttataggaatttttgtttttcgggtttaagtaatttttttgttttagttttttgagtagttgggattataggcgtgcgttattatattcggttgttttgtatttttagtagggatagagttttattatgatggttaagttggtttcgaatttttggttttaagtgatttattcgtttcgggtttttaaagtgtaggaattataggagtgagttatcgtatttagttaggttttttgttaagtggtttgagatttagttgtgaatggtagttatggttagatttaggaatttaaagtttgatttattttgtttgaagttaatattaataataagagagatgtatttggttttataatttttttttttttcgtttttttttttttttttgtaattaaggatagaattagaagtatcgaaggtcgtagaattgttttaggatttagagtagttttaaggaatttgtgtttacgtattatgtgtgttttttcgtttttttttttttttatgagtgagaaaaaaaagcgtttaaatttttattaatataaattaatgatatataatgatgaaattttgtttttatttttgtttgtgatagggaatgtaaaaatagtaagtggtttagttttacgaattttcgttttttgtttttttcgtttttgtcgggttggatttttaagaatggaggttagcgtatagtttcgcgcgggtcgtttagttttcggattcggcggatgatgttaggcgacgggagcggtcgcggtcgggtcggggaggtcgcggtttaggggagttgggagggagggtggtttcgttaggtcgacggcgcgttcggtcgcgcggcgttgtttggagacggttttggcggcgttgtgttgttgtaaatagtcgtttttttgttattatttatagtaggattttttggttttcgggcgcggcggttggaggtaggtttgcggttcggtttttcgcgcgtttcgaattattcgttcgtcggttttattttgtttcgtttttttttaggtgtttatcgcgggtttcgattttcgggttcgaagagtggagaagggaagatcggggttgtgcggggatatgcgttttcgcgttttggaggtggttagcgcgttggggttgagtttcggtagcgtgatttcggttgttttacgtagtagggtaggagattggggggcgtggtatattttggagtattttgtttttttaaagtttcgtgttttaggacgtggagtcgtttttggggttttagtagtcgaggtatttcgtttaggcgtagttggatattgtttttttagttttcgttttttattttttaagttcgcgttggaaaattattcgttgcgggttttcgtaagtatagttttttggcgggatcgaattagtttttagcgtagatttgagtttttcgtaggaagtatatttcgttttgttatttcgaattgattattttgtttatataattatatttcgtattttttatttttggggtttagtttagaatcgggtagatattttttttaaatgttttcgtacgtaggttttgtatagtgtttatttgttggtgttttagggatttgatagtttttttaatatttttatatatggtcgagaaaaataaataaataaatgcgttgttttttttaaaaaaataaataaataaagtatttagtatcgtaaagtaggttatcgtatttttttattttggattttttattttttgtttttaaacgtaggaatagtgttagtattgttcgagttcgagggttggaggttaggggatgaaggtttgtttttacgttttgtattgaattagggttagaattggggatgggggtaggggcgtattttttcgggagtcgaggtttaagttttcggggttttgtattcgatgtcgttttttttatttttgagttttagaattgtttttagttttcgtataagggtaaaaaggcgttttttgttttatttttttcgatttcgggaataagggttcgtattgaattaggtgcgaatgtttttttttattttgcgtcgttttcgtttttttttttttagtcgcggttttcgttttttttcgtattgtattttcggtgttggttgtagttcgcgagtagttttcgttaatttttttttttttatataggatgtttatattaggatatttgcgttagtaggtttttacggtttttttttgtagttttggggggagttattttcgaaattttttattttggggggtttacgagatttttgagataggaattgcgaaatgtttacgagattaggatacgcgttaaggcgggggtagggagttgcgagcgttggggacgtagtcgggcggtcgtagaagcgtttaggttcgcgcgttatttttttggcgttatcgtggttgagttcgtgacgtttatatttatttataaaacgtttgttataaaagtagtggttgcggcgtttcgtattttaatcgtatttgtagcgagtatttgagaagttaagattgagtcggcggtcgcggcgtagcgaacgagtagtgatcgtgtttttatttagttttgttttatagcgtttatttgttttcgtttttcggtttttcgttcggttttgtttaatcgttacgatgatgttttcgggttttaacgtagattacgaggcgttattttttcgttgtagtagcgcgttttcggtcggggatagttttttttattattatttattcgtagattttttttttagtatgggttcgtttgttaacgcgtaggtaaggttggtttttcgtcgtcgcggggtcgggggtttggggtcgcggaggaggagatatcgggcgggacgttttagtagatgagtagggggtttttttgtgtttggagggaggttgtcgtggtcggagcggtgtcggttcgggggttcgggatttgttttgagcgtacgtacgtttgttatagtaagaattggtttttttttcgggaggtaggttcgttttgagtaatttttggtttgtattttaggacggatttttgatattagttggagtagacgtgttttaagtataaattcgttaattagagtttggttttttcggggaggtggtagaaagcggtaattttttttttttcggtagtttggagtacggaggagggatgagggaggagggtgtagcgggcgggtgtgtaaggtagttttattgataaaaagcgagtttattttggagatttcggagcggcgtttgcgttagcgtagacgttagggatatttataataaatttttttttaagtaagtgatgttgaagggataacgggaacgtagcggtaggatggaagagataggtattgcgttgcggaatgtttgggaggaaaagggggagattttttatttaggatgagggatatttaagatgaaatgttcgtggtaggatcgtttttttttattgttgtatgcggtattgggaattcgttttatttgtgttcggaatttgttcgtttacgtcggttttttttttttgttttgttttaggatttttgtacggatttggtcgtttttagtgttaattttatttttacggttattgttatttcgattagttcggatttgtagtggttggtgtagttcgttttcgtttttttcgtggttttatcgtagattagagttttttattttttcggagttttcgtttttttcgttggggtttattttagggttggcgttgtgaagattatgataggaggtcgagcgtagagtattggtaggaggggtaaggtggaataggtgaggaattttagcgtattttttttgggaatgtgggggttgggtgggaagtagtttcggagatgtaggagtttagtatagaggatgaagttattgatggggttggttgtatattcgtaattgggagttttggttttaagtttattttattttaatttagattttgagttttattttaagaagtatttttatagttttttttttaagttttttatcgtatgtttttagattgggtttttttttgtttttttgttgaggattttattttaaatgtaagttatatttagtttgtaattgtaggttagaaatggttttatagtggggtgttaggaagtagggaagttgtaggagttagttttattggggtgggtgaatggaggtgatggtagatatttttattgaatgtcggtttttttttgtgattattttagttatttttaga

SEQ ID NO: 245 - DNA, 6207 bp, Artificial Sequence
  chemically treated genomic DNA (Homo sapiens)
tttggagataattagaataattataaaaaaagatcgatatttagtaaaagtgtttgttattatttttatttatttattttagtagaattggtttttgtagtttttttgttttttggtattttattgtgaaattatttttgatttgtagttgtagattaggtgtgatttgtatttaaaataagatttttagtaagagaataaagaagagtttagtttgaaagtatgcggtaagaaatttagggaagaaattatgagagtattttttagggtgagatttagagtttgagttgggatggaatgggtttggagttagggtttttagttacggatgtgtagttagttttattagtggttttattttttgtattgggtttttgtattttcggggttgttttttatttagtttttatatttttaggaagagtacgttagagttttttatttgttttattttgttttttttgttaatgttttgcgttcggttttttgttatggtttttataacgttagttttggagtaagttttagcggagggggcggggatttcgaaagggtgaggggttttggtttgcgatggggttacggaggagacgagggcgggttgtattagttattgtaggttcggattggtcgagatggtagtgatcgtgggaatgaagttggtattggagacggttaggttcgtgtagaagttttagaataaaatagaaggggaaagtcgacgtgagcgagtaggtttcggatataggtggggcgagtttttagtgtcgtatgtagtagtgaagagaaacgattttgttacggatattttattttaaatgttttttattttggatgaaaggttttttttttttttttttaggtatttcgtagcgtagtgtttgttttttttattttgtcgttgcgttttcgttatttttttagtattatttgtttgaaagggggtttgttataaatatttttgacgtttgcgttgacgtaggcgtcgtttcggagtttttagaatgaattcgttttttattaatgaaattgttttatatattcgttcgttgtattttttttttttatttttttttcgtgttttaggttgtcgggggaggggggattgtcgttttttgttattttttcggagaagttaggttttagttagcgagtttgtgtttgggatacgtttgttttagttaatgttagagattcgttttggagtgtagattagaggttgtttagaacgaatttgtttttcgaagggggaattaatttttattatggtaagcgtgcgtgcgtttagagtaagtttcgagttttcgagtcggtatcgtttcggttacggtagtttttttttaggtataagggagttttttatttatttattggagcgtttcgttcggtgttttttttttcgcgattttaagttttcggtttcgcggcgacgggaagttagttttatttgcgcgttgataggcgagtttatgttggagaaggagtttgcgggtgagtggtagtaagagaggttattttcggtcggggacgcgttgttgtagcgggaggatgacgtttcgtagtttgcgttgaagttcgagaatattatcgtggcggttaggtaaagtcgggcgaggggtcgaggggcggagataggtgggcgttgtggagtagagttgggtaggagtacggttattgttcgttcgttgcgtcgcggtcgtcggtttagttttggttttttagatgttcgttgtagatgcggttggagtacgaggcgtcgtagttattgtttttataataagcgttttatgaatgagtgtaaacgttacgggtttaattacggtggcgttagaggggtggcgcgcgggtttgggcgtttttgcggtcgttcggttgcgtttttagcgttcgtagttttttgttttcgttttggcgcgtgttttaatttcgtgagtatttcgtagtttttgttttagaggtttcgtgggttttttaagatgaggggtttcggggatggttttttttagggttatagggaaaggtcgtggaaatttgttgacgtagatgttttaatatggatattttgtgtaaggggggagggattgacgggaattgttcgcgggttgtagttaatatcgagggtgtagtgcggggggaggcgggggtcgcggttgggggaggggaggcgggaacggcgtagaatgagagagaatattcgtatttggtttaatgcggatttttgttttcgaggtcgggggggatggggtagagagcgtttttttatttttgtacggaaattgaagatagttttgaggtttagagataggagaaacggtatcgagtataggatttcgaggatttaagtttcggttttcgaaggaatgcgtttttatttttatttttaattttagttttaatttagtgtaaagcgtggaagtagatttttattttttaatttttagttttcgggttcgagtaatattagtattgtttttgcgtttggaagtagaaagtggaggatttaaaataagagaatacgataatttattttacgatattgggtattttatttatttatttttttaaagaagatagcgtatttatttatttatttttttcggttatgtgtgggaatattaaggaaattgttaaatttttgagatattagtagataaatattgtgtaaaatttacgtgcgaagatatttgaagggggtgtttgttcggttttgagttgggttttaggggtagggagtgcgaggtgtggttatgtgggtagggtggttagttcgggatgataaggcggggtgtgttttttgcggggaatttaaatttgcgttgagggttggttcggtttcgttaggaagttgtgtttacgggagttcgtagcgggtgattttttagcgcggatttggagggtggaggacgggggttggaaggatagtgtttagttgcgtttgggcggaatatttcgattgttgggattttaggagcggttttacgttttggaatacggggttttggggaggtaaggtgttttagagtgtgttacgttttttaattttttgttttgttgcgtaggatagtcggggttacgttgtcggggtttagttttagcgcgttggttatttttagggcgcgaagacgtatgttttcgtatagtttcggtttttttttttttatttttcgggttcgggggtcggggttcgcggtgggtatttggagaggggcgaggtaggatgaggtcggcgggcggatagttcggggcgcgcggggagtcggatcgtagatttgtttttagtcgtcgcgttcgggagttaggagattttgttatagatagtaatagggaagcggttgtttatagtaatatagcgtcgttagggtcgtttttaggtaacgtcgcgcggtcgggcgcgtcgtcggtttggcgaggttatttttttttttagtttttttgggtcgcggttttttcggttcggtcgcggtcgttttcgtcgtttgatattattcgtcgggttcgggggttgagcggttcgcgcgaggttgtgcgttaatttttatttttagagatttaattcggtaggagcggggagggtaggaggcggggattcgtggaattgggttatttgttatttttgtattttttgttataggtagaggtgaaaatagaattttattattgtatgttattggtttatgttggtgggaatttaggcgttttttttttttatttataaaaagggagggaaacggaaaaatatatataatacgtaaatatagattttttggagttgttttgaattttaaagtaattttgcggttttcggtatttttaattttatttttgattatagaaagaaagagggggacgggagggaaaggggttatgaagttaaatatattttttttattattaatattagttttagataaaataggttaagttttgaatttttgagtttggttatgattgttatttataattagattttaggttatttaataggaaatttgattgggtgcggtggtttatttttgtaatttttgtattttgggagttcgaggcgggtggattatttgaggttaggagttcgagattagtttggttattatggtgaaattttgtttttgttaaaaatataaaatagtcgggtgtggtggcgtacgtttgtagttttagttatttaggaggttgaggtaggagaattgtttgaattcgggaggtagaggtttttgtgagtcgagatcgtgttatcgtattttagtttgggtaatagagtaagattttgtttttaaaagaaaagaaaagaaaatttagaatgatttgatttattttttttttaggtttaaagtatttcggttaatatttaaaagatgtgttaagattttatatttaggatttattttaaatatatttattttgtttttgttaattaaaaaaaaaaaaaagaagaagggtttttgagtgagtttattttttttagatagtttaattttttttttttggtattattatgattagagttggagatttattaaatttattttttggaaaggataaattaagtttattttttggaaaggataaattattatttaataaataattttgtttaattatttatttaataaaattattgattgggttggaggttggtgtttattgtaatgaagagggtaggtttgtttcgatttttagagagattttagttttataggaagattaataagttaatcgagtttatagggtagtagtaagtggtttgaaagaggtaagaaaggggtgttaggtaatatagaagaaggtttggaaataggttttagaggaggtgattgtaatatagagatggggtttagattttttgttttttggataatggaatgataaagattgagtaaggttagagtattatttaggtaaattaagtgtttaattagaagttatagtataggttaatataattttagatttttttttttgttttattaatattcgaatttgtgattattttaatatatttttatattttaatttgtttatggtatttattttaggattgtaaaattatattttaaaaagtggagtttatataaggtagtttaaaaatgaagataaattagaataaatatgtgaaattatttttgttatttgtagatttgtaggttagggtgattttgagataggtgtttgtgtgttttcgtgagtacggcgttgttttttaatagggtagggattttatgttttggataagtttgagtatataaaattaaaatgtgtgtagtttatgattatttatgtgttgagttttttttatttggggatttaaaagtgaaaaggagggtagaattttatatttgaattttaatttaaattgaaaaaaaatttattttttttttatagtgtttttttattcgatagattttttttattttgtattttttttgtggtatttgaaggagatttgattttatatttttgaagttagtgtatattgtttagtttggtgttattgtaatattaagtgaaaggttgttgtttgtatcgtttacgtaaatgttgtcgtatatagtttatttttagtatgtagaagtagttgtttatttggggaagtttggtttagtggtgaagggttgtggttaaagtacgggattagaagttaggaagatgtatatatcgaaattaatttagatttgtttggtaatttttcgtttttgttttgtttatgtgttgatatttatttaggatttagtatagtgtttgaaatatagtaggtgtttaataaatatttttttttttttttttttttttttttttttttgagatagggttttattttgttatttaggttggagtgtagtggtgtgattatagtttattgtagttttgaatttttaggtttaatgtttttattttagttttttaagtagttaggattataggtatatattattatgtttagttaattttttattttttgtagagatggggtttcgttatgttgtttaggttagttttaagtttttggttttaagtgatttttttatttttgttttttaaagtgtcgagattataggcgtgagttattaggtttggtaataaatattttttgaatggatgaatgaatgtatgtttttatttagttaaggtgaatgtagacggttgtgttttttgggtatttagaaagtaaatagataatgttttttaaatttttggaaaggttgaataggt

SEQ ID NO: 246 - DNA, 6147 bp, Artificial Sequence
  chemically treated genomic DNA (Homo sapiens)
aggttgaggtaggagaattatttgaattaggaagtagagattgtagtgagttgagatggtgttagtgtattttagtttgggtagtagagtgatagtttgtttaaaaaaaaaaaaaggtagtaaagtgataggaggatagattagaagggttattttttagatagtgtaaggaagaaagaagaagaagaagaggaggaggaggaggaagaggaagaagacggagaagagggtattttagaagaaataatggagatatattttttaaaattgaagaaagatgattaattttagatcgaagggttaagaggttaaattagagagatagtttggtaagttaggaagagtattaaagttagataattagagtgaaattaaagaaaatttaaggtgataaaaatttaaaaagtttttttgtgattttagtttattggtgaaaatttaaaaaaaaaaaaaaaaaaaaaaggatagtttgggtaatatggtgaaattttatttttataaaaaatataaaaattagttgggtgtggtggtatatgtttgtagttttagttattcgagaggttaagtaaggtaggaggattatttggggttaagagttttagattagttgcggtaatatatatgttgtgggaagttaggtatttcgaacggagggattggttgaagttatggtagaagaatataaattgtgaagattttatggatatttattatttttttaattaatatttttgtgattttttatgtttgtttttaattttttaattttgttattttcgtaaattgaggatgtatgtcgttttaggattttgtgatgattgcgttaattgtataaattgtttgtagaggataattgttgtgtgtttgagtaatgtgaaatttgggtattttaagaataggataatagtaatttttagggaataagggagataattttaaagtttggttgtttgtgggttgggtaggatagagttatattttttttattatcgtaaataggtaagagaaatatcgttgaattttttttttagtaaggaatattaataattaatagttttgagaaaagaatgtatttttagggtcgggttattgaaatggtttttttgagagtgtttgtttttatttagaagtagaaagggatgaaatacgttttagttttttgtagtatttttagatttgataggattaggaaattttagtttggtaaattttagttagatcggttttttgtttttgaattttgatagtgcgtgtatagtgggatttggaagtttattagtgattttagtttcgtcgtgattttttgttttgtgattttttgtcgtttttgaagtatgtgatttttgtgatttatattttgttcgtgtatttttttttttttgaaaattgttaataaaaattcgttggttttacggtttagggggtattacggaatttgcggatatgtgatgttttttttggatattcggttttaaaatgttttttttttgtattttttttttttattttttaggttagtcgatatttagggaaaataggaaaggatttacgtgaaatattgggggttgaatttttttcgataataagttttttaaaaaagatttttaaatgaaatttttttgttttttaatttttatttttgttttgggggtatatgtgaaggtttgttatataagtaaattcgtgttttcggtgtttgttgtatagaatattttattatttaggtattatgtcgagtatttaatagtttttttttttgtttttttttttttttttattttgtattttggagttaattatagtgtttgttgtttttttgtttgtgttataagtttttattatttagtttttatttataagtgagaatatttagtatttggatttttgtttttgtattagtttgttaaggataatagtttttagttttatttatgtttttataaaagatatgatttagttttttttaatggttgtattaaatgaagttttaaagatataatataaatattaattttttttttattataaaaattttttgttgaatttgattatatttaaattaacgagttttgttttatgaaagattttttggataaatttgatagttgatggaataggagaagttgtttgttatgtttaaagttaataagagattaatatttagaataaatggagatttgtaaattaatagaaagtaggtagtaaagttaaagaaaatagtttaaggtatagttattaaaaggaacgtgattatgttttttgtagggatatgggtggagttggaagtcgttagttttagtaaatttatataggaatagaaaattagcgagatcgtatggttttatttataagtgggagttgaataatgagaatatatggttatatggcggcgattaatatatattggtgtttgttgagcggggtgttggggagggagagtattaggaagaatagttaagggatattgggtttaatatttgggtgatgggatgatttgtatagtaaattattatggcgtatatatttatgtaataaatttgtatattttttatatgtattttagaattttaaataaaagttggacggttaggcgtggtggtttacgtttgtaattttagtattttgggaagtcgaggcgtgtagattatttaaggttaggagttcgagattagttcggttaatatggtgaaatttcgtttttattaaaaatataaaaattagttagatgtggtacgtatttataattttatttattcgggaggttgaagtagaattgtttgaattcgagaggcggaggttgtagtgagtcgtcgagatcgcgttattgtattttagtttgggttatagcgtgagattacgttataaaataaaataaaataatataaaataaaataaaataaaataaaataaaataaaataaaataaaataaaataaaataaaaaaataaaataaaataaaataaaataaagtaatttttttttttttaagcggtttttattttttttttttgttttgtgaagcgggtgtgtaagtttcgggatcgtagcggttttagggaattttttttcgcgatgtttcggcgcgttagttcgttgcgtatatttcgttgcggttttttttttgttgtttgtttattttttaggtttcgttggggatttgggaaagagggaaaggttttttcggttagttgcgcggcgatttcggggattttagggcgtttttttgcggtcgacgttcggggtgtagcggtcgtcggggttggggtcggcgggagttcgcgggattttttagaagagcggtcggcgtcgtgatttagtattggggcggagcggggcgggattatttttataaggttcggaggtcgcgaggttttcgttggagtttcgtcgtcgtagttttcgttattagtgagtacgcgcggttcgcgttttcggggatggggtttagagtttttagtatggggttaattcgtagtattaggttcgggttttcggtagggtttttcgtttatttcgagattcgggacgggggtttaggggatttaggacgtttttagtgtcgttagcggtttttagggggttcggagcgtttcggggagggatgggatttcgggggcggggagggggggtagattgcgtttatcgcgttttggtattttttttcgggttttagtaaatttttttttgttcgttgtagtgtcgttttatatcgtggtttattttttagttcgaggtaggagtatgtgtttggtagggaagggaggtaggggttggggttgtagtttatagtttttcgtttattcggagagattcgaatttttttattttttcgtcgtgtggtttttatttcgggttttttttttgtttttcgtttttttcgttatgtttgtttttcgttttagtgttgtgtgaaattttcggaggaatttgtttttttgttttttttttgtatttttgattttttttcgggttgttgcgaggcggagtcggttcggtttttatatttcgtattttttttttttcgtaggtcgttgcgcggttttgcgtatgttgttggtagattagggttagagttggaaggaggaggtggtgatcgtggagacgtggtaggagggtttatttaaagttttttgcgtaagtgattatgttcgggtaaggggagggggtgttgggttttagggggttgtgattaggatcgggggacgtttaagtttagtgtttttttttgagttatgttttttttaatagttatacgggtagttttttaagttttaggacggagattttattttgtattagtttaatattattttgcgttatttgggtcgtatttttggtgagttttgaatttttaagtttagggtaggtatgggtaagtttttgttttcggagtttttttgtttaaattagttgtttcgtagttttttggagtggaggaaattgagatttattgaggttacgtagtttgtttaaggttaagtttgggtgtttgtaatttttgttttgtgttaggttgttttttaggtgttaggtgagttttgagtatttgttgtgtggtagttttttatttttttacgtatattttttttttttttttttaggttggggtttatagatagttttttggttggtttatttttagtgattgtgtgttgattaggcgtttagttacgcggtttgtttttttttatttaattttagggttttatgggaaggattagtaggaggtagttttggtggatatggtgaatgacggcgtggaggattttcgttgtaaatatattttttttatttatattaattatgtgagtatttgtattagggttgggtattgggggttgaataaagaaaggggttttttgtgtttttattttttttattttttaggtggtttgggttgatttttttttgggttagggtgtaggggttgggttagttttgggttaggggtttaggggtttgggataagatataatttgtatttttattgtttgggatattaattagttaagtaacgggttatgggggcgagtgtaaggatagagatttttagtaattggtggtttttgattttttggggtggcgagggttttttggagtagttagaggtggaggaggatttgtcgttagtttttggatggaggtgttggtatttttagttgaggaaaatatgtagatatagagtatatttggggatttgggattagtttagtagaggtagcgtgtgtgcgcgtgcgtgtgtatgtgtgtgcgtgtgtgtgtgtacgtttgtatttgtgtcgggtgggtaaggagatagagatgggcgggtagtaggtttaggtttcgaaggttttgaatttattggtttggagttttttaagggtaatgggggttattgagaagtttgaatagggttgtgtttgaatgtgaggtttagaaggattttttagagaagttagttttaaagtttttgtaattatttggtgagagaatttagtaaggatggataggtagaatggaatagagatgagttggtagttgaagtggataggatttggtattagtttggttgtggggagtaagtagaggagaatttgggattttggtgtttggtttggggtagacgggggtgttttaggggttgggagggatgagagtaggatgatatatggtggtgtttggtaggaggcgggtaaggatgattatgtgaaggtattgttcgggtaattgaagttttttgagattttgttgttttagaattagggaggtaagatttttattgtgggagattaggtgagtatttggttttatgttgtttttttttcgttattttttgtttttagatggatataggtgtgagttatttgtttagtaaagtagagtagatttaggggatgggtttaggttttttgtttttaatttttttagtttgttttcgttggttgagtttttggtttttttgttttgtagatttttttcgttgattataatttgttggatttgttgttgatttatgaggttttagtttttggttgtttggatgcgttttttttgtttttagtatatgtggggcgttttagtgttcggtttaagtttaaggtttttttggttttttttgagtacgtgaatttttttattaatggtaacgggaaatagtgagggttg

SEQ ID NO: 247 - DNA, 6147 bp, Artificial Sequence
  chemically treated genomic DNA (Homo sapiens)
taatttttattgtttttcgttgttattgatggggaggtttacgtatttaggggaggttaggaaggttttgagtttgggtcgggtattgaggcgttttatatatgttgagagtagggggaacgtatttaggtagttaggggttaggattttatggattagtagtaagtttagtaggttgtagttagcgaaggagatttgtagggtaggggggttagggatttagttagcgggagtaggttggaggaattgggggtagagggtttaagtttattttttaggtttgttttgttttgttaaataaatggtttatatttgtgtttatttggaagtagagggtggcgaggaaggaatagtatggggttagatgtttatttggttttttataatgaaggttttgtttttttggttttgggatagtagggttttaaaaggttttagttgttcgggtagtgtttttatatagttatttttgttcgttttttgttagatattattatgtattattttatttttattttttttagtttttgagatattttcgtttgttttaggttagatattagagttttagatttttttttgtttgttttttataattaggttagtattaaattttgtttattttagttgttaatttatttttattttattttgtttgtttatttttgttgggtttttttattagatgattgtaaaagttttagagttggtttttttggaggatttttttagattttatatttagatatagttttgtttagattttttaatggtttttattgtttttaggagattttaaattagtgggtttaaggttttcgggatttgggtttattgttcgtttatttttatttttttatttattcgatataaatgtaagcgtatatatatatacgtatatatatgtatacgtacgcgtatatacgttgtttttgttgaattggttttaggtttttaaatgtgttttgtgtttgtatattttttttagttaaaagtgttagtatttttatttagaaattggcgataaatttttttttatttttggttattttaggaagttttcgttattttaggagattagaaattattagttgttggaggtttttgtttttgtattcgtttttatgattcgttatttggttggttgatgttttaggtaataagggtgtaggttgtgttttgttttaggtttttgggtttttggtttagagttgatttagtttttgtattttgatttaagaaggggttagtttaagttatttgaggggtaaggggggtgagggtataagaagtttttttttttgtttagtttttagtgtttaattttggtgtagatgtttatatagttggtgtagatgagggagatgtatttgtagcggaggttttttacgtcgttatttattatgtttattagggttgttttttgttggttttttttatagagttttggggttgggtggaggggagtaggtcgcgtgattgggcgtttgattaatatatagttattggggatgggttaattagggggttgtttgtgagttttagtttgggaggaggggaagaggatgtgcgtggaaggatgagagattgttatatagtaggtgtttagagtttatttgatatttgggaggtagtttggtatagggtaaggattgtaggtatttaggtttgattttgggtaaattacgtaattttagtgggttttagttttttttattttagagggttgcggggtagttgatttaaataaaagggtttcgggggtagaggtttgtttatgtttgttttggatttggaggtttaagatttattaagggtgcggtttaggtgacgtaggatggtattggattggtatagggtgaggttttcgttttggaatttggggagttgttcgtatagttgttgggggaggtatggtttagggaggggtattgagtttgggcgtttttcgattttagttatagttttttaaggtttagtattttttttttttgttcgggtatggttatttacgtaggaggttttgagtgagtttttttgttacgtttttacggttattattttttttttttagttttggttttgatttgttagtagtatgcgtagggtcgcgtagcggtttgcggggagggagaagtacgagatgtggggatcgggtcgatttcgtttcgtagtaattcggggaggggttaggagtgtagggagggaatagggaaataggttttttcgaagattttatataatattggggcggggagtaggtatggcgggagaggcggggaataggaaggaggttcggggtaaaagttatacgacggagggataagggggttcggattttttcgggtgggcgaggggttgtgggttgtagttttagtttttgttttttttttttgttagatatatgtttttatttcgaattgggaaatagattacggtgtagggcggtattgtagcgaataaagaaaagtttgttggagttcgggggaggatgttaaggcgcggtgagcgtagtttgtttttttttttcgttttcggggttttattttttttcgaggcgtttcgggttttttgaaagtcgttaacggtattggggacgttttgggttttttaggttttcgtttcgggtttcgaggtgggcgaggagttttgtcgggagttcgggtttgatgttgcgggttggttttatgttgggagttttgagttttattttcggggacgcgggtcgcgcgtatttattggtggcgaagattgcggcggcgaaattttagcgaaggtttcgcggttttcgagttttataagggtggtttcgtttcgtttcgttttagtgttgagttacggcgtcggtcgtttttttggagggtttcgcggattttcgtcggttttagtttcggcggtcgttgtatttcgggcgtcggtcgtagaggggcgttttggagttttcggagtcgtcgcgtagttggtcggggaagttttttttttttttttaggtttttagcggggtttagggagtaaatagatagtaggaagaggatcgtagcgaagtgtgcgtagcgaattggcgcgtcgggatatcgcggggggaaattttttaagatcgttgcgatttcggagtttgtatattcgttttatagggtaggggagaggggtggaggtcgtttagaggaaaggaaattgttttattttattttattttattttatttttttattttattttattttattttattttattttattttattttattttattttattttgtgttattttattttattttatgacgtagttttacgttgtggtttaggttggagtgtagtggcgcgatttcggcggtttattgtaattttcgtttttcgggtttaagtaattttgttttagtttttcgagtaggtggaattataggtgcgtgttatatttggttgatttttgtatttttagtagagacggggttttattatgttggtcgggttggtttcgaatttttgattttaggtgatttgtacgtttcggttttttaaagtgttgggattataggcgtgagttattacgtttggtcgtttaatttttatttgaagttttggggtatatgtagaggatgtgtaggtttgttatataggtgtgtgcgttatgatggtttgttgtatagattattttattatttaggtattaagtttagtattttttagttattttttttggtattttttttttttagtatttcgtttaataggtattagtgtgtgttgatcgtcgttatgtgattatgtgtttttattgtttagtttttatttataagtgagattatgcggtttcgttggttttttgtttttgtgtgagtttgttgaggttaacggtttttagttttatttatgtttttgtaaaggatatgattacgttttttttagtggttgtgttttaggttattttttttggttttgttgtttattttttgttgatttgtagatttttatttattttagatattgattttttgttggttttagatatgatagatagttttttttattttattaattgttaagtttgtttaaggagttttttatgaaataaaattcgttaatttaagtgtaattaaatttagtaagggatttttgtggtggggaagaggttggtgtttatgttgtatttttaaaattttatttaatgtagttattaaaaagaattagattatgttttttgtgggaatatggatggagttagaggttattatttttagtaaattaatgtaggaatagaaatttaaatattggatgtttttatttgtaagtgggagttaaatgatgagaatttataatataaataaggaaataatagatattgtggttgattttagggtgtaggatgggaggaaggagaggagtagaaaagagaattattgggtattcggtataatatttgggtgatgaaatattttgtataataaatatcgaagatacgagtttatttatgtaataaatttttatatgtatttttaaaatagaaataaaagttaaaaaataaagaaattttatttaaaagttttttttaagagatttattatcgggggaaatttagtttttaatattttacgtgggtttttttttattttttttaagtgtcggttggtttgagaaataaagggaaagagtataaaagagagatattttaaagtcgggtgtttaggggagatattatatgttcgtaggtttcgtgatgttttttgagtcgtaaaattagcgagtttttattagtaatttttaaagaggagggagtgtacgaatagggtgtgggttatagagattatatattttaagggcgataaaagattatagggtagaaggttacggcgaaattagaattattaatgaatttttaggttttattgtgtacgtattgttagggtttaagagtagagaatcggtttgattagaatttgttaggttggaattttttaattttattaagtttgggggtgttgtaggagattagggcgtgttttatttttttttatttttgaataaaggtaggtatttttagggaggttattttagtggttcggttttgggaatgtattttttttttagggttgttaattattaatattttttattggggaaagaatttagcgatattttttttatttgtttgcggtaataagagaagtatggttttgttttgtttagtttataggtagttagattttaaggttattttttttgttttttgaaaattgttgttattttgtttttaagatgtttagattttatattgtttaaatatataataattgttttttataaataatttgtgtagttaacgtagttattatagggttttaaggcgatatatatttttagtttacgaagatgataggattaagagattaaagataggtataggaaattataagagtattgattggggaagtgataaatgtttatgaaatttttataatttatgtttttttgttatggttttagttagttttttcgttcggggtgtttgattttttataatatgtatgttgtcgtagttggtttggaatttttggttttaagtgatttttttgttttatttagtttttcgaatagttgggattataggtatgtgttattatatttagttaatttttgtattttttgtagagatggggttttattatgttgtttaggttgtttttttttttttttttttttttttaaatttttattaatggattgaggttataaggaagttttttaaatttttgttattttgggttttttttaattttattttaattgtttagttttggtgttttttttggtttgttaagttgtttttttggtttggttttttggtttttcggtttgaggttggttatttttttttagttttgagaaatgtatttttattgttttttttgagatgttttttttttcgtttttttttttttttttttttttttttttttttttttttttttttttttttgtattatttggaaaatggtttttttaatttatttttttattattttattgtttttttttttttttagataggttgttattttattgtttaggttggagtgtattggtattattttagtttattgtaatttttgttttttggtttaagtgatttttttgttttagttt

SEQ ID NO: 248 - DNA, 6237 bp, Artificial Sequence
  chemically treated genomic DNA (Homo sapiens)
gtgttcggttttggtagttcggttttgggcgttttttatttttaggcgttgttttttattttaggttgttttttcggtcgtcgcggggttgcggtttgggcgttatagtaacgggagttaggttttatttgaatacgtaaatatttataagtcgtcgggggttcgggtttcgtgcggttgagttacgttttttagtaacggtcgttagggcggggttacgtggattggtacgtgcgtgggcgtttttgttgcgggcgattttaggggaaggtgacgcgttattaattcgagttgggtgggcgtaggcgcgttaggtgttagttttttgcggtttcgtgtttgggtcgtcgcgatgtacgtgtcgcgttttttcgcgattttggcgttttttacgcggggcgggtaaaggcggtttttgttggaggttcgcgtttattttttttaggtggaagggtcgtttttggggtcgaggtttgtcgttttgattttcggttggaagtgaggtcgacggtaaaaggaagtatcgggggaagcgttttcgaggattaggaaatatatatcggacgtcggagcgtattcgagtgttcggttcgcgggatacgttgtcgttcgtcgtttagtcgtcgttttttattcgcgtttatgcgtgttcgtttcgagtcgagttttgattgcgatcgcgcggtggacggacggtaggcgggattttcgggatcgtacgtgggtggagtttcgggttagtagcgatcggcgtaggagggcgaggcgggcgttggattgggtagaggtagggtttgtttgattgtaaaacgttttttttgttttgagacgaagtagcgttttgttgtttagtgtagtggcgcgatttcggtttatcgtaatattcgtttttcgggttttagcgatttttttgttttagtttttcgagtagttgggattataggcgcgcgttattgtagtcgattaattttttgtgtttttagtagagatagggttttattatgttggttaggttggttttgaatttttgattttaagtaatttattcgtttaggtttttcgaagtgttgggattataggcgtgagttatcgcgttcggttttttttgttttttaatgaggatgtatttttgatttttttgtaattttaaaaaatgttaaaaatatgtttttttgggtttgaaagagttaggatgtgcgtttatgtgtttggggtgagttttgggtatttcgtttttttgtggtaatttgtgggtacggtttaattggattacgttgagtttttgtagcgttggaattttaagtttggggggattgggcgggtagggtcgtttgttacgtaggttcgagaaagaggagagtggtggagggggcgtttttacgtttggttttagggtatacggttgcgttcgtcgttcggaattttatcggggttgtaagcgttttcggggtgggttgcggtgggagtaggggagttggggtgcgtggtggtaggtggggtgcgcggtcgttttatttgcgcggaagggtagtcgggtaatcggatttcgcggttattcgggggtttttagtttcgagtatttcgttttggtttcggcggattttagtttttttttagttcgtagtttcgggattttcgcggtgggcggcgtcgcgttgtcggcgtagggagggtttttggtgtatcggtatcgttgagtcgggttttttcgtcggtttgttttcgggagagttcggggttttgttcggagatgtcgtttcgggtttttagatatcggttttttggtttttttcgagtaatttcgagttcggtttcggtttttagttaagtttaatttcgagaggtcgcggttttattggtttcgtttttcgcgttgttttcggaagtttcgttcgatcgcggtttttgatagacgggtcgtttagttaatcggggtggggcggggttcgatggcgcgtagttaatggtaggtcgcgtttggtagacggacgggcgcggggcggggcgtgcgtaggttcgttcgagttttcgtcgttcgtgttttgcgttcgtaattcgagtcgtattcgtcgcggacggagtttatgcgcggggcgaatcgcgcgttttcgttttcgtttcgtttcggtttcggtttcggttttggtttcgggggtagtcgcgtttgtgaacggtgagtgcgggtagggatcggtcgggtcgcgcgtttttttcgtttttaggcggtagtaatacgcgcggcgcgggtcgggggcgcggggtcggcgggcgtaagcggcggcggcggcggcggcggcgggtgggtggggtcgggcggggttcgcgggtataggtgagcgggcgtcgggggttgcggcgggcgggggtttttttttttttggggtttgcgggaattcgggttttattcgtggtttcgcgttgggtacggtttttacgtcggcgtattcgggagtttcgggttcggcgtttttatattcgggggcgtttgggaggaggcggtcgcggttacggtacgttcgggtattttcgatttagtattataggtcgcggattaggtcgggggttttagttttagtgtttttttttttttcgggtttttcgcgtcgtttttcggtttttttttgtcgtttagtttttgttttttaggagtttttttgttttttttagttttttgtggttgaaagatgttttcggtttttcgtcgggggtgcggggcgttgttcgggtttgtttttttttcggcggcgtttagtacgtagtaggcgtttagtaaatatttgtcggaggtattagcgtcgcggggtttgtaggttggtattagtttgttcgggtacgtcgtggcgcgtttcgtcgtggttagatttgttttggaggacggtaattttagttttcgggcgtttttttttagtttttttgtcgatttagtagtttttaatttgggtgcgtggttgagagcgtttagttgttagttttgtttttgagggttgggtttttttttttattattgggttattaagagtaagtgggggcgaggcgatagttttttcgtacgttgggttgtagttgtataggtaggtacgttgtagtttttgttgtttggcgttggggtttagggatcgttgtgggtttgttttttagatggttttgttagtagttgttttgtggggtttggggttgggtttgggtttggttgagtagggttttttttggtaggtggggtaggagattttgtaggaggatttcgggtcgtaggtttttgaggagcgatgacggaatataagttggtggtggtgggcgtcggcggtgtgggtaagagtgcgttgattatttagttgatttagaattattttgtggacgaatacgattttattatagaggtgagtttggcgtcgtcgtttaggtgttagtagttgttgcgggcgagtttaggatatagttaggatagggttggttgtagtttttggttttttgtatggtgttgtggttttgttttttgttttttttagaggaggggagtttttcgttttagtattttaggagaggagggggtatgaggggtatgagaggtattagggagaggttggttgtgtgaattttttttacggaaggttttgagggggtttttgagttttgtttttttgtaggatttttatcggaagtaggtggttattgatggggagacgtgtttgttggatattttggatatcgtcggttaggaggagtatagcgttatgcgggattagtatatgcgtatcggggagggttttttgtgtgtgtttgttattaataatattaagttttttgaggatatttattagtataggtgaatttcgtgaggttggttcgggagtttacgtcgtataggtggggttaggtcggttgcgtttaggtaggggttttttgttttttttgcgtatgttttggatgtcgttgcgtttgtagttttcgtagttagttttcgttttttattttttagggagtagattaaacgggtgaaggattcggatgacgtgtttatggtgttggtggggaataagtgtgatttggttgtacgtattgtggaatttcggtaggtttaggatttcgttcgaagttacggtattttttatatcgagatttcggttaagattcggtaggtgaggtagttttttattttatagttagttagggattcgtttcgtttcgttttagttagggagtagtatttattgatttttttttttgatatagggtagtcgttttggttttagttttagtttcgggattttttgggatttttcgggatttatgtgatttagcggtttttcgcgttgtaagtttttcgggacggtagggtagtgagggaggcgagggtcggggtttgggtttacgttttgtagttttgggtcgatatagtttcggggaaggcggaggtttttggggagagttgttttgagttaggtcggagcggtgattttggggttcggttttttttgtttttagagtgttttacgggtatttgttggttttgagttttagtggggttattggggatacgggtcgtagttgagtcgagagttgggtgtagggtggttaaattttggttagatttggagtttaggagggtttcgggttattttgatttttgaggggttgttgtagtatgatgcgggtggttttgggtatttcgagatggttagagtttagtttttcgtgtgtgtggtgggtttggggaagtggttggtggagtcgggagtttcgggttaggtaaggtttgattttatagtagggagttttttatttaggtaggcggttataggtcggttttttttgattttatttttttttttttagggagtggaggatgttttttatacgttggtgcgtgagattcggtagtataagttgcggaagttgaatttttttgatgagagtggtttcggttgtatgagttgtaagtgtgtgtttttttgacgtaggtgagggggatttttagggcggtcgttacgtttatcggatgatttcggtttttcgtttttgtcggttttttggtttgcggttagtagttttttttgtgtttcgtttagtataagtttaggatatggaggtgtcggatgtaggaaggaggtgtagacggaaggaggaggaaggaaggacggaagtaaggaaggaaggaagggttgttggagtttagttatttcgggatcgtgggtcgaggtgattgtagatttttttagggaggttgtgtatagattgttttgaatattttaaatgttatcggaattttagtttttagttttttttttaggtttttgtgggtttttgtcgggtatagatgggattatagtaaattattggatggttttgattttggttttcggttgagggtgggatacggtgcgcgtgtggtttggtatgaggtatgtcggaattttaggtttgtttagttttgggttttttatagtttttgggagggggaggttgggagaggtcggttaggggtttgggttgtggtgtttttttttttcgtttgttttagtgtttacggtttttggtagagagttttggataagtaggtagattataaggatagagagtttattgtgtttttattaattaggagggcgttttggttttttagagggaggtggttttaggggttggggatttgtgtcggtggttttggtttttgttgggagtttttttggcggtgagaggtattattttttttgatttgtttttagcgtgaaatgtatttgttaagaatggtagatatagggatttcgttttttgggtttttatatgtttagtttttttcggttttgtggtttgaagcggtttgtggattttggaagtagggttttagtatcgattggttttaggtttttgttttattggtggtcgggtagcggttagtagggcgtgggagtttggttatttttgttttttggagtggacgaggttggtagttggttcgtttgtttttgttttattttttttcgtttttgtttttattttatttttgttttacgtttgttttatggttggttgtttttggagtttggtagtgttattggtttagttttgttgggtatatataggttttgttatttattttgttttaaggggtttgttttgttttgggttaagttttaggtttggttatagttatagatagtttagttttttgtgtggttattttggtttttgttgggggtttatagcgtttttggtgtttttttttttttagggttcggg

SEQ ID NO: 249 - DNA, 6237 bp, Artificial Sequence
  chemically treated genomic DNA (Homo sapiens)
ttcgggttttgggaggggaggggtattaggggcgttgtgggtttttagtagaagttaggatgattatataggggattgagttgtttgtggttgtggttagatttagaatttggtttaaggtagggtaagttttttggagtagagtgggtggtagagtttgtgtatatttagtaaggttgagttagtgatattattaggttttaagagtaattagttatgaggtaggcgtggggtaagggtagggtgagggtaggggcgggggagagtggggtaggagtagacggattagttgttaatttcgtttattttaggaggtagggatggttaggtttttacgttttattggtcgttattcgattattaatgaggtagaggtttgaggttagtcggtgttggagttttatttttaaggtttatagatcgttttaggttatagagtcgaagaaaattgggtatgtgaaggtttaggaggcggggtttttatgtttgttatttttggtaggtgtattttacgttgggagtaagttaggaaaggtgatgttttttatcgttaagaaggtttttagtagagattagagttatcggtatagatttttaatttttgaaattatttttttttggaggattaggacgtttttttagttggtagaagtatagtaagttttttgtttttatgatttgtttgtttgtttagagttttttgttagaagtcgtggatattggggtaggcgggaggagagagtattatagtttagatttttgatcggttttttttaattttttttttttaaaggttatggagagtttagggttggataggtttgaggtttcgatatattttatgttaggttatacgcgtatcgtgttttatttttagtcgaaaattaagattaagattatttaataatttattgtgattttatttgtgttcgataagggtttatagaggtttgggaggggagttaagggttggggtttcggtggtatttgggatgtttaagatagtttgtgtatagtttttttgggagggtttgtagttatttcggtttacggtttcggggtgattgggttttagtagtttttttttttttttttgttttcgttttttttttttttttttttcgtttgtattttttttttgtattcggtatttttatgttttgagtttgtgttgggcggggtataagggaggttgttgatcgtaggttaggagatcggtaggggcggggagtcggggttattcggtgggcgtggcggtcgttttgggagttttttttatttgcgttaggagagtatatatttgtagtttatgtagtcggggttatttttattaggagggtttagttttcgtagtttgtgttgtcggattttacgtattaacgtgtagaaggtattttttattttttgggaaaggagggatgggattaggagggatcggtttgtggtcgtttgtttgggtgaggggttttttgttgtgggattaagttttgtttggttcgaagttttcgattttattagttatttttttaggtttattatatatacgggaagttggattttggttatttcgaagtgtttagggttattcgtattatgttatagtagttttttaaaggttagggtggttcggggtttttttgaattttaggtttggttagggtttgattattttgtatttagttttcgatttagttacggttcgtgtttttagtagttttattaagatttagaattaataggtgttcgtgggatattttggggataagaggggtcgggttttagggttatcgtttcggtttggtttagggtagttttttttaaggattttcgtttttttcggagttgtgtcggtttaggattgtagggcgtgagtttagatttcggttttcgttttttttattgttttgtcgtttcgggagatttatagcgcgaggggtcgttgggttatatgggtttcggggggttttagagggtttcggagttggagttagagttagagcggttgttttgtgttaagggagagggttagtgagtgttgttttttggttggggcggggcggggcgggtttttggttagttgtggggtggagagttgttttatttgtcgggttttggtcgaggtttcgatgtaggggatgtcgtagtttcgggcgaggttttgagtttgtcgagattttatagtgcgtgtagttaggttatatttgttttttattagtattatgggtacgttattcgagttttttattcgtttgatttgttttttgagaggtggaaagcgagagttggttacgggggttgtaggcgtagcggtatttaggatatgcgtagagaggataggaggtttttgtttggacgtagtcggtttggttttatttgtgcggcgtgggttttcgggttagttttacggggtttatttgtattggtggatgtttttaaaagatttggtgttgttgatggtaaatatatataggaagtttttttcggtgcgtatgtattggtttcgtatggcgttgtattttttttggtcggcggtatttaggatgtttaataggtacgtttttttattaatgattatttgttttcggtaggaattttgtaggaggatagggtttagggatttttttaggatttttcgtggggggagtttatatagttagtttttttttggtattttttatgttttttatgttttttttttttttggggtgttgagacgagggattttttttttttagaggaagtaggagatagggttatagtattatgtaggggattaggggttgtagttagttttattttggttgtgttttgggttcgttcgtagtagttgttggtatttggacggcggcgttaggtttatttttatagtggggtcgtattcgtttataaaatggttttggattagttggatggttagcgtatttttgtttatatcgtcggcgtttattattattagtttatatttcgttatcgttttttaggggtttgcggttcggggtttttttatagggttttttgttttatttgttaaggagggttttgtttagttaggtttaggtttagttttaggttttatagggtagttgttggtagggttatttgaagggtaaatttatagcggtttttgggttttaacgttaggtagtaaggattgtagcgtgtttatttgtgtagttgtaatttagcgtgcgggagggttgtcgtttcgtttttatttgtttttaatgatttagtgatgggaaaagggatttagtttttaaaggtagggttgatagttgagcgtttttaattacgtatttaaattagaagttgttgggtcggtagaaaggttaaagggaggcgttcgagggttgaggttatcgttttttagaataggtttggttacggcggagcgcgttacggcgtgttcgggtaggttagtgttagtttgtaggtttcgcggcgttggtgttttcgataagtatttgttgagcgtttattgcgtattaggcgtcgtcgaggggagggtagattcgggtagcgtttcgtattttcggcggggaatcgggggtattttttagttatagaaagttggagaagatagaggagtttttgggaagtagggattgagcgataggaaggggtcgagaagcggcgcgggagattcggagagggaaaaggtattggggttgaggttttcggtttggttcgcgatttgtgatgttgaatcgggggtgttcgggcgtgtcgtggtcgcggtcgtttttttttagacgttttcgggtgtgagggcgtcgggttcgaggttttcgggtacgtcggcgtggggatcgtgtttagcgcgaggttacgggtggggttcggattttcgtaggttttagggaggaaggggttttcgttcgtcgtagttttcgacgttcgtttatttgtgttcgcgggtttcgttcggttttatttattcgtcgtcgtcgtcgtcgtcgtcgtttacgttcgtcggtttcgcgttttcggttcgcgtcgcgcgtattgttgtcgtttgggggcgaggagggcgcgcggttcggtcgatttttgttcgtatttatcgtttataggcgcgattgttttcggggttagggtcggggtcgaggtcggggcggggcgggggcgggggcgcgcggttcgtttcgcgtatgggtttcgttcgcggcgggtgcggttcgggttgcgggcgtagggtacgggcggcggagattcgggcgggtttgcgtacgtttcgtttcgcgttcgttcgtttgttaggcgcggtttattattggttgcgcgttatcgggtttcgttttatttcggttggttgagcggttcgtttgttaggagtcgcggtcgggcggggttttcgggagtaacgcgggaggcggagttagtagggtcgcggtttttcggggttgggtttggttggagatcggagtcgagttcggggttgttcgaggaaggttagggagtcggtgtttgggggttcggggcggtattttcgagtagggtttcgggttttttcgggaataggtcggcgagagaattcgatttagcggtgtcggtgtattagaggttttttttgcgtcggtagcgcggcgtcgtttatcgcggaggtttcggggttacgggttggggaaaggttgggattcgtcgggattaaggcgggatgttcggagttgggggttttcgggtggtcgcggggttcggttgttcggttgttttttcgcgtaggtggagcggtcgcgtattttatttattattacgtattttagtttttttatttttatcgtaatttatttcgaggacgtttgtagtttcggtggggtttcgggcggcgggcgtagtcgtgtgttttggggttaggcgtgagaacgttttttttattatttttttttttttcgggtttgcgtggtaggcgattttgttcgtttagtttttttaaatttgaggttttaacgttgtagaagtttagcgtggtttagttaaatcgtatttataagttgttataggggagcgaagtgtttagggtttattttaagtatatagacgtatattttagtttttttaaatttaaaaagatatgtttttaatattttttaaaattgtaaaggaattagaaatatatttttattaaaaaataaaaagggtcgggcgcggtggtttacgtttataattttagtatttcgggaggtttaagcgggtggattatttgaggttaggagtttaagattagtttggttaatatgatgaaattttgtttttattaaaaatataaaaaattagtcggttgtagtggcgcgcgtttgtagttttagttattcgggaggttgaggtaggagaatcgttggaattcgggaggcggatgttgcggtgagtcgaaatcgcgttattgtattgggtaatagagcgttatttcgttttaaaataaaaaaggcgttttatagttaggtaaattttgtttttgtttagtttagcgttcgtttcgtttttttgcgtcggtcgttgttgattcggggttttatttacgtgcggtttcgggggtttcgtttgtcgttcgtttatcgcgcggtcgtagttagagttcggttcggggcggatacgtatgaacgcgagtgagaagcggcgattggacggcgggcggtagcgtgtttcgcgggtcgggtattcgggtgcgtttcggcgttcggtgtgtgttttttggttttcgggggcgtttttttcggtgtttttttttgtcgtcggttttatttttaatcgaaggttaggacggtaggtttcggttttaggggcgatttttttatttgggaaaggtgggcgcgagtttttagtagagatcgtttttattcgtttcgcgtgggaagcgttaggatcgcgaggaaacgcgatacgtgtatcgcgacggtttaggtacggagtcgtaggaagttggtatttgacgcgtttgcgtttatttaattcgagttggtggcgcgttatttttttttgggatcgttcgtagtaggggcgtttacgtacgtgttagtttacgtggtttcgttttagcgatcgttgttaaggggcgtggtttagtcgtacggaattcgagttttcggcgatttataaatatttgcgtatttaaatgaggtttggttttcgttgttatggcgtttaggtcgtaatttcgcggcggtcggaagaatagtttggagtaggagatagcgtttggaggtggagggcgtttagggtcgagttgttagggtcggatat

SEQ ID NO: 250 - DNA, 6237 bp, Artificial Sequence; identical to SEQ ID NO: 248
  chemically treated genomic DNA (Homo sapiens)

SEQ ID NO: 251 - DNA, 6237 bp, Artificial Sequence; identical to SEQ ID NO: 249
  chemically treated genomic DNA (Homo sapiens)

SEQ ID NO: 252 - DNA, 6110 bp, Artificial Sequence
  chemically treated genomic DNA (Homo sapiens)
aataaaataaaaaagaaaaatatagtttgtttatggtaaagttttggtaagtaagtattaatatgttaattaaatttttttaagagtaatatttgaaaaataacgttatggttgggcgcggcggtttacgtttgtaattttagtattttgggaggtcgagaagggcggattacgaggttaggagatcgagattattttggttaatacggtgaaatttcgtttttattaaaaatataaaaaaattagtcgggcgtggtggtaggcgtttgtagttttagcgattcgggaggttgaggtaggagaacggtatgaattcgggtggcggaatttgtagtaagcggagattttgttattgtattttagtttgtgcgattgagcgagattgcgttttaaaaaaaaaaaagaaaaaagaaaaataatacgattattttattatttaagatggagttttattaagtttttagttatagtttatagtgaaaataatatgaatatgtattggaggttaggaagttaattttgaggatattaatattttatttttttcgttttgttatgattatttatttttatttttttgataaatgttttagaggtatgtgtgtttttttttttatttacgatatatttaagtatcggtttttagaaattttattgataattgatggttttttatttttttttttttgtagttttatttgtggttaaataataataatattaatttgagtagtatttgttattgttagcgtaaatattttgttgagattgtttgtataattagtgtatttgttttttgatggttatttttgaatttaaattgttgaattagtaagaagagataagttaagttgtagtttttaggaaaagaagattttttataagttttcgtgttataggagagtagatacgtaatgttttggaagaagtgtattgattagttataaatatttatatatagaaatttcgtttgtttttattaatttgaaagataaagtgtaaagtttgattaaattgtttttttaaaattttaatgtatgaatgaatatttattatagtatattagttaagattgatattatatacgtatggttagagagagaggaatatatatatatatatgtatatatatatgtatatgtatatatatatatatatagagagagagagagagagagagatggagttttattttgtcgtttaggttgagatatatatatatatatatatatattgttatatatatgtgttatatatattgttatatatatgtgttatatatattgttatatatatgtgttatatatattgttatatatatgtgttatatatatgttatatatatgtgttatatatatgttatatatatgtgttatatatatgttatatatatgtgttatatatgtgttatatatatgtgttatatatgtgttatatatatgtgtcgtatatgtgttatatatatgtgtcgtatatgtgttatatatatgtgttatatatatgtgttatatgtatgtgttatatatatgtgttatatgtatgtgttatatatatgtgttatatgtatgtgttatatatgtgttatatatatgtgttatatatgtgttatatatatgtgttatatatatgtgttatatatgtgttatatatatgtgttatatatatgtgttatatatgtgttatatatatgtgttatatatatgtgttatatatatgtgttatatatatgtgttatatatatgtgttatatatatgtgttatatatatgtgttatatatatgtgttatatatatgtgttatatatatgtgttatatatatgtgttatatatatgtgttatatatatgtgttatatatatgtgttatatatatgtgttatatatatgttatatatatgttatatatatgttagagagagagagagagagagagatggagttttattttgtcgtttaggttggagtgtattggcgtagttttcgtttattgtaattttcgtttttcgggtttaaacgatttttttgttttagtttatcgagtagttgttattataggcgcgtgttattatattcggttaatttttgtatttttagtagagatggggttttattatgttggttaggttggtttcgaatttttgatttcgtgattcgttcgttttagttttttaaagtgttgggattataggcgttagttatcgcgtttagtttatatatttttattttattaaatagaatagtagaataaaattagatatggtagttgaaaaggatgattttttgattattttaaatagagatttttaaattttaaaaattttagaaattaggaatttataattttattatataaacgtgcgttgttaaaatatttaagagtaatagtatgttttgtattaatagggataatatataagaaaaatagagatagttatataaaattatatattttttgatattttttgatagaaattttaaaagtagaggtgaaagatatatggattttggagttattgaagtcgtgaaattttagtaaaaattatgttaaatgtgattttaaattaaattcgagaaatatttattgagaatttgttttatgtatagtattgtgttaggttttatagggagagtaagttatttaggattgtattttaaaatttgggtatattggtgtaaagggaggtgaatagtaggcgtaggtgagtgttagaggatttgatttaagttgggatttttttgtaggtaaaacggtgggtagtgagaagttttaggaagggggcgttttcgaatacgcgcgtcgaggagggcgttttaggattttgagggagtagtttagttggatcgaggtcgcgtcgtttttgggtttattatttttagattcggattttcgatttcggagttacggtttaggacgcgaaaagattttatattggtattacgtttttttttaggcgggtcgttagtttcgggtgcgggttgcgttggaggttgaggtgggagcgatatggtgtggaggggtaagaaatgtcggtattagacgcgttaagaaggagattttacgagtaatttttttttcgggttattgtgttgttgtttattagtttttgggagggcgttaggataaaaggaatttttttttttttttagtatttaggtttaaggtcgggtgtgggagtcggcgcgttgttttttaggtaggtattgaagttacggtagttacgtaaataggtattagtcgttaaagtttggttataggtaaggggggggtaataggtttttggcgttgtggggtttcgtattttataattttcgcggttagtttgtgtggttattggcggtagttagcgggttgcgaaagcgagtttagcgtttttgatagtagtttacgcgtcggggcggggtttgagttcgttgttttaaaaggttcgcgcggtcggtttcgtttttttggtgtcgcgattggattcggcgggggtagcgttgatttgataggcgtagagagggtggggttgcgtacgcgaggtcgggggttttgtcgttgtttttcgggttggggtacgagtggttgcggagtgtgggtggttgggcgtgaggggtcgacgggttcgcgcgcgcgtcgtttgttgaggtttttcgggaaggaggagagcgtttgacgtcgattcgtaggcgtagttcggtagtcggcggcgcgtcgagggcggaggtggtgcgtgcgtgcgtgtgtgtgtgtgtgtgtgtgtgtgtgtgtgtgtgtgtgtggagttcgggtgttaagggcgagtcgttagttttcgggtgcgagtttttgttgttttttatattttttttttttttaggttttttttttatatttttttcgcgtttttacggttgcggatcgagcgagaatttttttaagtaggtgtggggggcgtgcggggtggtacgagataaaaggggtacgggggtaagttcgttatggtttttcggagtttggggggtttgagcgggattcgcggcggtggcggcggaggcggtaagaaaagtttgagcgttcgtaatgttgcggtggagaggaggaatttgattatcgtgtgtaggtacggtagcgtagggcgaggggaattagtttttcgtcggggttgagagttttgggttttcgcgcgggtttttgggggtttcgggtatgatgggttgtcgtttagtgttttcgtttatgttgcgttagttaaatttgtgagcgcgtagttttttggataggggttcgggtttggatatcgtcgtagttttggattttgtgttagttttagtgttgaaggtattggagggtagagtttggggcggggttggaggaggatttgttttgaatgtgtaatttagcgttagagtgaaagaggagggtaaggaagaagagtttttttatttaatgtttatttagttgttagcgagttttggataaagtggtagttattgtgattgtttattgtgttgtttttaaattagagtgtatttcgttgttttggtttgtttatattatttttagttattttattttatacgttagttgagtgtttattatatgttagttattgtgtatgtgagcgtgtgtgtattatttattttttagttatagtgttagtgttggttttgtagttgttattaagagtgggattgtggaggatatttagtttttatgttaatgatttattttaaggtttgtttttttttaatgttttataattgtaaatgtagtattttttttagaaaaatatagaaataataaaagaataattattattgggtcgggcgcggtggtttatatttgtaattttagtattttgggaggttgaggcgggcggattacgaggtcggagttcgagattagtttggttaatatagtgaaatttcgtttttattaaaaatataaaaaattagtcgggcgtggtggcgggtttttgtaattttagttattcgggagggtgaggtaggagaatcgattgaatttgggaggcggttgtaatgagttgagataacgttattgtattttagtcgggattatagggggagatttcgttaaaaaaaaaaaaaaagaattatttatagtaagtttagtatttagagataattggtttttaatatgttgatatattttttttaagttttatatttgagtattaagaaaaattgaaattttaagtattaattttttaggaatttttttgagttattaagttgttttaaaattatttttttttattagatttttaattattatttagtgatattttttttaagaattagatgatgatgaaattttttttttttttgtaatttttttgtattttttcgttattttttttgtgtaaaaatgtgtttagtattttaagtggaatatagataattattttaggatttaaatgtaataatttatagtgattttttaaaaaatatttgaattattataaatgtttatttagtaagaagattttttttattgattgtatttgtataatgtaattattatagtattttgagttgtaaatggtaaagtaatatggtattcgtttaatttgtcgtttgtgttgtttaggatgtaattttttgagataaataggttgttaggtgttttaaaatataggtaaatatttttaaagtaggtaaatggaattataagtaaggttgatttttttaattataatatatagatattaaaaattgttttaaaaataagggtagttttaatatatatagtgttttttggggggtaatatatttaataaaagttttattagtttttgttaaattttataagggtagtgattttatttgttttttgtttagttttttttttttttttttttaaatttttagtatagtatttaatatttaaaaaatatttattgaatgaataattttagtgatgggtattgttttttttgtttttttatttttgttttggttggttttaggttatgtaatgattatgtgtgtttttattagagatagttgaaaagaaaaggatttgtattttaattttatttaaattaaattttaaattatttttaagaaattttaggaacgttatattgatttttggggatagttttttgtattagttgtatttttatga

SEQ ID NO: 253 - DNA, 6110 bp, Artificial Sequence
  chemically treated genomic DNA (Homo sapiens)
ttatgaaaatataattaatatagagagttgtttttagaaattagtgtgacgtttttaaaattttttaaagataatttaaaatttagtttaaataaggttgaaatataaatttttttttttttaattgtttttgataagggtatatatgattattatatgatttaaagttagttaagataaaaatggagaagtaaaaggaatagtatttattattgaaattatttatttaataaatattttttgagtgttagatgttatattgagaatttgaaagaaaaaaaaaaaaagattaagtaaaaagtagatagaattattgtttttgtgaagtttaataaaagttgatagagtttttattaaatatgttattttttaagaagtattgtatatgttgaaattatttttatttttaaagtaatttttgatgtttgtatattatggttaagaaaattagttttgtttatggttttatttatttattttaaagatatttatttatattttaaaatatttaatagtttatttgttttaaaaagttatattttagatagtataaacggtaaattaaacggatattatattattttattatttataatttaaagtgttgtaataattatattatataaatatagttaatgaagaaggtttttttgttagataaatatttgtaataatttaagtattttttaaaaagttattgtgagttattgtatttaagttttggaataattatttgtattttatttaagatgttagatatatttttatataagaaaaataacggaaaaatatagagaaattgtaaaggaagaaaaagttttattattatttgatttttaagaggaatattattaggtgatgattaggagtttgatggaggaaagtaattttaaaataatttaatggtttagagaagtttttaagaaattgatgtttagggttttaattttttttaatatttagatataagatttaaagaaaatatattagtatgttaaaaattagttatttttgaatattaggtttattataaatagttttttttttttttttttgacgaagtttttttttgtggtttcggttggagtgtaatgacgttattttagtttattgtaatcgttttttaggtttaatcgatttttttgttttattttttcgagtagttgggattataggagttcgttattacgttcggttaattttttgtatttttagtagagacgaggttttattatgttggttaggttggtttcgaatttcgatttcgtgattcgttcgttttagttttttaaagtgttaggattataggtgtaagttatcgcgttcggtttaatagtaattatttttttattgtttttatatttttttgaaggaaatattatatttatagttataaagtattaaggaaaggtaggttttaaaataaattattgatataaagattaggtattttttatagttttatttttaataataattgtagaattagtattagtattgtagttgaaaagtggatagtatatatacgtttatatatataatggttggtatgtagtaggtatttaattaacgtgtgaaatgaaatggttgaagataatgtaaataagttaaaataacgaaatgtattttgatttgggggtaatatagtaaataattatagtaattattattttatttaaagttcgttgatagttgaatgggtattaaatgaaagagttttttttttttgttttttttttttattttgacgttagattgtatatttaaaataaatttttttttagtttcgttttaagttttattttttagtatttttagtattggaattgatataaagtttagggttgcgacggtgtttagattcgggtttttgtttaaggagttgcgcgtttatagatttggttggcgtaatataggcgggggtattgggcggtagtttattatgttcgggatttttaaggattcgcgcggaagtttagagtttttagtttcggcgggaggttggtttttttcgttttgcgttgtcgtatttgtatacggtgattaggttttttttttttatcgtagtattgcgggcgtttaggttttttttgtcgttttcgtcgttatcgtcgcggatttcgtttaggttttttaggtttcgggaggttatggcgggtttattttcgtgttttttttgtttcgtgttatttcgtacgttttttatatttgtttaagggggttttcgttcggttcgtaatcgtgggggcgcgggaaggatgtaggaaaggagtttggagggaggaagggtgtggaagatagtagggattcgtattcggggattgacggttcgtttttggtattcgagttttatatatatatatatatatatatatatatatatatatatacgtacgtacgtattattttcgttttcggcgcgtcgtcgattgtcgggttgcgtttgcgggtcggcgttaggcgtttttttttttttcgagggattttagtagacggcgcgcgcgcgagttcgtcggttttttacgtttaattatttatatttcgtagttattcgtgttttagttcgggaggtagcggtaaggttttcggtttcgcgtgcgtagttttattttttttgcgtttattaaattaacgttattttcgtcggatttaatcgcggtattagaggggcggggtcggtcgcgcggattttttaaagtagcgggtttaagtttcgtttcgacgcgtgggttgttgttaaggacgttgggttcgttttcgtagttcgttagttgtcgttagtagttatataggttagtcgcggggattgtgggatgcggggttttatagcgttaggggtttattgttttttttttgtttgtagttaagttttaacggttgatatttatttgcgtggttgtcgtagttttagtgtttgtttagaaagtagcgcgtcggtttttatattcgattttgggtttaagtattaagaagggaggagggttttttttgttttgacgtttttttaggggttaataaatagtaatataatggttcgaggggggaattgttcgtagaattttttttttggcgcgtttagtgtcgatattttttgtttttttatattatgtcgtttttattttagtttttagcgtagttcgtattcgggattgacggttcgtttaaggaggagcgtggtgttagtgtagagttttttcgcgttttgggtcgtgatttcggaatcgggagttcgggtttgggaatagtaagtttaggaacgacgcggtttcggtttagttgggttgtttttttagagttttggaacgtttttttcgacgcgcgtgttcggaagcgttttttttttagagttttttattatttatcgttttatttgtaggagggttttagtttgggttaggttttttgatatttatttacgtttgttgtttatttttttttgtattaatatgtttagattttagagtgtaattttaaatgatttattttttttatgggatttagtatagtgttgtatatagaataggtttttaataaatgtttttcgaatttaatttgaagttatatttgatataatttttattgaaattttacggttttagtggttttaaaatttatgtattttttatttttatttttgaagtttttgttaaagaatgttagagaatatatagttttgtgtggttatttttattttttttatatattatttttgttaatgtagggtatattgttatttttgaatgttttaataacgtacgtttgtgtaataaagttgtaaatttttaatttttgaggtttttaaagtttaaaaatttttatttaaaatagttaaaaaattattttttttagttattatgtttaattttattttattattttgtttagtagaataaaaatatatgggttgggcgcggtggttgacgtttgtaattttagtattttgggaggttgaggcgggcggattacgaggttaggagttcgagattagtttgattaatatagtgaaattttatttttattaaaaatataaaaattagtcgggtgtggtggtacgcgtttgtagtggtagttattcggtaggttgaggtaggagaatcgtttgaattcgggaggcggaggttgtagtgagcggagattgcgttagtgtattttagtttgggcgatagagtgagattttatttttttttttttttttttttttgatatatatatgatatatatatgatatatatatgatatatatatatgatatatatatatgatatatatatatgatatatatatatgatatatatatatgatatatatatatgatatatatatatgatatatatatatgatatatatatatgatatatatatatgatatatatatatgatatatatatatgatatatatatatgatatatatatatgatatatatatatgatatatatatgatatatatatatgatatatatatatgatatatatatgatatatatatatgatatatatatatgatatatatatgatatatatatatgatatatatatgatatatatatatgatatatatatatgatatatatatatgatatatatatatgatatatatatatgatatatatatatgatatatatatatgatatatatacgatatatatatatgatatatatacgatatatatatatgatatatatatgatatatatatatgatatatatatgatatatatatatgatatatatatgatatatatatatgatatatatatgatatatatatatgatatatatatgatatatatatatgataatatatatgatatatatatatgataatatatatgatatatatatatgataatatatatgatatatatatatgataatatatatatatatatatatatgttttagtttgggcgatagaatgagattttatttttttttttttttttttttttatatatatatatatgtatatatatatatatatgtatatatatatatatatatttttttttttttagttatacgtatatagtgttagttttaattaatgtgttatgataaatatttatttatatattaaaattttaagaaaataatttagttagattttatattttattttttaagttaataaaagtaggcgaaatttttatatatggatgtttgtgattagttagtgtattttttttagaatattacgtgtttgtttttttgtgatacggaggtttataaagagttttttttttttaggagttataatttaatttgtttttttttgttagtttaatagtttggatttagaagtagttattaggaaatagatgtattggttatgtaggtagttttagtaaaatatttgcgttggtaatgataaatattatttaaattgatgttgttattatttaattatagataaaattgtagaaagaaaagagtggaaaattattagttattaataaaatttttaaaaatcgatgtttgggtgtgtcgtgagtgagggagagaatatatatgtttttgaagtatttattaagaagataaaagtgagtggttatgatagaacgagaaaagtgagatgttaatatttttaaaattggttttttagtttttagtatatgtttatgttatttttattgtgaattatgattgaaaatttagtaaaattttattttaaatgatgaggtaatcgtgttatttttttttttttttttttttttttgagacgtagtttcgtttagtcgtataggttggagtgtagtggtaggattttcgtttattgtaagtttcgttattcgggtttatgtcgtttttttgttttagtttttcgagtcgttgggattataggcgtttgttattacgttcggttaatttttttgtatttttagtagagacggggttttatcgtgttagttaggatggtttcgattttttgatttcgtgattcgtttttttcggttttttagagtgttgggattataggcgtgagtcgtcgcgtttagttataacgttattttttaaatgttatttttagaaggatttagttgatatgttagtatttgtttattaagattttgttataaataagttgtgttttttttttttgttttgtt

SEQ ID NO: 254 - DNA, 6110 bp, Artificial Sequence; identical to SEQ ID NO: 252
  chemically treated genomic DNA (Homo sapiens)

SEQ ID NO: 255 - DNA, 6110 bp, Artificial Sequence; identical to SEQ ID NO: 253
  chemically treated genomic DNA (Homo sapiens)

SEQ ID NO: 256 - DNA, 6000 bp, Artificial Sequence
  chemically treated genomic DNA (Homo sapiens)
attgtttttttttatatatttttaatattttttagttaaatttatttaaatgtttgtattataagtatataattttttaagttattaagtttttaaaaatataaagttaaaaataaaaagtggaatatttattttttattttatggagttttttttatggtttatatgaatatttttgttataaaaatttttaattgtaattatatgtttttttattattattatatttaagaaaagtgattataattttgatattggttaatatttaatgtatatttaaattttttaagaatgttttttataggattttttttttgttgaatttttagattgtttttgttttgttttgtaatgtttatatattacgtttggtagttatatttttttagtttttattaatttagaagttttttttttatttttttaatattgatttttgtaaaggaataagaatagttgttttatagaatgttttatattttgggtatatttgtattaaattgaatataaatgggaggtgtaataaatgtaaaatatatattaaataggagatttagtataaaagagaatgtaaattattttattaattattttgattatatgtagaaaatttaattttttggatatattgagttttataaaatatatttataaaattattttatttttttatttttattttttattgttgttattagaaaattttaaattataaatgtggtttatatgatatatttattggatagttttagtttataagtttaattgtatatagattaaatgtttttgtagatatattaatatttgttaggtgatgttgtttatttaaaatttaagtgatgagttatttattatagtttattttatcgtgagagatattaggtttgattattcggttaaggtgttaattgtaaaatttttaattggagaagtatattttttttttaattagtaaatattttgaagaaaatttttagatataatatttttttgatagtttagagtttattgataatttttgtttgaatttattataataatggaagttttaaaatgatagttggaatttttttttaaagattattgttttattttttttattttttatatttttttttagtttttttttttttagaatattaagtatttagtagtagtatttagtattttaaaattagttatagttacgatgttttttgatgtttaaattgttttagagttggttattggaagtattttttagatagttttagtgtgttttcgattattttattaaattttatttttttatttttaggtattataagatattttaggtttattttttattttttttgttttagatttggttgaaattagttattgaggggtttattttttttagggaggaatggtatttagaaatttagatttggtattaatagtgtttattgttattgttttttttagtggattgaaaatgaattattaaaagattatgaatttatattgaaatttttaatttaaatttaatattatttttaaaaatgtatttgatttttatatttgtatttttttttttatattgaaaagtttggttttttataatattaatgtgtttattaatttattttataatttatattatagtttttaatattattaaatttattagtttattttataatttattattaataatgaatttatttagtgaagttttaaatattttataaaggtagagtattatgattaaaatttattttaaataattattttttttatatgattatattattaatattatatatagatatttattgttagttaataatttaaatgtatttttgattttttgttttattagttaggttataaacgcgatgtttatatagttatttatcggaagtaagagtttggattatagagtagattattagtagtatatggtttacgtgtgggcgattaatattatttgaaaagtagaagtttataagatagaaatatatatgagtattcgtttgtttggggtaggaaagttgagaaagaggtatattaagattaagggaaagaggtcgggaagggtaaaaaggtgaaatgaaaagaggttggtgaatgattaagaacggttggataggataaataagttttaatgttcgatagtagacgagggtgattatagttagtaatatattgtatattttaaagtagttagaagatttaaaatgttattaatatatagaaatgaaatatatttaaggtgatgtattttttaaatattcggatttgattattatatatttcgggtatgtaaaaaacgtttttatgtattttattttataaatatgtaaaatattatgtattattaaaagaaagaataaaaaagatagggaaaatgtatatgttgtgttttatttagttaataaatttttgttttaagtagggatattgattttaaaggttagtttgcgttttttaaaaataattaaaaataataatatgttatttattttagagttggaggttagaaataaattatttaaatttcgtaattatgtaaattatgaaaatgaaataagttagttattttttattgtttagtttaaaaaagttttttttttttgtttttttattgcggttttttttaagatttatttcgatttgaagagaaatcgtagtttattagttaaatgtatgagttttaggcgcgttggaggtgagattaatttttagtttttcgtcgaagttagagagtagtaagagggagcgttcgtcgttgatgttttagttgttttggtcgcgatgggtattgtaggggtttttttgtgcgcggggtttttagtatttttacgaaggtagagttgggggtttggtagcgcgttttggattttgttcgtcgttagtgcgattttttttttcggttttagtcgtcgcggacgatgtttttttttatttatcgttcgcgggtttagagagtaggttttcgtatcgcgcgggttgtgcgcgtttcgggtaatatggtttagtgttattacggtttgggcgttgttttaggagtttttgagtttagatttaattttatttggtttttatggatttgttagaggattttatattatttacgttttaagaagtttttttttcgtgaagattaagtttaggaaatttgaaagtttgatatttgggaattgttttatagtagtttttagttttgcgtgtttttatttcgcgttttttggaacggttattaagacgtgaaattttggaagaagatatttcgattttagtggaaagatttaaaggaaacgaatagcggtttttgtttttttgagtttggaagagtcgttattcgaatgagtttaggttttttgtggtaaagagagcgaagcggttgtgtttagtttacgtttcggcgttgtttttgtttagttaattagttttattatagatgattgttttcggttcggattgattgaatgttgatttttcgagaaattgcgaaataggttgaatttttaggaggaatgttttggttttcgttgtatttttttagaaagggtaagtagagaaacgcgtattagttgaattattggggatattttaatttatgtagatacgttttttaaagtttatataagtttttatatttatataattataggacgtagttaagggaaattttttcgggattcgtatttaatatagttaatataaaaatttcgatttttttaattttgtattatttttttgttttttaatatttttgaaaaggttaggagaaatttttttgtagtggtttttttttagtatgtttgatagtttttgagttatatttgtttattttttatttgatgataaatggaatgaaagaaaaaggaagttttaaaaaatatatagagataggtattttaaggtataaatgttattttaaagtgtgtaatattttaaaattttagacgttagattaatgttcgtgtttttttagggtattttaaatttttatattttaatttaaattagtaaaataaatatagtatgttttagtatattatattagttgtaatttttttttatatttattgttaatatttaatatttttttttgtttattatttattttaaattgaggaaaagtacgtgtaatttgtataatttaaaattgtaaagtaatgttaatttatattagagttttttttattttttatgaatatagaggaaataggtttgttgtattttttagtttatattttatgatttttatatattatttattagtttattgtataagtttagaagaagaaaattattttgttttttattgtatagtttgaggatgtttttattttttttaaataatttatattttaaagttataatttttttttatttttgattataaattttttttattttgatatattttgtttttggttttataatataatgaagtttttttttgtttttttttttttttttttttttgagacggagttttgttttgtcgtttaggttggagtgtagtggtaggatttcggtttattgtaagtttcgtttttcgggtttatattatttttttgttttagttttttaggtagttgggattataggttttcgttattacgttcggttaattttttgtatttttcgtagagattgggttttattgtgttagttaggatggttttgattttttgatttcgtgattcgttcgtttcggttttttaaagtgtagggattataggcgtgagttatagttcggttttttttttttttttttttttttttttttataaattgttaattaggtttttaataggttattattttttttatatgttttaattgtatatgtaagtgtatagtattgtttattgtttaaaggtttaataataattttgtggtttatttggggtaaatgtaaaagtttttatttttattatatgcgtttttaattttatttgtgtttatgatttttgtttttatttttgttttgttttgttgttttattttattttttatttatgtaattttgttgtattttatgtatttttttgaatggttttaaattttttttaaatagtgtaggatataaatatagtgttatattgttatgttgattatattatttttataattttgagtattaggtaaagatttttattaaagatataagtaagttaaagattagaataatatagattttaaaaataagattttattattttattatattgtattttatttttttgttttattgatatgaaagtgtgaatataaaatatgatggatttaaaataaattagtttttgttatttttaatagtttttggttttttgaaagatattagttttgtatttgtgttattattatttttgttaagttgaatttggttgttttttttaagtttttttaatttttgatgaaatttatttggtttttttgtaagttgatatttatatatttttatttaagcggtgatatttttatttgaagtgattgttataatttgtatttttttgtttttcgtttttatgtagttattttattaatttgtttatattttgataatattaaagatttgtttttttgttgtagtttgttttatatgtatttatgggagtaataatatataatgataataataataattaatatttattaattattggttatttattaggaattgttaagtattttaaagaaattaagttatttaatttttataagaattttatgaagtagttattatttttgttatttttatattataataaaagatattgaggtttgtattatttgtttagttatatagtaggtaaggtgttaattagtagttttttttttataattgtatttttaattattattttatattgtagtatattattataggatatattattttattgttttttttagttttacgaagtgttttttttttatgagtttattttggaaaatttgtaatggttttttgttatagattatattatatttaatagtttttttttagtttttaag

SEQ ID NO: 257 - DNA, 6000 bp, Artificial Sequence
  chemically treated genomic DNA (Homo sapiens)
tttaaaagttaagaggaaattgttagatatgatatagtttgtggtagggagttattgtaggttttttaagatggatttataaggagaaaatatttcgtgggattggaaaaggtagtgaagtggtgtgttttatgataatgtattatagtgtaggatagtggttaagagtatagttatgagagagggattattggttagtattttatttgttgtgtgattgggtaaataatgtaaattttagtgttttttattgtaatatgggagtaataaaaatagtaattattttataggatttttgtaaagattaaatgatttaatttttttgaagtgtttggtagtttttgataaatgattagtagttaataaatgttagttgttattattattattatatattattatttttatagatatatatagaatagattgtagtagagaggtaaatttttaatgttgttagagtatagataagttggtgaaatggttatatgagagcggaggataagaaggtgtagattgtggtagttattttaaatggaaatattatcgtttgaatgaaggtatatgagtgttaatttgtaaggggattaggtaggttttattagaaattaaggaagtttaaggagaatagttaagtttagtttgatagaagtggtggtggtataaatgtaagattggtgttttttaagaaattaaggattgttgaaagtagtaagagttagtttgttttaggtttattatgttttatatttatatttttatgttagtggagtaaagaaatggaatataatataatagaatggtagaattttatttttaaaatttgtgttattttgatttttaatttatttatatttttgatagagatttttatttgatgtttaagattgtagaaatagtataattaatataatagtatagtattgtatttatattttgtattgtttagggagggtttaaggttatttaaaaggatatataaaatataataagattatataaatgaaaggtgagataaagtaataaagtaaaataaaagtgaaaatagagattataggtataaataagattaaaaacgtatgtaatgaagatgaaagtttttatatttattttagatggattatagggttgttgttaagtttttaaatagtgaataatgttgtatatttgtatatgtaattagaatatgtggaaaaaatagtggtttgttagaagtttaattaataatttgtgaaaaaaaaaaaaaaaaaaaaaaaaagaggtcgagttgtagtttacgtttgtaatttttgtattttgggaggtcgaggcgggcggattacgaggttaggagattaagattattttggttaatatagtgaaatttagtttttacgaaaaatataaaaaattagtcgggcgtggtggcgggagtttgtagttttagttatttgggaggttgaggtaggagaatggtgtgaattcgggaggcggagtttgtagtgagtcgagattttgttattgtattttagtttgggcgataaagtaagatttcgttttaaaaaagaaaaaagaaagaaaaataaaagaaaattttattgtattgtaaggttaagaataaaatatattaagataaggaaaatttgtagttaagaatagaaaaaaattatggttttgaagtatgagttatttaaagaaagtggaaatatttttagattatgtagtaaaaaataaagtgattttttttttttaaatttatgtaataaattgataggtaatatgtgaaagttatagaatgtagattagaggatataataaatttattttttttatgtttataagaagtaagaaaagttttgatgtgagttagtattgttttataattttgaattgtgtagattgtacgtatttttttttagtttgaagtaaatagtggataggaaaaaatattaaatgttggtagtaaatatggaaggaaattataattaatgtaatatgttaaaatatgttatgtttattttattaatttgaattaaaatgtaagaatttaaaatgttttggaaaaatacgggtattgatttgacgtttgaagttttaaaatattatatattttgaaatagtatttgtattttgaaatatttgtttttatatattttttaaaatttttttttttttttattttatttattattaaataaaggatgaatagatgtaatttagaaattgttaagtatgttgaagaaagattattgtagaaaaattttttttagtttttttaaaggtgttaggaagtagaaaggtgatatagaattggagaggtcggagtttttgtattaattgtattaaatgcgaatttcgagaaaattttttttaattacgttttgtagttatatggatatgaagatttatgtgaattttgaaagacgtgtttatataagttgaaatgtttttaatgatttagttgatgcgcgtttttttatttgttttttttagagaggtgtaacggaagttagaatattttttttggaaatttaatttgtttcgtagtttttcgaggaattagtatttagttaattcgggtcgggagtagttatttgtggtgaggttgattggttgggtaggaatagcgtcggggcgtgggttgagtatagtcgtttcgttttttttgttataggaagtttgagtttattcgagtagcggtttttttaagtttaaagaagtagaggtcgttgttcgttttttttaggtttttttattaaagtcggagtatttttttttaaaattttacgttttggtggtcgttttaaggagcgcgaggtaggggtacgtaaagttgggagttattatgggatagtttttaagtgttaggtttttagattttttgaatttggtttttacgggagaagggttttttgaggcgtggatagtgtgaagttttttggtaagtttatggggattaagtggggttagatttagatttaggagtttttggagtagcgtttaaatcgtagtggtattggattatgttgttcggagcgcgtatagttcgcgcggtgcggggatttgttttttgagttcgcgggcggtgggtgggaggaagtatcgttcgcggcgattggaatcgggagggagaatcgtattggcggcgggtaaagtttagaacgcgttgttagatttttaattttgttttcgtggagatgttggagatttcgcgtataggaaagtttttgtagtgtttatcgcggttagagtagttggggtattaacggcgggcgtttttttttattgttttttggtttcgacgggggattagaggttagttttatttttagcgcgtttgaggtttatgtatttggttaatgagttgcggtttttttttaggtcggaatggattttgaaggggatcgtaatggaggagtaaagaagaagaatttttttaaattgaataataaaaggtaattagtttgttttatttttatagtttatatagttgcgagatttgagtaatttatttttagtttttagttttgaaataaatgatatgttgttgtttttaattatttttaagaaacgtaagttagtttttggaattaatatttttgtttagagtagaagtttgttggttgagtggagtatagtatatgtattttttttgttttttttgtttttttttttaatgatatataatattttatatatttatgaaatggggtatatggaagcgttttttatatgttcggaatgtgtaatgattaagttcgggtatttgaaggatatattattttaggtatattttatttttatgtgttgataatattttaagttttttagttattttgaaatatataatatattgttaattgtagttattttcgtttgttatcgaatattggaatttatttgttttatttaatcgtttttagttatttattaatttttttttattttatttttttatttttttcggttttttttttttagttttggtgtgttttttttttagtttttttgttttagataggcggatgtttatatgtgtttttgttttatgaatttttgttttttaagtggtgttggtcgtttatacgtgagttatatgttgttggtgatttgttttgtggtttaggtttttgttttcggtaaatggttatgtaaatatcgcgtttgtggtttggttgatgagatagaaggttaaaagtatatttaggttgttaattggtaataaatatttgtatataatattggtaatgtaattatatagggaaaataattatttaaagtaaattttgattatggtgttttgtttttatagaatatttaaaattttattaaatagatttattgttagtagtaaattgtaaaatagattagtaagtttaataatattagaaattgtaatgtaaattataagataaattagtaaatatattaatattataagaaattaagttttttagtgtaagagaaaaaatataaatgtggaaattaaatatatttttaaaaataatgttaagtttgaattagaaattttaatatgaatttataattttttaatagtttatttttagtttattgaaagggatagtaataatgagtattgttagtattagatttgggtttttaaatattatttttttttaaaagaaatgaattttttagtagttaattttagttaggtttgggataggaaaaatagaaagtgagtttggagtattttgtggtatttgaaaataaggaagtggagtttaatggagtagtcgaaagtatattgaagttgtttggaagatgtttttaatggttaattttgggataatttgagtattaaagaatatcgtaattgtaattgattttgagatattgaatgttattgttgaatgtttaatattttgagagaagggaaattgaaagaaagtgtgagaggtagagaaaataaagtaatgatttttagagaaaaattttagttattattttggaatttttattgttataatagatttaggtaaggattgttaatgaattttaaattattagaaaaatgttgtatttaagaattttttttagaatgtttattaattggaaggagaatatgtttttttaattaaagattttgtagttagtattttaatcgagtgattagatttggtattttttacggtagaatggattgtagtaaatgatttattatttggattttgagtaaataatattatttagtaaatattaatatatttgtaaaaatatttagtttgtatataattaaatttgtagattggggttgtttaatggatatattatgtgagttatatttgtaatttaaaattttttagtagtaatagtaaaaaatgaaaataaaaagataaagtaattttgtaaatatattttatagaatttaatatgtttaaaagattggattttttatatgtaattaaaatgattaataagatagtttatatttttttttatgttaaattttttgtttgatgtgtattttatatttattgtattttttatttgtatttagtttgatataggtatatttaagatgtgggatattttgtaagatagttgtttttgtttttttataaaagttaatgttaaaaaaataaaaggaggatttttagattaatagagattaaagagatataattattaaacgtagtgtgtgaatattataaaataaaataaaaataatttaaaagtttaataaggaaaaaattttatggaaaatatttttgggagatttgaatgtgtattagatattagttaatattagaattgtaattattttttttagatgtgataatggtaggagaatatgtaattgtaattgaaaatttttgtaataaaaatgtttatataaattatgaaaaagattttatagagtggagggtaggtattttattttttgtttttaattttgtatttttgaaaatttgatagtttaaagaattatgtatttatgatataaatatttaggtagatttaattaagaaatattgagggtatgtgaagagaaatagt

SEQ ID NO: 258 - DNA, 6228 bp, Artificial Sequence
  chemically treated genomic DNA (Homo sapiens)
tttttttttttaaaagtttgaaataaaggaaattttttgtttttaggaatagttttaattagttatatatgtgaatatagatttagtgattgtttagataattttttattaatttaatgtcgggattttttcgatatattgatttttttttttttttttttttgtttattattagtataagtagtttaaaaaaaaaaaaaaaaaaaaaaaaaagtttagatatgatattagattttttaattagataggtaagatgttgataatttgtagcgtttgaaagtaaagagaaatgaaggattattgagggtggaataatggtttttttttaattagtttttggttggtaaaaaaaaaaaaaaaaaatagttttaaaaattagaattgtgttttgcgggggtggatttgttgaattgttagttttattagttaatgaggtagtttgttaaatggagatagaaagattatttataataatgttatgttttgtgtgtgatttaaaaattaaattgagtggaaatttagtaaatattaaattgtattgtttattttttaattaatttgttataaattataaaataaaattattgaatatattggataacgtatgtttttttgaagaaaaagtattaaaattatttttgagatgaaatcgatttagaggttgtttattttttttttattagagaaataagttgtagtttgaaagtttgaaaaaggtattgaaattttgggtgggatttttagaattagtgtgttgtataagttaataggtaatgttattttttttgtaagtttagcggagtattagggggtttgggattatatggttttattgttgatattgttcgtttttaatattaataggttagggatttaaggttttggggtagatgttatttaagtgaggatagaagtaaatattacgattgtttattgagttttttttttgtagagtataattagtataataggcgtttaaaatatataagtttagtttggtagaggggtaagagtagagaaggtgatttaaattttggtttagcgagggtttattttgtgatattgaggggaatttattgaaatttattgagatttattttttttatttggaaaataaaaaatatttgttttaaaaagggttagagtttatagtgaggtgttttatatatggtaaatagttaatgaaaattatatttgattagaatattgtagggtttataagaattaaattgatttattttaaaaattgaagttaagaaggtttaatgagtgattgtttttaattttatttagatttttcgtttttttttttattttaaggacgtaagttttagttttaatattgtttttttgggattattataatgtagtttttttgttttaattttaaaattttttgtttattttagtaagtttgttgtgagaagtatattattttgatgtgataataaatatgttaatgttaatagaaatttttattaagcgtttattatttatttagtgtttattatatattaggtattgtttttttgttgtattattttatttaatttttataatattattttgaagtaaattttattatttttattttataggaaaaaaaaataatattgaaaggataaataattgttagaggggtagaattatttgagttggatatattggttttagaattacgtttttaataattattttattttggttttgaagtatttttgtttcgtgttatatgaatttttttttgtgttatatgaatatatttagaggttgttatttagtgggtagagtttgggagtttttatttaatattggttattagggttaaggtgaggttatgaagtttatagttagtttattttagaatttaagttttttttatttttagttttaaggaattttaggtgttgagtatttttggattgttttttatgaagtatggggtagtttagatttttttaataatatgattttaattaatagttgttaaaattagtagtttagggtagaaattatattagtgttttttggtattgtgtatatttttagtttttatattagtgtttggtatataatagtgagatttgattggtgaataggtgattggataggtagatagataaatgggttaataaatggatggatggatgtatagttgtgaaagatgttgataataaagaagtgatatataatattttattattttttttattaggttatagttttttttataattttattattttggttatgttattttaaatagttatcgtaaaatttaaagttatttatataaaagaagtaaaatttggaagtatattagttagaatagtattaaatagtttttttaaaaaagtaagaaaaaaaattttatttatttaattaatatatatttagggtttattttttgttaggtatttttttaggagtttaaagtataattgttaataaaaatattttgtttttttggtgagtgtatgttaatgggggagatagataaaaataaatatttttatatgtaatgtattaagtcgtttaattgttatggagaaaaatttagtagagtgatatagttaaataatataggagtggaggttttgttatttaatattagatggttagttatttttaaattgagtaaaagttgtagtttatgttagaatgtgagaaaagaaaattaatattttttgggaagtagtaattgtaggaagataaggaattaggagatttggattagtattagagacgttttgtatagtaatttgataaaaagggagagattttttgtgatatatatattttttttatttttttttatagaattaatagttttgaaatttgaaggtgttagtgttttattggttttaaattgcgaagttgaacgacgaaagtattttttttgtaattagtgtagtaaaatgataggtagagaaattatgttgggaagaagtaaggttattagttgaattattttgattttggtttagaatatagtttagttttaatttttgtagtgtatttgttttttttattttggtttaagatttggagtgatgtgtttttgttttagagtatttttttttttgtgaggttcgaaatatgattattagcggttacgtatgttcggttttagtagtgaacggatatatgatttattatttagttatattttattcgttattttttttatttgttatcggaggattttttttgttttttttttatggtttttatggatattcgttttcgagtggatgtagtatttcgtcgtcggtaagtaagttttgttggaatttgtttttttttttttgggttgattggatgaagggatttgagaaaacggaatggttggtatttagggtaattttttattttattgggtgttggttttttttggttttgaattttatttttagttttgtggaaagagatatgatttgaaattagataagtggtaaattttagaatttaattcgtttaaagttgttttggtattttgttttgttttataaaatgtaaatataaaaagtgatgagtatgtgtggttaatatttgtgattaatatttaaagaaattggttatatgataaataatggaagtagtgaattaggagatgatattataaaaattattaatgataatattagagttaaaagttattttggttgtgagattttttttgaattttttatttgttttttgtgtataaatgatatttgtaattgtttttaattttttatagatttttgttattaatttatattatattaagtttttttagtgtttttggtattttttgtttttgtattagttattttttattttagatttttttttaaattttttgtataaggtattataaaataaaaatagttaaagttagaattttttaagattgatatgatttttatattgaaatatttatattgtgtaatttttagaaagttttgtttgtttaaagataaattgtggtagttagcgagtttttttatttgttaataataatttatttggtttagtatttggaggtgaaaaggtatatttatttaataataggtatttatagtatgttttttaagttttttttggtttatagagtaatagttttttgtaattttttttggtgattgttttgtattttgtttttttttaaggattttttttaaatattagtatggtattattgggatattattttaatttttttatattgtgtttttcgtgtttttagttattttttttattatatttttagtttatcgaaagtagggagtttgttttatttaagtagaattttcggtatattgtttttaaaaatagtaggggatgggtgtttggatggacgaatagattgatagataggtaaatagatgatagatttgtatttttgggatgttgattgtaattatagtattatattatttttgataaatagtgattcgatttgttgatgagtttttttttttgtgtttcgaatttttggtttgaatatttgatttttatgtttttggaattgtttaaaaatttttttttatgtttttgaagtttaaattgaaagttgaagtagttaaagcggcgtattgattatttagagaaatggatatagtattagtatttaaaatattttgttgatttaagtgttgttttaaattatgtttatttaatatgtaaatgatataatgaagttatttttagttaataaatgaggaggtttaaatgattgataaagttattaaaattttatttatgagtttttgtgtttaatttcgttgtttaattggtttgatagtatattttaataggttttttttttgagattagaagtatattttgtagatgtagttaagaagttgagatatgagtaggatttttatgttgaatgattaaatttggtagattgaaattttaaggtagtttgaaatttttaggtttttaaaagtaattttgggttttgggtttttttggttattgatttatttttatttatatttattttttttttttttttttttttttttttttttttttttttttttttttttttttttttttttttttttttttttttttttttttttttttttttttttatttatttatttatttatttatttttgagatggtatttcgttttgtcgtcgggttagagtgtagtggtgtgattttgatttattgtaatttttatttttcggttttaggtgttttttttattttaattttttgagtgattgggattataggtacgtattattatatttagttaatttttgtatttttagtagagacgtggatttattatgttggttagaatagtttcgattttttgattttatgatttagttattttagttttttaaagtgttaggattataggcgtgagttatcgtgttcggttttggttattattgattttaaggaaaatgtagagtatattaaatggaaaaatggttgagatatattatatttaagttttttttgtatttaaaatataaggtaattatttttattttatagttattaataaagtataagatgttattattgttagattaaattataatgtagttgttattttttagattaaaattggttatatagtggtaattgaatagatttaatttttgaaaagcgagggtttgaagtttaaaaaaagggtaaatagtggttgattttttttttgagggttttgtaaggagagtgttaagtaattgtattttaaaaggtgtttggagaaggggtagaaaaaggattaggtatagaaagtttaggttggaatattaaagattatttattttatattttaatattttgtattattattttttgttatagtcgaagtatatgaaagttgtttagatggaaatgattaaaagaagttataatgaatatgattttgttagttggtttttaaagaaggaattgtttttgttaaagttcgtgtttttaaaagtttttagaaaaggataaagatttaaaaattaattatagatttggttaaaaataaatttaaggtttttatttatgtattgagattagtaggaaggtagttaaattttgtaaagatttaataattagtaatatatatatttgggtggaaaagttgattaacgtggaataaaaagggagtaaatatgttggagaatgattttgtaaagagatttatgttattgaattgtaggatttattgatattttttttgtaatttgtatatgttttgattttgtagtt

SEQ ID NO: 259 - DNA, 6228 bp, Artificial Sequence
  chemically treated genomic DNA (Homo sapiens)
agttgtagaattaagatatgtatagattataaaagagatattagtaagttttatagtttaatgatatgaatttttttatagagttattttttaatatgtttgttttttttttattttacgttggttagtttttttatttaagtatgtgtgttgttagttattgagtttttatagaatttggttatttttttattaattttagtatatggataaaaattttaaatttatttttagttaagtttgtggttaatttttaagtttttgtttttttttaggaatttttgaaaatacgggttttaataaggataattttttttttgagggttaattaatagagttatatttattgtggttttttttaattatttttatttgagtagtttttatgtgtttcgattgtagtaagaaataataatataaggtattagggtatgaagtaagtaatttttgatgttttagtttgaattttttgtatttagttttttttttgttttttttttaaatattttttaaggtgtagttatttagtattttttttataaggtttttaagaaaaaagttagttattatttattttttttttgaattttaaattttcgttttttaaaggttgaatttatttaattgttattatataattagttttgatttagaaaatgataattgtattatagtttaatttaatagtaatggtattttgtattttattagtaattgtgaaataaaaataattattttgtattttgagtgtaaaagaggtttagatatgatatattttaattatttttttatttaatatgttttgtattttttttaaaattagtagtagttaagatcgggtacggtggtttacgtttataattttagtattttgggaggttgaggtggttggattatgaggttaagagatcgagattattttggttaatatggtgaatttacgtttttattaaaaatataaaaattagttgggtgtggtggtgcgtgtttgtagttttagttatttagagggttgaggtgggagaaatatttgaaatcgggaggtggaggttgtagtgagttaagattatattattgtattttggttcggcgatagagcgagatattattttaaaaataaataaataaataaataaataaggaaggaaggaaggaaggaaggaaggaaggaaggaaggaaggaaggaaggaaagaaagaaagaaagaaagaaagaaagaaagaaagaaagaaaagataaatataaataaaaataaattagtagttaaagaagtttaaagtttaaagttgtttttgggaatttagaggttttaggttgttttagagttttaatttgttaaatttgattatttagtatgggaattttatttatattttaattttttggttatatttataaaatatgtttttgattttaggaaagaaatttgttaaaatgtgttgttaggttagttgagtaacggaattagatatagaggtttataggtaaaattttaatggttttattaattatttagatttttttatttgttagttaaaagtaattttattatattatttgtatattgagtgaatatgatttgaaatagtatttgggttagtaagatattttgagtattggtattatgtttatttttttggatagttaatacgtcgttttggttgttttaatttttagtttgaattttagaagtatgggaggaggtttttaggtaattttagagatatgagggttaaatgtttaagttagaaattcgaaatatagaaggaaagatttattagtaaatcgagttattgtttattaggaatgatatagtattatgattgtaattaatattttaaaagtgtaagtttattatttgtttgtttatttgttagtttgttcgtttatttaaatatttattttttattatttttgaaggtaatgtatcggggattttatttaggtagaataagttttttgttttcggtgagttaaggatgtagtagaaggaatgattgaaggtacgaagagtataatatagaaagattaaggtggtattttaatgatattatgttaatatttgggggaagtttttgaagagaagtaaaatgtaaaataattattaggaagagttataaagaattgttgttttatgagttagaaaggatttggagaatatgttgtggatgtttgttgttaaataaatatgtttttttatttttagatgttaaattaagtaagttgttattaataggtggaaaagttcgttggttattatagtttgtttttaaataggtagaattttttaaaaattgtataatatagatgttttaatgtggaagttatattagttttggagaattttaattttgattatttttattttatagtattttatatagaaaatttaagggaagatttgggataagaaatagttagtatagaaataaaaggtgttaaggatattaaaaaagtttaatgtgatatgaattggtagtaaaggtttatgggaagttgagaataattatagatattatttgtatataggaaataagtaaaagatttagagaagattttataattaaaatagtttttaattttagtattattattagtgatttttatggtattattttttaatttattgtttttattatttattatatggttaatttttttagatattgattatagatattaattatatatgtttattattttttgtgtttgtattttatgaaatagagtaaaatattaaagtagttttgaacgggttgaattttaaaatttgttatttgtttagttttaaattatatttttttttatagaattaaaagtagaatttaagattaaaagaaattagtatttaatgaaataagaaattgttttggatattaattatttcgtttttttaggtttttttatttaattaatttagagaaaagagagtaaattttagtaggatttatttgtcggcgacggggtgttgtatttattcggaggcggatgtttatgaaggttatggaggggaggtagggaaagtttttcgatgataggtggaaagagtaacgggtagggtgtggttggatagtgagttatgtgttcgtttattgttgggatcggatatgcgtggtcgttggtggttatgtttcgggttttatagaaagaaaggtgttttggagtaggaatatattattttaggttttaaattaaagtgagggaggtaaatgtattgtaggagttgaggttgagttgtgttttgggttaaagttaagatggtttaattgatgattttgtttttttttagtatggtttttttgtttgttattttgttatattgattataggaaggatgttttcgtcgtttagtttcgtagtttaagattagtgagatattagtatttttaaattttagagttgttaattttgtaagaaaaaatgaaaaaaatatatatattataaaaaatttttttttttttattaagttattatataaaacgtttttaatattaatttaggttttttaattttttgtttttttatagttattgttttttaaagagtgttaattttttttttttatattttaatatagattataatttttatttaatttaaaaataattggttatttgatattaaatagtaaaatttttatttttgtgttatttgattatattattttgttaaatttttttttatggtagttaaacgatttgatatattatatgtgggagtgtttgtttttgtttgttttttttattagtatgtatttattaggagggtagagtgtttttgttaatagttatgttttaagtttttagaagagtatttgataagggatagattttgagtatgtattagttgaatgaatgaaatttttttttttgtttttttagggaaattatttaatgttattttaattgatatgtttttaaattttattttttttatatgagtaattttggattttacggtggttatttggagtgatatagttaagataataaaattatgggagaaattataatttaatgagagagatagtaaaatattatgtattatttttttattattaatattttttataattgtgtatttatttatttatttgttgatttatttgtttgtttgtttatttagttatttatttattaattaaattttattattatgtgttaggtattaatgtaagaattagagatatatatagtgttaaagaatattaatgtgatttttgttttgagttgttagttttaataattattgattgaggttatattgttaaagaagtttaaattgttttatgttttatgaaggataatttagagatgtttaatatttaggattttttgagattgggaatagaagaagtttaaattttagagtgggttggttgtaaattttatagttttattttggttttgataattaatattaagtagaagtttttaaattttgtttattgaatggtaatttttgaatgtatttatgtggtataaaaaaagatttatgtggtacgaaataagagtattttaaggttagaatagagtagttgttaagagcgtgattttagagttagtgtgtttagtttaaataattttgtttttttggtaattatttgtttttttaatgttattttttttttttgtaaaataagaataatagaatttattttagaatggtattgtgaggattaaatgaagtaatataatagagaaatagtgtttggtatatagtaaatattaggtaaatagtaaacgtttggtaagagtttttattaatattaatatatttgttattatattaaaataatatgttttttataataagtttgttggaatagataagaggttttggggttagggtagggagattatattatagtaattttaggaaaataatgttaggattaaagtttacgtttttgaagtaaggaagaaaacgagggatttgggtaaggttgagaataattatttattaagtttttttgattttagtttttgaagtgagttagtttgatttttataaattttataatgttttaattaaatataatttttattgattatttattatatgtgaggtattttattataagttttaattttttttaaggtagatattttttattttttagatgagaagagtaggttttagtgagttttaatgaattttttttaatgttatagagtaagttttcgttaagttagaatttgaattattttttttgtttttgtttttttgttaagttaagtttatatattttgaacgtttgttatgttggttgtattttatagaggaaaaatttagtgagtagtcgtgatatttgtttttgtttttatttagatgatatttgttttagggttttgaatttttggtttattaatattaaaaacgaatagtgttaatagtgagattatatggttttaggttttttagtatttcgttgaatttataaaggagatgatattgtttgttggtttatataatatattaattttaaaaattttatttaaaattttaatgttttttttaaatttttaaattataatttgtttttttgatgaaaagaaagtaaatagtttttgaatcggttttattttagagatgattttggtgttttttttttaaaaaagtatacgttatttaatatatttaatagttttattttgtagtttgtagtaaattaattagaaaataaataatataatttagtatttgttgagtttttatttaatttgatttttaaattatatataaagtatagtattgttataaatggtttttttatttttatttgataaattattttattaattggtggagttgatagtttagtaaatttattttcgtagggtataattttgatttttaaagttgttttttttttttttttttattaattagggattggttgggaaaaaattattattttatttttaataattttttatttttttttgtttttaaacgttgtagattgttagtattttgtttgtttggttgagaggtttggtattatgtttgggtttttttttttttttttttttttttttaaattgtttatattgataataggtaaaaaaaaaaaaaaaaaaaaattaatgtgtcgagaaaatttcgatattaggttggtggaaaattgtttgagtagttattgggtttatgtttatatatgtgattgattaaggttatttttggaagtagagaattttttttgttttaggtttttagaaaaaaaga

SEQ ID NO: 260 - DNA, 6190 bp, Artificial Sequence
  chemically treated genomic DNA (Homo sapiens)
ttaagtttttaagaagtgtaagtatttattgatgaagaaataattagtatgtggttaaattatgggtttgttttataaattaatatttggattaagtaatagttttaattattgttattagtataattaatttatgatgaggaatgattaattgattagcgaatattgttatattataagaaatttatattattttttttatggggatttaaatattgattatttattttaaggtttaagtttattttttagttgagaattttaaggtaattatatattttatatttttttgtataaagaaagaaaatatcgagtcgtttaatttttattatatatagagagagatatattaatgttgttatttttgtgtaatgatatagtatagaggtaagaaattcggaagtagtggtttcgtttaatgaggttgattttatagtttaagaaatgagaatgaatagaattttgaggatatttatttttatttttatttttttgggattagtgtatttttattttttggagagatgttaagtaagaatgtgtagtagttttttttggataatagatttttgtatatatatatttgttagtgatgttatgttttttatttttaatttaagttttttttgttttatttttaatatagttgttttttttttttttgtttaataattttttatttatttttattgttcggtaaaaatgaatttagtttttaaggaattttaaggattttaaataagtatttggagttataagttttatggattaagtagaaattggtatataatgtagtgttttgtgtatttttataattattttaatgatagtgtgttaaatgttttgtaaatttttttgtgtttttttgtttaaaatgtgtgttttttttgtagttaaagggttttttataataagtttttgttataaaatgatggttatataaaagagagaagagaggcgtaaaaataataaatatagatttagtaaaaattttatttttttattgttttgaattttttaatagtaagaattgagtttgttgggttgaaaattgttttaatgtatttttataaaaggatttttgatttggtaagtgtgtgcgatgtatattttttatgttatattataagtgttatttagtaattttattagatagggtagtgttttagtatggggtggggtgttttttgataggtttttaaaaggttcggatgttaatgtatattttaatattatttataaaaaggagattggagtagtgtttttttttgtattgggtaaggagattttttttttttgtttaattatttgtttgttttgttttgtgggagaattataagtaaatgttatagaggtagtggagaaaaaagggtgttttaatttttttttagagttttttttatttgatgtatgttgtattttttaaataagttgtgtaaaatggttgtagggtagattggtttttttttttaaagttttttattcggttgggtttatttgtaaatattgtatttattttttttagtgttttaggattggttggaaagatttttttttttgtaggttgggttagtgtgagagatttaaaaaattatttttttttaaaattattgtattttaataaaaggattgggtaggggttggaatgagagaaaattggttttttaaaatgtaaaattgttatatttaaattagtttataaaatatgcgtttaattatgtggtgggatgtgtgtaggtgtatgatgagagaggtaattaatatggttatttggggtgtaaggatgtgggaataggtaagtaatttttatattggatttttattttagggagttgggttttagttatagttttgagttgtgtgattttgggtaggttttattttttcggggttttgttttattagttgaatagtatgaggatgagttatagttaatatttgttttatgatatttatttagtattatataagtgttatttttgtttttttagttaatattgacgtgggtagtattatatgtttattttatagatgaggaaattgaagtttgaagaagttaaatatttattttagaatatatagttggtaagtggtagatttggaattggaatttagtttagtttgattttttaatttatgtttttgattattatattgtttttttaagtttagatttgaaattttattttttgtgtggttgtgtgtttgggataggggtaattaatttttgattattttatatgttgtatagaatttggagaggattttttaaagtaaatgaatttcgaaagttggattgtagagtaaacgagtgtagttaatttagttaggggtttgtaagagggagaaagagaaaaagattgtggaatggaaagttttttaatttaagttttttttaaggggtagttattttttgttttatagtttagggtttgtatgtgttttttttggagtggaaaaatatataagttataaggaatttaatagatagaaaggcgtatagaggaatttaaagtgtgggttggggggcgaggcggtgggcgggaggcgagcgggcgtaggcggaatatcgttttttaagttaagtcgtcgtaaataaaaaggcgtaaagggagagaagttggtgtttaacgtgagttaggagtagcgtttcggttttttttttgtttattttaaaagtattttttgtattgtttttaaggtgagaaataggaaagaaaacgtcggtttgtgcgttcgttgtttgtttttttggttgtttgtttttgtagggttgttgggagtttttaagttttgtgagaattttgggagttggtgatgttagattagttgggttatttgaaggttagtagttcgggtagggtttatcgaaagtttattcgtatatattaggtaatttaattttttattttgtgtgatagaagtagtaggaagtgagttgtttagaggtaggagggtttattttttgttaaaggggggattagaatttttttatgcgagttgtttgaggattgggatgtcgagaacgcgagcgattcgagtagggtttgtttgggtatcgtcggggtaggattcggaacgtattcggaaggttttttgtaagtatttatttggaaggagaatttgggatttttttgggaatttttcgtttcggttggattggtcgagtaagtttggaaaatggtaaatgattatttggattaattataggtttttagttggtttgtttgttataatttatgattcggggttgggaaaaagattaatagtttacgtgttaaaaaaggggtagagtttgatggagttgggtggatttttttatgttatttgtttttatatttagaggataagtatttttgtagatatttagtgtaagggagattatgtttgattgtatggatgttttgttagtgagttttgggtaaattttggatttttatattgcgagttcgtttttttgtatgttttaggagaaagtttttaaagtatgttttagtggattgatttaaatcgaatggtagtatcggtatattgtttaatgtaggtttatttttttttttttttttattaagaaaaaaaaaattgttttttttgtatgtaataaagacgttggaaataaattgtattggtagtaagataaaggatttaatgatttaatgttgaaggggtgtgatatgttggtatgtatattgattttttttgttgaaaattttttgttagatgttttttttttaaataatttttttcgtttttatgtttttttttttattaattttatagttttttgaaaatagtttttaaaatatgtataaaaatgtggggggtggggagtagagggtgattataagattttaaaatattttttaagtagggtaatttgatatattttgtagtttttattaaaatgtatgtagagtggaatttaattttgttgttttttggattagttattagttgtataggtttttttattttttgtgtattttaatagtttaaagtaattaaaatatgatattttttttgaaaggaatttagtttaattaaggtggttgttgttttcgaagtttataaattattagtttaagttgtcgtttttaatgttttttttgttaaggaaaggtaatattttttagtattgattttgttgttatttttttaagttattttgttggtttaagaagttgttgttttgttagaaaattattggtaatgaatattttttggattgagttatttattatttttatattttgtagtttagttcggaacgtggatattagttaaaggaaaggaaatataagtggggtagtttaatttaaaaaaaaaatattgattattttgttatttgatgttgatatagtgtcgaggtacgtatttggttaatagtagtttggttgtaggtttgagaaatgattaggagttttagaaaattttattttcgggtggttgtagtgggagtttgtaggatgtttcgtcgttttgatagtgatttagataaatggtttagttatttattaaaatgtttttagtattttatttgataatttattggagtattagtttgaaaatgatattttaaatttttgtttttaaagaggttaaagtttaattggaagaaattgagtttttttaataatatggtggtttatttaaagagagaagaaaaaggggagaggggataatgataggatttaaattgttttttttgaaatttttttttaagaataaagatttgttttttgggtcgggaaattaataggtttgtagttgaaaaattaataattatttgatgttaatagtttggttgtttgatttaatattttgtagagttataagtagggtaaaaagaatatcgtttttagaaggcgttttaatttttagttgttttttaaatgtttttttttttttggtgtttattttatttttggagaatttaaagaaattggagtgttataaaataattttttaatttaagaagagattttttagatttgttttttttgtagtaattaaaatagtatgaataatttttgttggaattttagggaattggggttttttgaaatttttttttgttagagaaagtggtaatgaaatatgttttttaatagaaggaaaaaatatgtttaggattttcgttaaaagttattagatttaatagagtttttatatgtagatatttttttttttgtaattaattttttaaagatgtttattaagttgtaagagtagggggaaaagttttgtttgtttttggataagttaaataagggatttgttttatttagggagagcgagcggtgaatgtgttattcgtttaaaattattcgataagtaagaagtgttgataatagtaaagtttagttaattaaagaaatttgtattagataaagtaaataaaggtatttgataaagggattttagaaattttagtgttttatttttgtaagtagggtaattagtttttattgtggttagttttataagagtttgaattttatattttaattttaggttaaatgaataaaatgtaaatattgtttgtgtttttgtagagttgttttatttttataaattattttatgatggttagttgttttaacgatttttttttttttttagtataaataaaattaaaatttttttttttttttttttttagagattttaataaatgttttgtgttatgtagtgtttggtttagggtggtatagttagttagggttattgaaataaaagtatattagggttatatttgtgtaagtaagaatataattataattttttttattttatttaatggttattttgacgagaagtagatttgtttttgtttttaatatagaggaaatagtgggtaaagaagaaaaagtattaaattttaattaaaattattttttgttttgagttttttttatggtgtgtgtgtgtatgtatagtaaataaagtaagatttttgaatatggagtatattattataagtttattttgaaaggtgttaaaatattttttttattttttttttaattttaaaggtagaaaaatgatatgttagttagttgttatttgtagtagtgtttgtgaattgttttttataagtatttaaagttaggattaggggattattaagggaatgtggtttaaatattacgattgacgattgtttttggaaggtataggagttattaaa

SEQ ID NO: 261 - DNA, 6190 bp, Artificial Sequence
  chemically treated genomic DNA (Homo sapiens)
tttagtgatttttatattttttaggggtagtcgttaatcgtaatatttagattatatttttttagtagttttttaattttgattttgaatgtttataagaagtaatttatagatattattataaatggtagttggttggtatattatttttttgtttttaaaattaaaaagaaaataaagggaatattttaatattttttaaagtgagtttgtgatggtgtgttttatgtttaaaggttttattttatttattatgtatatatatatatattataaaaaaaatttaaagtagaaaatagttttggttggaatttagtatttttttttttttgtttattgttttttttgtgttaaaagtaaaaatagatttgtttttcgttaaaatagttattaagtaaaatggaaaaggttgtggttatgtttttatttatataaatgtagttttaatatatttttattttaatagttttaattagttgtattattttgaattaaatattgtatggtataagatatttgttagaatttttaaaaaaaaaaaaaaaaaaaagttttagttttatttatgttaaaaaaaaaaaaaaatcgttggaataattgattattataaagtggtttatgagggtaaagtaattttgtaagggtataagtaatatttatattttatttatttaatttaaagttggggtgtgggatttaaatttttgtgaaattgattataataagaattaattgttttgtttataaaaataagatattggaatttttgaaatttttttgttaaatgtttttatttattttgtttaatgtaagtttttttgattagttaaattttgttgttattaatattttttgtttatcgggtagttttaggcgaatgatatatttatcgttcgttttttttagataaagtaaattttttgtttaatttgtttaagaataaataaagtttttttttttatttttataatttaataggtatttttggaaggttaattataaaaggaagaatgtttatatgtaaaaattttattaggtttaataatttttggcgaggattttgagtatattttttttttttgttaaaaaatatgttttattattattttttttaataagaaaaagttttagagagttttagttttttgggattttaatagaaattgtttatattgttttaattgttataaagaggataggtttgaaaagtttttttttggattagaaaattattttgtaatattttagtttttttgagttttttagaaataaaatgggtattaaaaaagaaaaggtatttggggagtagttgaagattaaggcgttttttgaaaacgatattttttttgttttgtttatggttttataaaatgttaagttagatagttaggttgttggtattaaatggttattgattttttagttataaatttgttgatttttcggtttaagaagtaagtttttatttttaagaaaaagttttagagagggtaatttaaattttgttattgttttttttttttttttttttttttttttagataagttattatgttattaggaaaatttaattttttttagttaaattttgatttttttgaaaataaagatttaaaatgttatttttaggttaatgttttaatgaattgttaaataaagtattaaaaatattttgatagatagttgagttatttatttaaattattgttagggcggcgaagtattttgtaggtttttattatagttattcgaaggtgggattttttgggatttttgattattttttaagtttgtagttaggttattgttgattaggtgcgtatttcggtattgtgttagtattagataataaaatagttaatattttttttttaaattgggttattttatttatatttttttttttttaattgatgtttacgtttcgggttgaattgtaagatatggaaataatggatggtttagtttaaggggtgtttattgttagtagttttttagtaaaatagtaattttttagattaataaagtgatttggaaaggtggtagtagggttaatgttaagaaatattgtttttttttagtaaggaaaatattggaagcggtagtttgaattggtggtttatgaatttcgggagtagtagttattttaattaaattaaattttttttaaggaaaatgttatattttaattattttggattgttggaatatataaggggtggggggatttatataattagtagttaatttaaagaatagtaaagttaaattttattttgtatatattttagtaaaaattgtaaaatgtgttaaattgttttatttgaagaatgttttaaagttttgtggttattttttattttttattttttatatttttatgtatattttaaaaattgtttttaagagattataaggttggtaaggagaggagtatgggggcgggaggggttatttgggaagaaaatatttaataggaaatttttagtaaagggaattaatatgtatgttagtatattatatttttttagtattaaattattaaattttttgttttgttattaatgtagtttatttttaacgtttttattgtatgtaagagagataatttttttttttttggtagaagaagggaaaaaaataaatttatattgagtagtgtgtcgatgttgttattcggtttgggttaatttattgaagtatgttttgagagtttttttttggagtatgtaggaagacggattcgtagtgtagaaatttaggatttgtttaggatttattgatagaatatttatatagttaaatatgattttttttgtattgaatgtttgtaaaagtgtttattttttaggtgtggaggtaaatggtatagaaaagtttatttaattttattaaattttgttttttttttggtacgtaggttgttggttttttttttagtttcgaattatgaattatgatagataagttagttaaaagtttgtaattgatttaaatgattatttattattttttaggtttgttcggttaatttagtcggggcggggggtttttagaaagattttaagttttttttttaagtaaatgtttgtaaaaagtttttcgaatgcgtttcggattttatttcgacggtgtttagataaattttgttcggatcgttcgcgttttcggtattttagtttttaaatagttcgtatgggggaattttggttttttttttggtaaagaatagatttttttgtttttgaatagtttattttttattatttttgttatatagaatgaaagattgaattgtttaatatatgcgagtgaattttcggtgaattttattcgggttgttaatttttaaatgatttaattagtttgatattattaatttttaggatttttatagagtttaaaaatttttagtagttttgtaaaagtagatagttagagaggtaggtagcgagcgtataagtcggcgtttttttttttattttttattttaaaaataatataagaagtgtttttaaaatgagtaggggaggagtcgggacgttgtttttggtttacgttgagtattaatttttttttttttacgtttttttatttgcggcggtttagtttggaaaacggtgtttcgtttgcgttcgttcgtttttcgtttatcgtttcgttttttagtttatattttaaatttttttgtgcgtttttttgtttgttaaattttttataatttatgtatttttttattttagaaaaagtatatgtaagttttaaattgtagaatagagaatggttattttttgggaaaggtttgggttgggaaattttttattttatagttttttttttttttttttttttgtaagtttttggttgaattgattgtattcgtttgttttgtaatttagttttcgagatttatttattttgaaaaattttttttaggttttatgtagtatatagagtagttaggaattggttatttttgttttaaatatatagttatatagaaaatgagattttagatttggatttgaaaaaatagtatagtggttaagagtatgggttggggaattaaattgaattagattttaattttaggtttgttatttattagttgtgtgttttgggataagtatttaatttttttaggttttagtttttttatttgtaaaatgggtatataatattatttacgttagtgttaattgggaggatagaaataatatttgtatggtgttgggtaaatattatggaataaatgttagttgtgatttatttttatattgtttaattggtgaaataaaatttcggggagatgagatttatttaaggttatatagtttagagttgtgattagaatttagttttttaggatgaaagtttaatgtgaaaattatttgtttgtttttatatttttgtattttaaatagttatgttggttgttttttttattatatatttatatatattttattatataattaaacgtatattttgtaaattggtttaagtatgatagttttatattttgaaggattagtttttttttattttagtttttgtttaatttttttattaaaatatagtaattttaagggaaaatgattttttagattttttatattgatttaatttataggaagaagagtttttttagttagttttaaaatattaagaaggatagatgtagtatttataaataaatttagtcggatggagagttttaaaagggagagttaatttattttgtagttattttgtataatttgtttaaaggatgtaatatatattaaataaaggaaattttggagaggaattaaaatatttttttttttttattgtttttgtagtatttatttgtaatttttttataaaatagggtaggtaagtggttaggtagggagggagagtttttttgtttaatgtagggaagagtattgttttagttttttttttgtggatagtgttggaatgtgtattggtattcgggttttttaaaagtttgttagggggtattttattttatgttgaaatattgttttgtttagtggagttgttaagtggtatttgtggtgtaatatgaaaagtatgtatcgtatatatttattaagttaaagatttttttatgaaggtatattaaaataatttttagtttagtaagtttagtttttgttattgaaaagtttagggtaataaaggggtgagatttttgttgaatttgtgtttgttatttttgcgtttttttttttttttttatatggttattattttgtaatagagatttattgtaagaaattttttaattataaagaaaatatatattttaagtaagagaatatagaggaatttataaaatatttaatatattgttattaaggtagttgtaaagatatataaagtattatattatgtgttaatttttatttggtttatgaggtttatggttttaaatgtttatttaaggtttttagagttttttggaaattgagtttatttttatcggatagtggaggtggatgaaaagttgttagataagagaagaggaaatagttatattggaagtagagtaggagaaatttaagttagagatgagaaatatggtattattgataggtatgtgtgtatagggatttgttatttaggggaggttgttgtatatttttgtttaatatttttttaaagagtagagatgtattggttttagggaagtgaagatggggatgggtgtttttaaaattttgtttatttttattttttaagttatggaattagttttattgagcgagattattgttttcgaattttttatttttatattgtattattgtataaaaataataatattagtgtgtttttttttgtgtgtggtaaaggttgggcgattcgatgttttttttttttgtgtaagaaaatgtaaaatatataattattttgaagtttttaattgagaaatgaatttgggttttgaaatgaataattagtatttaaatttttatgaaaggaatagtatgggttttttataatatgataatattcgttagttaattaattattttttattatgaattaattatgttgatagtaataattagagttattatttaatttaagtattaatttataaaatagatttatgatttagttatatgttaattatttttttattagtaaatgtttatattttttgaaaatttga

SEQ ID NO: 262 - DNA, 6244 bp, Artificial Sequence
  chemically treated genomic DNA (Homo sapiens)
gagaatgttggagagaaagtggttaagaaaattgtttttattgaattttttgggttaattttgattgtaagtttttgaataattaaagtttgtgaggagatagttaatttttttattttttttatgttaatagtgaataattgtagatttttttttttttttttttttttttttttgttttttttttttttttttttgaatatttttgtttttttttgggattggtttagagtatgggtggttattgttgatttataggaggtattattgttattaataaagggtaatagtttttttttttaatatttatttatatttagtatttatttttaatattgattatggagagagtttttttgtgtttaaatattgtaatattgggggttttttaaagtataaaaatatatatttgtatgatggtattattaatatttttatggttttttattttttttttgtattggttttaagagttatttataaattttttagtaattgtatagtgttttagggttagagatcggttatttttggtattgtgattagagttatttaatatttaaggtggtgattaatgtttggtaataaagtttttattgggtgttatgtgttttgggattttgagcgtgggtattttaggagtattttagtattgcgtgttagtattatggtcgagagaatagttgagaaagtggttaagaggtggatttatgtgaacgttattgggaaatgagagatttcgtttttaattacggttagtgtaattcgaaagtttaaaattagtttaaaataaaggtatttatttttattttatgtttatattttaggtttttaataatacgtattttttatatgtttatagaaagtagttaattgagttatttatggaaaggtttgtgggtttggttaacgaagtggaggagtattatattttagttggaaatatatttttagaatgttaaaatatttattttaaagtttggttttttggtgtaatcggaggtatggtaatgtttttgtttagagattgggggttagggttagtaaggtatttgatttatatgtattttagaaggtttttattgttaaattatattttttcggaaaaattatttatgttttattttgtaaatttgatatttatatatttttgattggtattttattttagtcgtaagattatgatttatagtaagtttgtttttttttttgtttggggtggtagtagaaagtatagggtattttttagtttttaagggtaggggtaaaggggttggggttttttttttttagtatagttttttttggttgtgttatattgttttttgtgagtagatagtaagtttttttttattttttattgttatttatttagcgttgtgtagtagtttagttgcgtgtttgtcgggaggggttgttaagtgttttgtttattggttgtttttcgaatttttgttattttacgtataaatatatttatatattttttttgtttagtttatatattgagttattcgtatatgcgagtatatttttttttttttttttattttttcggtttttgatttttataagtttatggaatatttttggaaagacgtttttgatttagtagggtaggtttgttttgatttttttttttgtagttttagtattttgagaaagtaatttatttttttggttagtgtttgtattttagtagggagatgaggattgttgttttttatgggggtatgtgtgtgtttttttttttttttaggatttgtaggattttttgtgttatttgtatataatttggtaggtttatattttttaagagttttatgaagtgttttttgtatgtgttttaaaaaggtatttgaaaattgaaagtgtgatttatggaaattaaattatttgtaaaaaattgttttggaaagtaatgattgttggttataaagggaaatatttgcgatgtatttaatgtgtttttaattttttatttgttgataatttatagttattaatgttaaattcgattttggttttagttatatttgtatattgtttaataatggtttatttttgtaagaattagataaaatgtatatttgatataaaatagttaaaaatgtaatttttagtaatagtaagtttggtatttagatagattatgaatatttcgttagatattttgttgggtgtttgggatagtaattaaaataaagtattgatagttgtattagagtttattaggttgtagtaaaggaagtttatttaaaagtataaattatttaagattatagacgtatgatatattttatttattttttgtttttttaatatgtatatatatatatatatatatatatatatatatatatgtgtgtgtgtatgtgcgtgtgtatgtttaatttttaatttagttaaaaatttttttttatttgttttttatttggatatttgattttgtatattttagtttaagtgaatcgagaagatcgagttgtaggattaaaggatagatatgtagaaatgtattttaaaaatttgttagttggattagatcgataatgtaatataattgttaaagttttggttcgtgatttgaggttatgtttggtatgaaaaggttatattttatatttagttttttgaagttttggttgtataattaatttgtggaaggtatgaatatttatgtgcgttttaattaaaggtttttttgaattattttttatatgagaatttttaatgggattaagtatagtattgtggtttaatataaatatataagttaggttgagagaattttagaaggttgtggaagggtttatttattttgggagtattttgtagaggaagaaattgaggttttggtaggttgtatttttttgatggtaaaatgtagttttttttatatgtatattttgaattttcgtttttttttttttagatgttttttgttagtttttttagttgttaaatatagttgtttgtggttggttgcgtatgtaatcgtatattttattttatttgttttatttcggttatagtgtagttttttttagggttattttatgtatatattacgtatttttagttaacgaggagggggaattaaatagaaagagagataaatagagatatatcggagtttggtacggggtatataaggtagtatattagagaaagtcggtttttggattcgtttttcgcgtttattttaagtttagttttttttgggttatttttagtagattttcgtgcgttttcgttttttggtcgtgaaatttagtttttatttagtagcgacgataagtaaagtaaagtttagggaagttgttttttgggatcgttttaaatcgagttgtgtttggagtgatgtttaagttaatgttagggtaaggtaatagtttttggtcgttttttagtatttttgtaatgtatatgagttcgggagattagtatttaaagttggaggttcgggagtttaggagttggcggagggcgttcgttttgggattgtatttgttttcgtcgggtcgttcggttttatcggattcgtaggttttcggggtagggtcggggttagagttcgcgtgtcggcgggatatgcgttgcgtcgtttttaatttcgggttgtgttttttttttaggtggttcgtcggtttttgagttttttgttttgcggggatacggtttgtattttgttcgcggttacggattatgattatgattttttatattaaagtatttgggatggttttattgtattagatttaagggaacgagttggagtttttgaatcgttcgtagtttaagatttttttggagcggtttttgggcgaggtgtatttggatagtagtaagttcgtcgtgtataattatttcgagggcgtcgtttacgagtttaacgtcgcggtcgtcgttaacgcgtaggtttacggttagatcggttttttttacggtttcgggtttgaggttgcggcgttcggttttaacggtttggggggtttttttttatttaatagcgtgttttcgagttcgttgatgttattgtattcgtcgtcgtagttgtcgttttttttgtagttttacggttagtaggtgttttattatttggagaacgagtttagcggttatacggtgcgcgaggtcggttcgtcggtattttataggtattcgcgttcgcgtcgttcgtcggggtggtcgtcgcgttcggtaggagggagggagggagggagggagaagggagagtttagggagttgcgggagtcgcgggacgcgcgattcgagggtgcgcgtagggagttcggggcgcgcggtttagttcgggggttttgcgtgtagttcgcgttgcgtttagagttaagttttttcgtcgggtagttgaaaaaaacgtattttttatttatttatcgttcgtgcgagaggtagattcgaaagttcgggttttttaataaaatatacgttggaaaattagataaagtagtagttatttgtgggggaaaatatttttaggtaaataaatacggggcgttttgagttatttgggaaggtttcgtttttggtatttaaagttgggggtgtttggagttagtagagtttagtagagttttatttatttttttaatgtttttgtttaatgtgttttttaaatttttttttatttagattatttgattggaaatatgttagttatgatgatgattttttgggaagcgatttttgttattcgttttttttttttttttattttacgttttggggttttagagagcgattgggagttgaatgggtttgatttcggagttagttggttgagttcgcgttggagcggattgttggtatgtgatttttgatagtcggaaatttgtaggtgtttcgcgagtttaaaataagttatatggaagtataagtgtttaaaaataattttttgttagtttagtgataagtttgttttattcggggagaatgtttcggagtggcgtgcgggttagttagggtttgcgtttcgtagttattgtggaaggagcgcggtcggtttaggatataggagattattttgtgattttaatggcgaaggttgtgtgtttttattttaatttttttttttataagaattgttttttttttttttttttttttttttatttttttttgtttagtttttttttttgttttttgttttttgtttttttgatgggtttgtagagggattaggtgggcgtttttggtgaatatttttttaggtggttataggataggtgtatttcggattgggtttggaagttttagggcgttatatggttgggttttgaattaggtattttttaattgtatattggtattcggattggtgtttttatatttttttgttttgtaagtcgtggattagtttttgtttagtattttgtttttagggatatttatagtagaaggaaggggattaaagtgtagtttggttttagaggatattgaagggtagattttgggggtatttagtgtgtatttttagtcgttttggagaaatttagagtattttatagttacgtagatttaagttgtttttatttaaaagataaataatgaataaaatttttaaaggttggtatattttaaattaattttatttgttttaatttagggttaaaatagagaaaaaggattttttttgtttatttttttttttttaaatggaagaataaagtatagcgattaagtttaattttatataatatttaaaattgtttgatgtgaaggaaggtattggtatgatgtgaattttataattttatgatggattttagaaattatttttttttttatttaatttttagtttttttattgtaaattaatgttgttgaattttaatgggtattaatgagattgttttttggtagattatttattgttttgttaataattataaagtgaatttggttaaatatagaggggatcgtattttatttaaaattgtttattattttagtgataagtggtattagtgtaatatgttttattttatattttttgtattatatgatatttaaatatttttagaataataaaaaaagagataaggaatttaaaaattaaaaaaaaaatttgtataaatgggattttgtgtggaaatttagttttagaatgattttttttgtgttttatttttcggattatttttttttttttgttagaattttgtttgttattatttagtaaggaaaagaagtatttatgtaagttttttatatggataga

SEQ ID NO: 263 - DNA, 6244 bp, Artificial Sequence
  chemically treated genomic DNA (Homo sapiens)
tttgtttatatgaagaatttgtatagatgttttttttttttgttggataataataggtagaattttaataaaagaggaaagataattcgggaaataaaatataggaaaaattattttaaaattgaatttttatatagagttttatttgtgtaagttttttttttaatttttaagttttttgtttttttttttattattttaagagtgtttgaatattatgtaatgtagaaagtgtaagatagggtatattatattgatattatttattattgggatgatgaataattttgaataagatgcgattttttttgtatttgattaggtttattttgtaattattagtaaggtagtaaataatttattaaggagtagttttattagtgtttattgaaatttagtagtattaatttgtaataaaagaattgaaaattaaatagggaagaaaatggtttttggagtttattataaggttatggaatttatattatattagtgtttttttttatattaagtagttttaaatgttgtgtggaattagatttaatcgttgtattttgtttttttatttaaaaaaaaaaaggtgggtagaagaaattttttttttttgttttaattttaaattaaaataagtaaaattaatttgaaatatgttaatttttaaaagttttgtttattgtttgttttttgagtaaagatagtttggatttgcgtggttgtgggatgttttaaatttttttaaggcggttgaagatgtatattgaatatttttagaatttgttttttagtattttttggggttaaattgtattttagtttttttttttttgttataaatatttttggaaatagaatattgaataaaaattggtttacggtttataaggtagaaagatatagggatattagttcggatattagtgtatagttgggaaatgtttaatttaggatttagttatgtggcgttttgaagtttttaaatttagttcggggtatatttgttttgtggttatttaggaaggtgtttattagaagcgtttatttaatttttttgtaggtttattaggaaaataaaaaataaaaaataaaaggagaaattgggtaagagaaaatgggagggagaggagagggagaaagaataatttttgtagggaaaaaaattaaaatgaggatatataattttcgttattgaagttataaagtggttttttgtgttttggatcggtcgcgttttttttatagtggttgcgaggcgtagattttggttgattcgtacgttatttcggggtatttttttcgggtgggataggtttgttattgggttggtaggagattatttttaagtatttgtgtttttatatggtttgttttaaattcgcgggatatttataaattttcggttgttagaagttatatgttagtaattcgttttagcgcggatttagttagttaatttcgaaattagatttatttaatttttaatcgttttttaaagttttaggacgtggggtggggaggaggggaaagcgggtgataggaatcgttttttagaaagttattattatagttgatatatttttaattaaatagtttagatgaaaggaaatttggggagtatattaaataaaaatattaaaaggataaataaaattttgttgagttttgttaattttaaatatttttaattttaaatgttaagagcgagatttttttaagtgatttaaagcgtttcgtgtttatttgtttggaggtgtttttttttataaataattgttgttttgtttggttttttaacgtgtgttttgttaggaagttcgggttttcgggtttgtttttcgtacggacggtaagtgggtggagagtacgttttttttagttgttcggcgagagaatttgattttgaacgtagcgcgggttgtacgtagaattttcgggttgggtcgcgcgtttcgggttttttgcgcgtattttcgggtcgcgcgtttcgcggttttcgtagttttttaggttttttttttttttttttttttttttttttttttgtcgggcgcggcggttatttcgacgggcggcgcgggcgcgggtatttgtagaatgtcggcgggtcggtttcgcgtatcgtgtagtcgttgggttcgttttttaggtagtagggtatttgttggtcgtggggttgtaggaaaggcgatagttgcggcggcgggtgtagtagtattagcgggttcggagatacgttgttgagtggggggaaattttttaggtcgttggagtcgaacgtcgtagttttagattcggggtcgtaggggaggtcggtttgatcgtagatttgcgcgttggcggcggtcgcggcgttgaattcgtaggcggcgttttcggggtagttgtatacggcgggtttgttgttgtttaggtatatttcgtttaggggtcgttttagggggattttgagttgcggacggtttaggggttttagttcgtttttttggatttgatgtagtagggttattttagatgttttggtgtggagggttatggttatggttcgtggtcgcgggtagggtgtagatcgtgttttcgtagggtagaaggtttagaaatcggcgggttatttggaaaaagagtatagttcgaggttagaggcgacgtagcgtatgtttcgtcgatacgcgagttttggtttcggttttgtttcgggagtttgcgggttcggtgaagtcgggcgattcgacgggagtaagtgtagttttaggacgaacgtttttcgttagtttttgggttttcgggtttttaattttaagtattggtttttcgagtttatatgtattataaaggtgttggaggacggttagggattgttgttttgttttgatattggtttaaatattattttaggtataattcgatttggagcgattttaaagagtagtttttttgaattttattttatttgtcgtcgttgttggatagaggttgagttttacggttagggggcgggggcgtacgaggatttgttaaaggtggtttagggaagattgggtttaaaataaacgcgaaagacggatttaggggtcggttttttttaatgtgttgttttatgtgtttcgtgttagatttcgatatatttttgtttgtttttttttttgtttgatttttttttttcgttggttagaaatacgtagtgtgtatataggatgattttggggaggattatattgtaatcgagatagggtagatagaatggggtgtgcggttgtatacgtagttagttatagatagttatatttagtagttgggggaattgatagggggtatttgaggggaagggggcggagatttagggtatatatataggaagagttgtattttgttattaggagaatgtaatttgttaggattttagtttttttttttgtaaaatgtttttaaagtagatagatttttttataattttttgagatttttttagtttgatttgtgtgtttatgttggattatagtattgtatttggttttattaggaatttttatgtgaaggatgatttagaaaaatttttggttagggcgtatatgggtgtttatgttttttataggttggttatgtaattaaaattttagaaaattgaatataaaatgtgatttttttatattaaatataattttaggttacgaattaaagttttggtaattatgttatattgtcggtttggtttagttaatagatttttaaaatgtatttttgtatgtttattttttagttttataattcgattttttcggtttatttgggttaggatatgtagaattaaatatttagatgaaaaataaatagaaaaaagtttttaattgaattaaaagttaaatatgtatacgtatatatatatatatatatatgtgtatatatatatatatatatatatatatatatattaaggagataaaaaataggtgaagtatattatgcgtttataattttggatagtttatatttttgaataaattttttttgttgtagtttaatagattttgatataattattaatattttgttttaattgttattttaaatatttaatagagtatttgacgaagtgtttatggtttatttaaatgttaagtttattgttattaagagttatatttttgattattttatattaagtatatattttatttaatttttataaaaatagattattgttggataatatgtaaatgtagttgaagttaaaatcgagtttagtattaatgattatagattgttagtaaataaagggttaaaaatatattaggtgtatcgtagatatttttttttatggttagtaattattattttttaaagtaattttttatagatgatttaatttttataaattatatttttaatttttaaatgtttttttaaaatatatgtaaaaagtattttatagggtttttaaaaaatgtgaatttgttaaattatatgtaaatggtataaagaattttataagttttgaaagaaaaaggagatatatatatatttttatggagaatagtaatttttatttttttgttaggatatagatattagttagaaaggtaagttgtttttttaaaatgttaaagttatagagagagaaattaaaataagtttattttgttggattaagaacgtttttttagaaatgttttatgggtttgtagaagttaagggtcgagagagtgagaaggaaggaaggaatgtgttcgtatgtgcgagtggtttagtgtgtgaattaggtagagagagtgtgtggatgtgtttgtgcgtggaatggtagggattcgggaagtagttagtaggtagggtatttggtagtttttttcggtagatacgtagttgggttattgtatagcgttggatgaatggtagtggggagtgaggggagatttgttgtttgtttatagggagtagtgtggtatagttagagaaagttgtattggggaggagaaattttagtttttttgtttttatttttggaggttggaaagtattttatgttttttgttgttattttaagtaagaggaaaaataggtttgttgtgaattatagttttacggttaaaatagaatgttagttaaaagtgtatggatattaagtttataaaataggatatgggtggttttttcgaaagaatataatttaataataaaagttttttgggatatatgtggattaaatgttttattggttttagtttttagtttttgaatagaggtattgttatgttttcgattgtattaggaaattagattttggaataaatgttttggtattttagggatgtgtttttagttgaaatgtaatatttttttatttcgttaattaaatttataaatttttttatgaatagtttagttgattgttttttgtaaatatgtgaaaaatacgtattattaaaagtttaggatatgaatataagataaaggtagatatttttgttttaaattgattttaggttttcgagttgtattgatcgtgattgggaacgaggttttttattttttagtggcgtttatatggatttattttttgattatttttttaattattttttcggttatagtattaatacgtaatattgaggtgtttttagagtgtttacgtttagggttttaggatatatgatatttaatggaggttttgttgttagatattagttattattttggatattaaatgattttaattataatgttaggagtggtcggtttttggttttgggatattatgtagttattgagagatttatgagtggtttttgagattagtataaaaaagaaatagaaagttataaaaatgttaatgatgttattatgtaaatatatgtttttgtgttttgaaagatttttagtattgtagtgtttgagtataggagagttttttttatagttagtattgaaaataaatattggatataaataaatattgaaaagaaagattgttattttttgttggtgatagtggtgttttttgtaggttaataatggttatttatgttttagattagttttagaaaaaagtaagagtatttagggagggaggagagaggaataggggaaaggagaaggaaaggaaaggggatttgtaattgtttattattgatataggaagaataagaaggttagttgtttttttataggttttgattgtttagagatttataattaaagttagtttaagaagtttagtaaaggtagtttttttaattattttttttttagtattttt

SEQ ID NO: 264 - DNA, 6199 bp, Artificial Sequence
  chemically treated genomic DNA (Homo sapiens)
tagtatttttggttttttgggttagtatgtttaggttattttattattttttggataatttgataggatgaaaagtgttggttttagaattatgttaattttggtgtaaatttttatttagatatttaattggttgagggatatttggggttagttatttaggtataaagatttttatgtgtaaattgggaataaatttattttttttggaaggttattgtagaatatatgaaatagtatgtcgtttttatgaaggaaggtattatgcgtggtttatggttagtatttagtatattgttagttttatagtagatgtttaagaaatattggttgtataagtagaggatttaatatagtgtttagtatttaataggtatttaataaagattaatttttttttttttttttgtagggatgttaaatttagaatatagttttgagtagaatagtttataatttttatttttaaggattttttagtcgtagtttttaggataattattcgatgttattatagtagttagtcggtgtagtttggaataggataatatttgagaggaagggggcgggtattttttatttaggtttaaaggattttgagttaaatgttttttattttttggttttagggagagaatgtgtgtttagaaatggttttgatataattggtttttttatatatattttttttgtttattaagaggaagtgatatgtggtatgttgtttaataggttttgatgatttttaagtaaagagatggaagatggaattttaattttatggagatttaataaatttatttagagttgttgtgtttaagattttttttatatgtattattgggtagttggtaattttttggtaggggtagttttttgtagaggttggttagtagattaggtattttttttagattgttttttgtttatagttggtaataatttatttggtattaggattattggttaaagataatagttaggtaaagtgggtaagtagttttaatttttatttggagatgttttagagggtgtgtttgtagtattggaattttgttttttttgtaattagttgaataaatatttgttttaaaagagaattaaagtaggagggaataggagaggttattgtataaattaataggaattatttaattatttatttttttagagagtttatttatagaatggtttttaagtttagttagttagtttaagagaatttattatttttattttttttgattttattttagttatttgatttttattgatttgatttttttgttttttataagagttggtatagacgagttgaaattgtaaagaaatgtaaaatgagagagggggtggggttttagggtaaatttaggaggttttttgtttagtggtaaagtgaagtgtttgttatattttaggtttagtttatagatagttgtatttttgatatttttgagtttatggtgtatgtttttttttattttagtttttttaatggatgatttattttttatagtttgatgtttttttgtatattttgaggggatagaatattttttataaaatttgtattttcgttaggtagggagataagtaagaaaataggattgaatttattgaagagtaaaatttgtttatagtgattattggtaaagaagtttttattattattttattttggtttagtgatgggtaggagaattttttttttttggaaagggaatttgttggtgttagttattgtgtttatattatcgttaagatttataatatattgtaaggtaaggagagtttgttatattttttagtgaaagaaattaagttttaagaaagtaatttagtttgtttaaggttatatagttagttatatgatagaattggaatttatatttgtatgtgaagtttgttattaaattttaatgttttatagagttttaaagattaggtttttgttttgttagtaaatagtgtttgaagaggtttttgggttttggtcggaaagtaataggtagagtagttggagttttttaatcgattttaggtaatgaggtgtaaagttttttggtttaatgtgtgatatagtaagtgttttataaataaggtaattatgtagaaagtcgtatattttgggggaaatgaatttagggggcgtagtgtaaatataatttgtatagtttatattgttttaaaatttgataatttttagttatttaatttagtgggaatttttgtttatggttatgttttagtttgagaggagagtgttatatacgtaaattttgaaataaagggaatttgatttgggggagagaagtttaggataggattgagattttttggggggaatagatggagaggtttgtgggttattgatgtttattattttttttaggtattatatttattatttttttgtgtgtgaattattgtataaggtaagggaaatatcgaattaattttttatttttataggtttgggatttaatgaatatataggttatagttttttttgttgagaaattggaatataagtatggaatagtggagttatgggggtgattagggtgaaagatgtttgatttttgaagtatagggttatttgtatttttaaggagttaattttttgtggtgaaatgaggttagttaggtttttttaattattaacgtttttaataattatttaatataatagaaagagatatagaagaagggttgttggggatttttgattagaggttaaagaaaagggatatataaggggtttggtttttatttagtcgtcgtttttttggatttaaggttttaggtggttatttaggtaagtggttatttaagttgcgattcgatttattaatatttgtatttttttgtttacgttttttacgtatagtgtttcgtcgaaggagaaaaaggttataatgcgattttagtttattttatttcggaagagtttatttattatttgtttaaagttttgatatgttgtttttggggtgatgtggagttgggatgttaggttattgaatgttcgtcggtatcgtagtttaaattcgtcgtttgttttttttagcgtttgttttattgttgttatggggattatttttcgggtatttaaattgttgttgtggttagtggttttatttatcgcggggttgtttgttaggtgttaggatgggttgttattgatggtattgggggtttttattttcgatttagttttttttggggttttagttttgtttttttttatattattaaattgattttagttgtattttttttgggaaagtttgtaggagagaaagttaattattagttttcggttgttttgagatatttttataatagggatgggtttaattagtttattgtttaaaatatttgtttatttattgagtttcgtttttggttagtgatttttttttaagatttaaagttaagataagattttgaagggagagaaagagttttaggaaaaaaaaataattaatatgtatgttatttattttaaaaattttattttttttttaggtattagaattggtttttttgtgggttttacgaaggtttgggtttaggttttaagatattttatttaagttaaatcgaaagtattagtggattttgaattttttattagttttttttattttcgtttttttcgaaatgtttttttcggaaagttattttttgggtagtttttttcgttttattttcgttttttcgtattatttatatttaaattcgttttaggtaaaggtaggtaggtgtagttttcggaagattttttgtattataggtcgggagaggaggtggttgcggggatgtcggtaatttagtcggtttcgcggtggttggtaaaaaaattagtttcggtcggagggattatgcgattcggtaggttgggagtttagaaggcgatataggaattgcgaagtttaggaattagttttttcgtttgtttttttttttatcgttcggatcgagggcggtcgtttcgtagtcgcggttttttgttattcgggagtttagtttttttttttttgtacgttttttggtttttcgttttttattgggagttaggagtattttttcggaggtggttggtatggatttagttggtttttgttttttttttttttatttaagtattagtttagggtgaggtggaggcgttcgaaattttaaagggattttttaatggggtttaaggttttagtgagggacgtagggagggggaaattgttttagatttgtaatttgattttgggaaggttatttttaggtttgtttgtgatgttgaaggtcggagatttttaataaatgtcgttggtttgttttgaattttttaaaggtttagaacgtggtagttggggattgtcgggttttttatttttcgttcggatataatggtcgtcggcgttttgtataaagattgggtgagggtgaggcgttgggtttttttttaggttaggaagaggggtcgaggtttgttcgacggttttatagttgagattacgtttttttggggataggtttaaagtggttttttggcgttttcgggagggtttcggggtcgggggttgtattttttcggagtttagggtgggtcggttgcggtttagcggtttttcgagtttattaggtcgggtattcgtcgagttatcgtttcgttgttaggtaatcgttttttttcgggggcgttttttagatttttttgagaggaggggtttcgttttcggcggttcgttttagcgtagttaattagcgagtttagtcggtacggaagcgggacggcgaaggtttttattgggcgtaacggttgttacgtataggggaggcggcgtttttatttgcgagtttcgcgagtcgtggggggttatatttttttttatcggttcggtagtttttagacgtaagagtttttcgcggtcgagtttcgcgtcgcggattcgggtcggtttatttggttgtcggtttatttggttgattgttcgcgtcgtttttttcgaataagtcggttttagttttttttgaagagataggggaatttgtaagtttagttattttcggtgtcgcggtaacgcgcgcgagttcgagacgtaaagggagtgcgcgttttgagtgattggtattaggatcggggagagatcgttttttcgcggtagatttggggaatcgggaggcgtaaaaaattaatatttataattatatttttatttatttatttagttagttagttagttatttattagttaattagtttattttattcgttcgttagtttatatatagaagaagtatcgttttgtggttaagtattttgtttggattttaattttgttagttaggtaagttttttaattgttttgtgttttaatgtttttaattgtaaaatgggtaatagtattaatttttttcgttgagttattgtgatgattaagagagttattaattgtaaattttataggataggtcgggcgcggtggtttacgttcgtaattttagtattttgggaggtcgaggcgggcggattatttgaggttaggagtttaagattagcgtggttaatgtggtgaaatttcgtttttattaaaaatataaaaaattagttgggcgtggtggcgtatgtttgtaattttagttattcgggaggttgaggtagtagattcgtttataggagaatcgtttataggcgtgagttatcgcgtttcgttaatttttttatattttgaattatatagtgtgttattaaatgttttatttttgttaattagatgggtaaaaatcgaaggtatttttatatttttttttttattatgaatgaagttgagtaatttgttatattttttagtttttttttggagggtggtggattttgtattggtgaattttttttatattgtttattttttttttaggtggtttttttgttgaattttttttttatttttttttttttttttgttattgttgtttgttcgagatggagttttgttttgttgtataggttggagtgtagtggtgttattttggtttattgtaaattttgttcgttaggtttaagtgattgttttgttttagtttttttagtatttgggattataggtatatattattacgttcggttaatttttgtatttttagtagagatagggttttattattttggttaggttggttttaaattgttgatttt

SEQ ID NO: 265 - DNA, 6199 bp, Artificial Sequence
  chemically treated genomic DNA (Homo sapiens)
gaggttagtagtttgagattagtttggttaaaatggtgaaattttgtttttattaaaaatataaaaattagtcgggcgtggtggtgtgtatttgtagttttagatattagggaggttgaggtaggataattatttgaatttggcgggtagagtttatagtgagttaagatagtattattgtattttagtttgtgtaatagagtaagattttatttcgaataaataataataataaaaaaaaaaaaaaaaatgaggaaagagtttaatagaaagattatttgaaaaaggggtaaataatatgaagaaaatttattaatataagatttattattttttaaagaaagattaaaaaatatgataaattgtttaattttatttataataaaaaaagaaatatgaaagtgttttcggtttttatttatttaattggtaaggataaaatatttgataatatattgtgtggtttagggtgtaaggaaattggcggggcgcggtggtttacgtttgtaaacgatttttttgtaagcgagtttgttgttttagtttttcgagtagttgggattataggtatgcgttattacgtttagttaattttttgtatttttagtagagacggggttttattatattggttacgttggttttgaatttttaattttaggtgattcgttcgtttcggttttttaaagtgttgggattacgggcgtgagttatcgcgttcggtttgttttatggagtttataattaataatttttttaattattataatagtttaacgagagaggttggtattattatttattttataattgaggatattgaagtatagagtagttgagaaatttgtttaattagtagagttagaatttagataaagtgtttaattataaggcgatgttttttttatatataaattgacggacggatgaaataggttgattgattgatgagtgattgattgattgattgaatgaataaatggaaatgtgattataaatgttgattttttgcgtttttcgattttttagatttatcgcgagggggcgattttttttcggttttgatgttagttatttaaggcgcgtattttttttgcgtttcgggttcgcgcgcgttgtcgcggtatcggaagtgattgagtttgtaagtttttttgtttttttaggggaaattgaggtcggtttgttcgggagagacggcgcgagtagttagttaggtaggtcggtagttaggtaggtcggttcgggttcgcggcgcggaattcggtcgcgaagagtttttgcgtttggaagttatcgggtcgatgaagggggatgtggttttttacggttcgcggggttcgtaggtgagagcgtcgttttttttgtgcgtgatagtcgttgcgtttaataggagttttcgtcgtttcgttttcgtgtcggttgggttcgttgattggttgcgttggggcggatcgtcgggggcgaggtttttttttttaggaaggtttagggggcgttttcgggggagggcggttgtttagtaacggggcggtggttcggcgggtattcggtttagtgagttcgagaagtcgttaggtcgtagtcggtttattttgggtttcggagaggtgtagttttcggtttcggagttttttcgggggcgttagaaagttattttgggtttgtttttaggaaaacgtggttttagttgtggggtcgtcgagtaggtttcgatttttttttttgatttgaggagaggtttagcgttttatttttatttagtttttgtgtagggcgtcggcggttattgtgttcgggcggggaatggaggattcggtaatttttaattgttacgttttgggtttttggggaatttagagtaaattagcggtatttgttgggggttttcggtttttaatattatagataggtttgggggtggtttttttaaagttagattgtagatttgaggtagtttttttttttttgcgttttttattgaaattttgaattttattgagaagtttttttagggtttcggacgtttttattttattttgggttggtgtttaaatagaaaaaagaaaaataaaaattaattaaatttatattagttattttcgggagagtatttttggtttttagtaggaggcggagagttaaggggcgtgtaagagagagggggttgggttttcgggtggtaggaggtcgcggttgcggagcggtcgttttcgattcgggcgatggaggaggaagtaagcgagggggttggtttttgagtttcgtaatttttgtgtcgttttttgggtttttagtttgtcgggtcgtatgattttttcggtcggagttggtttttttgttagttatcgcgaggtcggttgagttatcggtattttcgtagttattttttttttcgatttgtgatataaaagatttttcgggggttgtatttgtttgtttttgtttaaggcggatttgaatgtaggtggtgcgggggagcgggagtggggcgggggggattgtttagggagtgatttttcgaggaaggtatttcggagaagacgggggtagaaaaggttggtgggagatttagagtttattggtgttttcgatttgatttaagtgaagtattttggaatttagatttagattttcgtaagatttataaagaaattagttttggtatttggagggggaatggaatttttagggtaaatggtatgtatattaattattttttttttttgaagttttttttttttttttagaattttattttggttttggattttagaagagaattattaattagagacgagatttagtgagtgagtaggtgttttggataatggattggttgagtttatttttattataaaaatgttttagagtaatcgggagttggtggttgatttttttttttataagtttttttagaaaggatatagttggagttagtttagtgatgtggaagagaataggattgaggttttagaagggattgaatcggagatggagatttttagtgttattaatggtaatttattttggtatttggtagatagtttcgcggtgaatggagttattggttatagtagtagtttggatgttcgggaggtgatttttatggtagtagtaaagtaagcgttgagggaggtaggcgacgagtttgaattgcggtatcggcgggtatttagtgatttgatattttagttttatattattttagggatagtatattagagttttgaataggtagtgaatgaattttttcgggatggggtaaattggggtcgtattgtggtttttttttttttcggcggggtattgtgcgtggaaagcgtagataaggagatgtaggtattggtgagtcggatcgtagtttggatggttatttatttgaatgattatttagagttttggatttaggagaacggcggttgggtaagaattaagttttttgtgtgttttttttttttggtttttggttagagatttttaatagttttttttttgtatttttttttgttgtgttgggtgattgttggagacgttgatagttgaggaaatttgattggttttattttattataagaggttaattttttggaaatataaatgattttgtgttttagagattaggtattttttattttggttatttttatgattttattattttatatttgtgttttagttttttagtaaagaaaattgtagtttatgtgtttattaagttttaaatttgtgagggtaggaagttagttcggtgttttttttattttatataatggtttatatataaaggggtgatgagtataatgtttggagaagatgatgagtattaatgatttatagatttttttatttgttttttttaaggggttttagttttattttgggttttttttttttaaattaagttttttttattttaaagtttgcgtgtatggtattttttttttagattagggtatggttataggtaggagtttttattgggttgaatggttgagaattgttagattttggggtagtgtaggttgtgtagattgtgtttgtattgcgttttttaagtttattttttttaaagtgtgcgattttttgtatggttgttttgtttgtggagtatttgttgtgttatatattaagttaggggattttgtattttattgtttggggtcggttggggagttttagttgttttgtttgttatttttcggttagagtttaggggtttttttaagtattgtttgttggtaaagtaagaatttagtttttggggttttgtgggatattgagatttagtaatagattttatatgtaggtataagttttagttttgttatgtaattagttgtgtgattttggataggttgggttatttttttgaggtttagttttttttattaaaaaatgtggtaagttttttttgttttatagtgtattgtaaattttggcgataatgtgagtatagtgattgatattagtaaattttttttttagggagggagagtttttttgtttattattgagttaggatgagatggtggtgaaagtttttttattagtggttattgtaggtaagttttgttttttagtgaatttagttttgtttttttgtttatttttttatttagcggaggtgtaggttttatgagagatgttttatttttttagagtatgtagaaaagtattaagttgtggaaaataagttatttattgaaggagttgaggtggaaggggatatgtattatggatttaggaatgttaagaatgtaattgtttataggttgggtttagggtgtggtaggtattttattttattattgagtaagagattttttgagtttgttttggaattttatttttttttttattttgtatttttttgtaattttaattcgtttgtgttagtttttgtaaaaggtaagggggttaagttaatagaggttagataattggggtggggttaggggaggtaaaggtggtgggtttttttgagttagttgattagatttgaaagttattttgtaaatgaattttttagggggataaatgattaaatagtttttgttggtttgtgtagtgattttttttgtttttttttgttttgatttttttttggggtaaatatttgtttagttgattataggagggataggattttagtattgtagatatattttttgaggtatttttaagtagggattgaggttgtttgtttattttgtttgattattgtttttggttagtggttttaatattaggtgggttgttgttagttataaataaaaggtagtttgggagaggtgtttggtttgttagttagtttttgtagaaggttatttttattagagaattgttagttgtttagtggtgtatatgaaagaggttttagatatagtaattttgggtaagtttattagatttttatggggttgaaattttattttttatttttttgtttaagaattattagagtttgttggataatatattatatgttatttttttttggtgaatagaggggatgtgtgtggaagagttagttatattagaattatttttgagtatatattttttttttaaggttagggagtaaagaatatttgatttaggattttttgagtttgggtagaaggtattcgtttttttttttttaggtattattttgttttaagttgtatcgattggttattgtggtggtatcgggtaattattttggagattgcggttgggagatttttaagggtaggagttatgggttattttatttagggttatgttttaaatttagtatttttataggaaaggggaaggaaattagtttttattgagtatttgttaagtattaggtattgtgttaggttttttatttatgtaattagtgttttttgagtatttattgtgaagttagtagtgtattaggtgttggttataagttacgtatggtatttttttttatggaaacggtatgttgttttatatattttatagtaattttttaaggaaggtgagtttatttttagtttatatatgaaggtttttgtgtttaagtgattgattttaggtgttttttagttagttaagtgtttgaatgagaatttatattaaggttggtataattttaaagttaatattttttattttattaagttgtttagggagtaataaagtgatttagatatgttggtttagaaagttagagatgttg

SEQ ID NO: 266 - DNA, 6155 bp, Artificial Sequence
  chemically treated genomic DNA (Homo sapiens)
ttagaaaatattttaggttgtatttatagagattggtaatttatagttaagtaatagttttttgtattttgttttggaaatattgattttagaatattgtagtagatttttattgttatattttgagatgaatattagtaaaagggtatatttaatgatggtaaaaatgagatggtaaattattttgtttgaattatggttgaaggaattggtggaaaaagatttaggggaaattttaatagtttttaagtatgtgatgagatagagaaagtggaattgagggaatgaataagataatttaggagtaattatgtttagggataattttagaattattttataaaaagttttttgttaggtagtaagtttttagtaatgaaagtatttatttaaattatttttgagatatttttttattttaagattttaatttaagggtttaaagaatttaggttgatattgtataggattgtagtttgtagaggtagggtttgggataattttttagttattgggtatttatgcggttgatattaggtaattttaatatattatagggattagtaaattttttttttgtaagatgttagatagtaatattttaggttttgtaggttatatggtttttatagtatttgtttaattttgttgttgtagtgtaaaagtattgttgatattatgtaaatatagtttgttatttgtgttttaataaaattttatttataaaagtaagtggtgagttggatttggtttgtgggttatgttttgacgatttttgttttaattaatgaaatttagaaatagagttttaatgtaaatatagaaaggtttttaatttagggattaaaaatcgaattgttaagatgttattgtttttttggtttgaaagagtatatattaagtgtttaaaatagtgaattgtttaatgaattaagaaattttttagtataaaagttaaatgataatggagaatttgatattgttttttattttttatttttgttatttaacgttgtttttaaaggcgtcgttatttttgttgggtagtattgtttatttagttggattgttgatgtagatttagtttatattaataagttaatataggtttaggttttttgagaattaaaagatttttaagtattttttttttaaatatagtaatttttaatagtaattttaatattagaagtaagaagtaaataaaaatttttgatgatcgaggtatttgttgttatatattttgtgtttttaaggttatatagtagagttttttgtattattttttggtttgttggtttttagtttatagtttgtaaaatggtggttatatgttaatgttgattagaagaaggagatgttattgtaattaggtaggttggttttcgttgagaagtgattattgattgttagaaaataaagaaatgggaggtatttagtaatttggggttgttggttttaggattagaaatgtatttttaagtttttattaaattttttaataattttgaagagttttgttgtttgtgttttaatataatatagtaattggtgtttgtaatgaggattataatttattaaaaaggtaaattgtgaattgtgtatacgtatatatatttttttaagtaaatgggattgttttattttgaatagtttttaaattgaaataatttatttcgatatgtagaaaattaggataagtaaaattaatttatttatttttaagagttttagatagtagtgatttgttagtatgtatatgaatttttagttttggtattttgaatttaaaattttaatagagtggttttttgatttttaaagtgttttatttttagtaaatatatttttaattttgtgattttaaatttttaagttatattatgattttataattttatagtgatttatttttttattgttttaaatttaataattttattttttttattggtatttaattttttttgtagtttaaaggtttttttatttaaaatgttatatattttgattttttaattttagggatttttttttagataattgagaatatgtaatttttatattttaatgtttatttgattataatttatatttgaaaagtaatttttaaagaaatttgagagaatttaaaaattattttaaaagtattatgttatttttagtttaaaatattttagagaatttattttattttattttttttggagatagggttttgttttgttgtttaggttggaatgtagtggtgttattacggtttgttgtagttttgattttttaggttaaaatgatttttttattttagttttttgagtatttgggattataggtatgtgttattatatttagttaatttgtttgtttttttgtagagatggggttttgagtttaggttggtttcgaattttttagtttaagggattttgttgttttagttttttaaagtgttgggattataggtgtgagttataatttttagtttagagttttttttttattaacggtgtataatataaaatttaaattttaatatggttttatatttggtttttatttattttttgtttttttttttttgttatatattttatttgtttttatgtattttagatttaagtaatgaaaaatagtttgtattgttaggaataggtcgtatttttttatggtttgattttatatatatttttttgtggtaatttagaatatttgtttataggtttttttatattaggttatattttttttgtgaaatttttaatttgtaatattttattgaaattttatttttttgaagttttttttaatttttttaggtttttttattgtttatattttgttttgtaatagttattatattgttaaagtcgttttttagtaaattatgagatttttaattgtggaagggaaggtatttttttaatttttgtttttgtgttatatttagtttagagtttgatattaagtaggtattttttaaaaaaaaaaaaaaaaaatatagggtagagatagataataagggatttttgatatttacgttgtagatagttataatattttaataggaattttgggaatttggggaattggaagtagttgggaaagtatcggtatttgagttatttagtatttttttaggtttgtgtgtgagttttgttatttttaggtattagtatttgaaatttaatttttttatgaagttttttatttatttgttttttcggtgaaaaaaaaaaataataataaaaatcgtttttttttttatttggtgttagtattgtataatttttaataagtttgaaaagataatgttggtaatattttataagtttattgttaatgtttaatatttattaggtgtttgttgtgtgttgatttttgtgtttatatattttttatatattattttatttatttttataatagtttagtgaagtagatgttattattattttaattttataaatgggaaaaatgagatttattgagataaattaaattatttaaggttatataattatagattaagggggttaaaatttgaatttagtgtagatttaaattagagtttatttttttatttattattggggaatattgtttggttataattgaagtttaaataatagtatggttataatatgggttttaaaataatttagatttggatttaaaatttatttattggaggtaagtgattttatttttgatttttagtttttttatatgtaaaatgataatatttattttaaaagtgttattgtttatttatgtatatggtatatattaaaaaagtaaatgttagttttatttgttatttttatattttatgtgaattttgggggtaatggtttgtatagaataaggtttggtatgagaagataaaaattatttgataaataaaaaagttgttattttgtttattagaatgttaattagtgtttgttttttaggattaataagtgttttattattataattatatttatttttttaatgaaaagggtgtgttttgagtatttaatagttaattatttataaatatattatagtagaataaggaataaaattagtgatttgtttattatagtaattaggttttttttttggtaatatttagggaatatatgagggttttttgtgggttgttatttattatataaaatagttgttttggtagttttataatagagatttgttagtgttatttagtagagaaaaattataaatatagttgttgtttttgtgtggtttgtggttttggttttgtttttatttgaatttttttatgtaggtatgttattatttaaaagtagttatttggcgtttttttttgtattttttagattttttgtaggtttaaaaaaatttaagttatttttataattgtttatatagattgatttatttggtttttttattagttaatgaaatttttgatatgtaggaaaaaggataattattttaaattttataattttagtggattttttttataagtttgaagaaaaatagttttaattattaaaaaatattttttttatattttttattgttttttgttaatttttgtattttcgtgggggttaaaaaggttaataatttttgttatttttattttttatattttttgtgtgttataattttgaagtatattataattatttgtttgtaattaagaattggtatagtataaatgtttaattaaattaggtttttttgttttttttaagttatattggttatgaggtggaggtggattatagggggtaggtattaatttagggagattatttaggtttttgtagtggtttagataagaaatattgatggtcggtttaaggtattaagagtggtatttgaagaatgtagatagaataaagagagaattaacgaagtttgttgatgggttagatgttgattggtgtgagatggagagaggagttagggatggtaggttttttttttttttttttgttgtgtttgtttaatttttgtttattttttttttttttttgttttttgatggagtttcgttttgtcgtttagattggagtgtagtggagcgatttcggtttattgtaatttttgttttttaggtttaagtgatttttttgttttagttttttgagtaggtgggattataggtgtatgttattacgtttagttaatttttgtatttttagtagagacggggttttatcgtgttggttaggttggttttaaatttttgatttcgtgatttgtttattttagttttttaaaatgttaggattataggtgtgagttattatgtttagttatttatttttaaaggattaagtttatgttttttattatgggaaattattttattttaaatttgatgatcgtattatgtgtttttatagaatttggtatttttttaggatagtatttattttgttttgtaagtgtgaatgtaattattttatatatagtatatatataatttttatattttttgttttgttttgtgaaggtaagggttatgtttattttattcgttattagatttttatatttaatatagttttggggatagtattaatgtatttttggtgtataagtaaatagtgttatttatagtttttatttataatatttgatagattaattaaatatagtaggttatttgggtttttttgatttatgtttttagtttaatttttattttttttttatttggtattttttattttgttttttgatatatttttatagtttcgtttattgagtaaaagaaaatataaatagtaagaagtaaatttgtgttttatggattttgataatattttttaaaagattttttaagattgttgatgtttaaaaaaattaagggtttttaatttataataatatttaatagtttttaaaatattataaattgattggaatattgtattaatagagagagttatggattttatttatgtgtagatttattttagttagaagtattaggattggtttatttgagaaagtaaatagattattataaatttatcgttatattttaaggaaaatttattgatgatattttttaatattgtgattatatatttaaattatattttaagaatagaatgtttaagatattatttagataagaattaatataaaaagaaaaaggaaaa

SEQ ID NO: 267 - DNA, 6155 bp, Artificial Sequence
  chemically treated genomic DNA (Homo sapiens)
tttttttttttttttttgtattgatttttatttaggtgatattttagatattttgtttttaaagtatgatttaggtatatagttataatattagaaagtgttattaatgaattttttttgaagtatgacgatgaatttgtaatgatttatttatttttttaaataaattagttttaatatttttgattgaaatgaatttatatataaataagatttatgattttttttgttagtgtaatgttttaattagtttgtaatattttaagaattattaagtattattatgagttgaaggtttttaatttttttagatattaataattttggggggttttttagaagatgttattaaaatttataaaatataagtttattttttgttgtttatatttttttttatttagtgagcgaaattgtaagagtatattaaaaggtaaagtgagagatattaaataagaaaaaaatgaaagttaagttagagatatgaattaaaaaggtttagataatttattatatttgattagtttattagatattgtaggtaagagttataaatgatattatttgtttatgtattaaaagtgtattggtgttgtttttaggattatgttggatgtgggaatttaatgacgaataagatagatatggtttttgtttttataagataaggtaaagaatatgaagattatgtgtatgttgtgtgtagggtaattatatttatatttataaaatagaataaatgttattttggagaagtgttaggttttataaaagtatataatgcggttattaagtttggggtgggatggttttttatagtaggaaatataaatttaattttttaaagataagtggttgggtatggtggtttatatttgtaattttagtattttgggaggttgaggtgggtagattacgaggttaggagtttgagattagtttgattaatacggtgaaatttcgtttttattaaaaatataaaagttagttgggcgtggtggtatgtatttgtaattttatttatttaggaggttgaagtaggagaattatttaaatttgggaggtagaggttgtagtgagtcgagatcgttttattgtattttagtttgggcgatagagcgagattttattaaaaaataaagaaaaaaaaaagataagtaagagttgaataaatataataagaaagaagagaggaaatttgttatttttgatttttttttttattttatattaattaatatttaatttattaataagtttcgttaattttttttttattttgtttatattttttaaatattatttttagtattttgggtcggttattaatattttttgtttggattattgtaaaggtttaaatggtttttttgaattgatgtttgttttttataatttatttttattttatagttagtgtgatttaaagagagtaagagggtttaatttgattagatatttatgttgtattaatttttggttgtaaataaataattatggtatgttttagagttataatatataaaggatgtgaagagtaggaatagtagaaattattagtttttttagtttttacgaaaatatagaaattaataggaaataatgaagaatataagaaaaatattttttgatagttgaaattatttttttttaaatttataaaagagatttattgaaattatagaatttaaaataattgtttttttttttatatgttaaaaattttattggttagtaaaaagattagatggattaatttgtatgaataattatagaagtgatttaaatttttttaagtttataaaaaatttgaagaatgtaagggaaaacgttaaatgattatttttaaatgatgatatgtttgtataaaaaagtttaaatgaaaataaaattaaaattataagttatataaaaatagtagttgtgtttatgatttttttttgttgaatggtattgataggtttttattatggaattattagagtaattattttatataataaataataatttatagggaatttttatatgttttttaagtattattaagaaagaaatttagttattatagtagatagattattggttttattttttattttattgtagtatatttatgggtaattaattattaaatatttaagatatattttttttattaagagaataaatgtgattatggtaataaaatatttgttgattttggaaggtaggtattggttgatattttggtagatagaatgatagtttttttatttgttagatggtttttgtttttttatgttaggttttattttgtataaattattatttttagggtttatataaagtgtagaagtggtaaatggaattaatatttgtttttttagtatgtattatgtatatgggtgggtagtaatatttttgaggtagatattattattttatatatgagaaaattgaagattagaagtgaagttatttgtttttaataaatggattttgaatttaggtttagattattttaaagtttatattataattatgttgttatttggattttagttatggttaggtaatattttttagtagtgaataagagaatgagttttaatttgaatttatattagatttaaattttggtttttttagtttatagttgtatggttttgggtagtttaatttattttaatgaattttattttttttatttgtgaaattgggataataatggtatttattttattggattgttgtgaagatagatgaagtgatatatgaaaaatatgtaagtatagagattagtatatagtaagtatttaataaatgttaaatattagtaataaatttgtaaagtattgttaatattatttttttaagtttattaggaattatatagtgttggtattagatggggaaggaaacggtttttgttgttgttttttttttttatcgagaaggtaagtaaataaggagttttataaagaagttagattttaagtgttaatatttgaaggtggtaaggtttatatataagtttggaagagtattgagtggtttagatgtcggtgtttttttagttgtttttagttttttagatttttaagatttttattgaaatgttatagttatttatagcgtaggtgttaggaattttttgttatttgtttttattttgtgttttttttttttttttttgagaagtatttgtttaatgttaggttttaggttaagtatggtataaaaataaaggttaaaaagatgtttttttttttatagttaagggttttatagtttattggggaacgattttaataatgtgataattgttataagatagaatatgaataatggaaaagtttgaggagattagggaaggttttagagaggtaaagttttagtagaatattatagattaaaaattttatagaaagggtatggtttgatgtaagagagtttatagataggtgttttaggttgttataagagagtgtgtataaagttagattatgaaagaatgcggtttgtttttagtaatataagttgttttttattatttgagtttaaagtgtatgggaataggtggagtatgtgataaagaaggagaggtaaaaggtaggtaggggttagatgtaaaattatgttagagtttgaattttatgttgtatatcgttagtaaaaaggagattttgggttgggggttgtggtttatatttgtaattttagtattttgggaggttgaggtagtaggattttttgagttgaggagttcgagattagtttgggtttaagattttatttttataaaaaaataaataaattagttaggtgtggtggtatatgtttatggttttaggtatttaggaggttgaggtgggaggattattttagtttgggaggttaaggttgtagtaagtcgtgatggtattattgtattttagtttgggtaatagagtaagattttgtttttaaaaaaaataaaataaaataaattttttgaagtattttgagttaaaaatgatatgatgtttttaaaatgatttttaaatttttttagatttttttaaaaattgttttttaagtgtaggttataattaaatgaatattaaagtgtaaaaattatatatttttaattgtttagagaaaaatttttaaaattaagaaattagaatatataatattttaaataaaagggtttttagattatagaaaaaattaaatattaataaagaggatgggattattaaatttaaagtaatggggggataaattattataaaattatgaaattataatgtagtttggaggtttgaggttatagaattaaaaatgtatttattaaaaataaaatattttaagggttaagaaattattttattgaggttttgagtttagaatgttaggattaaagatttatatgtatattgataaattattattatttggaatttttaagagtaaataaattggttttgtttattttaattttttatatatcgaaataagttattttaatttgaagattgtttaaaatagagtagttttatttgtttagaagagtgtgtgtgcgtgtgtataatttataatttatttttttgatgaattatagtttttattataagtattaattattgtgttatattaaaatataaatagtaaaattttttaggattattgagaaatttggtggagatttgggggtatatttttggttttaaaattaataattttaggttgttgaatgttttttatttttttgttttttagtaattaatggttattttttagcgaaggttaatttgtttgattatagtagtattttttttttttagttagtattgatatgtgattattattttataaattataaattaaaggttaatagattaaaagataatataagaggttttgttgtatgattttaggagtataaaatatatgataatagatgtttcgattattagagatttttgtttattttttgtttttggtgttaaaattattgttaaaagttattgtatttaggaaggaagtatttaaaaattttttggtttttagaaggtttgaatttgtgttaatttgttggtatggattgggtttgtattagtagtttaattgagtagatagtattatttagtagaagtaacgacgtttttaagaataacgttaagtagtagaaataaagagtaaaaaatagtattagattttttattgttatttgatttttatattggaaggttttttaatttattgggtaatttattattttgaatatttgatgtgtatttttttagattaagaagataatgatattttgatagttcgatttttaatttttagattgaaagtttttttatatttatattagaattttatttttagattttattagttaaggtaagggtcgttaaagtatgatttataggttaaatttaatttattatttgtttttgtaaataaagttttattggaatataggtaataaattgtgtttatataatgttaataatatttttgtattgtaataatagagttgagtagatgttatagagattatatggtttgtaaagtttaaaatattattatttggtattttgtagaaaaaaagtttgttgatttttgtaatgtattagaattatttggtattaatcgtataagtgtttagtggttaagaagttattttaaattttgtttttgtaaattatagttttatatagtgttaatttaagttttttaagtttttaagttaaaattttgaaataggaaagtattttagaagtgatttaagtgggtatttttattgttgggagtttattgtttgatagggaattttttgtggagtaattttgaagttatttttaaatatagttatttttaaattattttgtttatttttttagttttattttttttattttattatatatttgaaagttattagaattttttttgggtttttttttattaatttttttaattataatttaggtaagatagtttattattttatttttgttattattggatatgtttttttgttaatatttattttaaaatgtggtaatgaaaatttattataatattttggaattagtatttttaaggtagagtatagaaaattattatttgattatggattattagtttttataaatatagtttaagatgttttttgg

SEQ ID NO: 268 - DNA, 6155 bp, Artificial Sequence; identical to SEQ ID NO: 266
  chemically treated genomic DNA (Homo sapiens)

SEQ ID NO: 269 - DNA, 6155 bp, Artificial Sequence; identical to SEQ ID NO: 267
  chemically treated genomic DNA (Homo sapiens)

SEQ ID NO: 270 - DNA, 6239 bp, Artificial Sequence
  chemically treated genomic DNA (Homo sapiens)
ttaatatttattaaatgttaataatgtgtaatggagaaggttaatagtagggtattttattaatttgataaaaggttataatttggattttggatttaaattttaattatatttgtattttatttaggaaacgataattataaaaaggggatttagtattttaaatggagagttagaaggttaaataagtttatagtagtgatagaagtagtttttatatttaaataattttagattagtaaaaattttattagataggagaaattttattagatgggggtatttttttaattgatatgttttaaacgtaaaatattttttttagtttatattttagataagttaattttgttaaaagggttaaaggatgtgatgggaaattttgagttttttataatgagatatgtttattggtatattttttagtgagtgtaatagtaatgcgatgtgtggtggagaaatgatgttattggtaatattttttttttattattttttagggttttattttttttaggttcgatttaatttaaattttgttttggtttttaagtttgtgagtttatattaatttttatagttgtatttagtattttgtttttaaataaagtgaaaatattaaagatttaattaaaatttttttaaaaagaattttaattaatttttttatttagttataatatttggtaaaatatattttttatggtatttttaaaattatgattgaaatttgaatatattttcgaaatagatttatatttattttataatagtaagatatagaaaattttgtaagtattaattatattaaggaacgtagagtgtttttttaaaaatagttgaaaagagttatagtgtgtttagtagaattttagtttataattttaataattttagttttatgattttaagaattggttttatttcgaaatatttttttatttgaaaaaaggaataatattattttttttttttttaatgtggttgtttaaataaaatgaaataatatatgtagtatagtatttgttacgaagggtttaataaattattagtttattttttttagttaatataaaagatatatttataagatttagatttaaggaaatttatttttataagtttttattagtataaaatgttatcgttagtttgttttaataaaaattattattagtcgggcgcggtggtttacgtttgtaattttagtattttgggaggtcgaggcgggcggattacgagattaatatatcgatattattttggttaatatggtgaaattttgtttttattaaaaaatataaaaatgggtcgggtgtggtgtcgcgcgtttgtagttttagttattcgggaagttgaggaagaagaatcgtttgaatttaggaggcggaggttgaagtgaatcgaggttacgttattgtattttagtttggagatagagcgagatttcgtttcggggggaaaaaaaaaatcgttattattattttatttttttaagggatttgaattaagatgagggagtttacgtgtgattttgtaagaattttattaaggttgtatatataatgattattaaattattaataggagtttatagtaattgggttaaaatatttgggagtatttatgttggtaaaagagtttatttgggggttaaaaaaaaagttaaattaggtttaattttaaacggatttttaataaattaagagagtaatgttagtttattttttttgaaacgttagtagtacgatattaaaatttatttagaagtaaaaattttaagacggaaatatgttattaatattggcgttagtaatttattttagaaagtttgcgcggagattattattagtatcgttgaggatatttaatgaaagtcgttggttgtaaatagaggcgaagagagaaaaacgattatttcggtgttttgtatatacgcggaggtaaaacgtttttaggattttagtagttatcgtcgttaatatcgataagtatttgatggaatttatagttttataatcgaaagtttaaaagaaggttatgatattagtaaattgaggggtggggattttttcgttgttttttcgagggtttagattttaaaggtcgcgttgcgttcggggttaagggtttattagtatcggtttacgtttttcgcgttattttttgagttttttttcgagcgatcgaaggttcgggaatcgcgagtaataatatttaaattttaatcggttcggggtcgcgttcgagttttggcgcgcggatcgcggtgaagttcgggttcgaggtcgtcgcggcgtttgaggtcgaggcgcgggcgaggtcgaggttgcgttcgttgcggtttcgggcggtgggggggtcgggcgtggtcggtcgcggatatttattatattatgtcgtaggcgttttcgtcgatgtacgagaggttggtgtagcgcggttttacgtcgaatatttgttcgcggattattttcgggttcgcgttcgtcgtcgtcgtcgtcgttatgttggttgtcgggtcgtcgtcgttttcgtcgcgttgagttcgacgttcggcggtcgtcgtttagtttttgtcgtttttttcgtagggattgcgtcgtcgtcggtgtagtcgtcgacgttgatcgggaggaggaaggaagacgtcgagcgggagagttgaagagtcgatagttattcggatcgattgtttgtttgtttgttagattgacgggcgggtcggcgggcgggcggagggaggggcgcgcgtcgaggagggtgtcggggcggggataagaagtgtgtatgcggattggtttttcgcggttgggggcggggtcgcgcgggtcggcggaagcggcgggtttcgggaggggtattgcgacggcgttgattgagggggcgttattaggcgcggttacgtgtattcgcggtgtattcgcgggggcgtcggtgcgggtcgcgttttttaagatatttagggagatagacgtggggtagaatttatgggttgaagtgagagatggttggggtttaggcgagcgatcgagtagggttcgaatagagttagcgagggatttcgggttgtgtttgaggttcgacgacgcgttatatttcggtagcgtcgtagtttaggtttttgcgaatttgtggtttatacgttgataaatttagaggtttttgtattggggtagaaatcgaaaggtatgatttagatcgagaaagatatttgtatattgagaaagtgtgaaatataattgtcgagattaaaaggagatattgagaggatacgttaattaggttagtttagatgtttgttgagtatattttatgtttttggggatttatttttatagaagttattttttagagagaggagatagataaatacgtgtaatgtttaagttgtgataagtacgatgaagaagtataaagtagaagggagggcgcggtgttttacgtttattattttagtattttgggaggtcgaggcgggcggattatttgaggttaggagtttgagattaggtttttattaaaaatataaaaattaagttcgggcgaggtggtttacgtttgtaattttagtattttgggaggtcgaggcgggcggattacgaggttaggagtttaagattagtttggttaatatggcgaaattttgtttttattaaaaatataaaaattagtcgggcgtagtggtgggcgtttgttattttagttatttgggaggttgaggtaggaggataaagtagagagtaagggattagggggtggtgggtcgaaatatatgagagatatatttgcgtttagagatagatcgagattggtatagataggtagaaatgttgatagagtaggtaatgaaatagaaatgtaaagatagagttattaaaattaaaatatcgaggtttagagaaaaagagatatattaggttaagaaatagttataaataatagaggttgaaaaaataaaaattagagttttgaagtaggtggatattaaggaaagttaagataacgagacggataatgatttaggtattgtttttgaatttttttttttgttatgtttggagggagaaggaagagcggtagattttatattttttttgtttaatttttttaagtttaaaattattaatttttgatttttagatattaataaagattaattagttaattttaaaggagaataaataaagttttttgtttgtttgtttgtttaattttttggtggaagttggtgtggtggtttacgtttgtaattttaatttgggtttaagaatttaagattagtttgggtaatatagtaatattttgtttttaaaatagagaaataaataaataaaaaattttgtgggggaaaaaggatgtgatatatgagaaaaggaataaattgttttagttaaaatttatttttttaaaatatatttagtttatgaagtaggatttaattttagaaaatatttaatttttgagttaatgggtgtagtatattagtatggtatatgtatatatatgtaattaattagtatattgtgtatatgtattttaaaatttaaagtataataataataataaaaagaaaatatttaatttttatttttaaaagaggatattgtatatttttttaaaaaataggttaagataaatggagtattatgaaattaaaattataataatcggtcgggcgcggtggtttacgtttgtaattttagtattttgggaggcggaggagggtagattgtttaagtttagaaattggggattagtttgggtaatatggtgaaatttcgtttttattaagatataaaaaattagttgggtttgtcggtgtgtttgtagttttagttattcgggaggttgaggtaggagaattgtttgaattcgggaggtagaggttatagtgagttgagatcgcgttattgtattttagtttgggttatagagtgagatttcgttttaaaaaaaaaaaaaaaaaagaggtcgggtgcggtggtttacgtttgtaattttagtattttgggaggtcgagatgggcggattataaggttaggagatcgagattattttggttaatatggtgaaatttcgtttttattaaaaatttaaaaaaaaaaaaaaaaaaaattagtcgggcgtggtggcgagtgtttgtagttttatttatttcggaggttgagataggagaatggcgttaattcgggaggcggagtttgtagtgagtcgaggttacgttattgtattttaatttgggtgatagagtaagatttcgttttaaaaaaaaaaaaaaaaaaagtagatttgatgtagaagagtatattagtaatatagaagataaatatgagaaaatttttaagaatatagaataaagtgatggaattttgtaagagaagataatggggatggatagtatttagggattttaattttaggtatttttataggaagatagagtaaatcggttagagcgaataattaaaattataataggagaaaagtttttttaggttgtaaaaaggtttgaggtggaggtgggaaatagagtgggtttattgagattgagaaaaattaagaagaaattaataatatataatttgggaaaattattaagttttagggataaagaatagatattaatagatttaattagggaaaaaaatgttatttataaaaaagttggttagtaggtacggtggttcgtgtttgtaattttagtattttgggaggtcgaggcgggcggattatgaggttaggagttttagattagtttggttaatatggcgaaattttattttttttaaaaatataaaaattagttgggtgtggtggtgtgtgtttgtaattttagttttttgggaggttgaggtaggagaattgtttgaatttaggaggtggaggttgtagtgagtcgagatcgtgttattgtattttagtttgggtaatagagtgagatttcgttttcgggggaaaaaaagatggttgggcgaggtggtttatatttgtaattttagtattttgggaggttgaggcgggtggattatttgaggttaggagttcgagattagtttggttaacgtggtaaaattttgtttttattgaaaatataaaaattagtcgagtatgatggttggtatttgtaattttagttatttgggaggttaaggtaggagaatcgtttgaattcggaaggtataggttgtagtgagtcgagattgtattattgtattttagtttgggtgataagaacg

SEQ ID NO: 271 - DNA, 6239 bp, Artificial Sequence
  chemically treated genomic DNA (Homo sapiens)
cgtttttattatttagattggagtgtaatggtgtaatttcggtttattgtaatttatgtttttcgggtttaagcgatttttttgttttagttttttaagtagttaggattataggtgttagttattatgttcggttaatttttgtatttttagtagagataaggttttattacgttggttaggttggtttcgaatttttgattttaggtgatttattcgttttagttttttaaagtgttgggattataggtgtgagttatttcgtttagttatttttttttttttcggagacggaattttattttgttgtttagattggagtgtagtggtacgatttcggtttattgtaatttttattttttggatttaagtaatttttttgttttagttttttaagaagttggaattataggtatatattattatatttagttaatttttgtatttttagaagagatggggtttcgttatgttggttaggttggtttagaatttttgattttatgattcgttcgtttcggttttttaaagtgttgggattataggtacgagttatcgtgtttgttggttagtttttttataaataatatttttttttttaattgggtttattagtgtttgttttttatttttgaaatttaatgatttttttagattatgtgttgttggtttttttttaattttttttaattttagtgaatttattttattttttatttttattttagatttttttgtaatttaaggaaattttttttttattgtaattttgattattcgttttaatcgatttgttttgtttttttgtggggatgtttagagttagaatttttagatgttgtttatttttattatttttttttataggattttattattttgttttatatttttgaaaatttttttatgtttattttttatattgttgatgtatttttttgtattaagtttattttttttttttttttttttgagacggagttttgttttgttatttaggttggagtgtagtggcgtgatttcggtttattgtaagtttcgtttttcgggttgacgttatttttttgttttagttttcggagtaggtgggattataggtattcgttattacgttcggttaattttttttttttttttttttggatttttagtagagacgaggttttattatgttagttaggatggtttcgattttttgattttgtgattcgtttatttcggttttttaaagtgttgggattataagcgtgagttatcgtattcggttttttttttttttttttttttgagacggagttttattttgtggtttaggttggagtgtagtggcgcgattttagtttattgtaatttttgtttttcgagtttaagtaatttttttgttttagtttttcgagtagttgggattataggtatatcggtaggtttagttaattttttgtattttagtagagacggggttttattatgttgtttaggttggtttttagtttttgagtttgggtaatttgttttttttcgttttttaaagtgttgggattataggcgtgagttatcgcgttcggtcggttattgtggttttaattttatggtattttatttattttggtttgttttttaaaaaaatatgtaatgtttttttttgagaataagaattaggtattttttttttattattattattatattttaagttttagggtatatgtgtataatgtgttggttagttatatatgtatatatgtgttatgttggtgtgttgtatttattaatttaagaattaggtattttttaaaattgggttttgttttatgggttaaatatattttgaaggagtaaattttggttggagtagtttatttttttttttatgtgttatatttttttttttttataggattttttgtttgtttgtttttttgttttagagatagggtattgttgtgttgtttaggttagttttgaatttttgggtttaagttgggattataggcgtgagttattatattagtttttattagagagttaaataaataaataaataaaaaattttgtttatttttttttgagattgattaattaatttttgttgatgtttagaagttaagagttgatggttttaaatttggaagagttgaataaagaggatatagggtttgtcgtttttttttttttttttaaatatggtaggggaaaaggtttagaagtagtgtttgggttattgttcgtttcgttgttttagttttttttggtatttatttgttttaggattttaatttttatttttttaatttttgttgtttgtgattgttttttaatttggtgtgtttttttttttttaaatttcgatgttttggttttagtgattttatttttgtatttttattttattatttgttttgttagtatttttgtttatttgtattaatttcggtttgtttttgaacgtaaatgtattttttatgtgtttcgatttattattttttaattttttattttttgttttgtttttttgttttagttttttaagtagttgggatgataggcgtttattattgcgttcggttaatttttgtatttttagtagagatagggtttcgttatgttggttaggttggttttgaatttttgatttcgtgattcgttcgtttcggttttttaaagtgttaggattataggcgtgagttatttcgttcggatttaatttttgtatttttagtagagatttggttttaaatttttgattttaagtgattcgttcgtttcggttttttaaagtgttgggatgataggcgtgagatatcgcgtttttttttttgttttgtatttttttatcgtatttattataatttgagtattatacgtatttgtttgttttttttttttaaaaggtaatttttataagggtggatttttaggaatatggagtgtgtttaataaatatttgaattaatttgattggcgtatttttttagtgtttttttttagtttcgataattgtgttttatatttttttagtatgtaaatatttttttcggtttgggttatgtttttcggtttttgttttagtgtagaggtttttaagtttattagcgtgtggattatagattcgtagaggtttgagttgcggcgttgtcgggatatggcgcgtcgtcgggttttaagtatagttcggggtttttcgttggttttgttcggattttgttcggtcgttcgtttgggttttagttattttttattttagtttatgagttttgttttacgtttgtttttttgggtgttttaagagacgcgattcgtatcgacgttttcgcgaatgtatcgcgaatgtacgtgatcgcgtttagtggcgtttttttagttaacgtcgtcgtagtgtttttttcgaagttcgtcgttttcgtcggttcgcgcggtttcgtttttagtcgcgaggaattaattcgtatgtatattttttgttttcgtttcggtatttttttcggcgcgcgttttttttttcgttcgttcgtcggttcgttcgttagtttggtaggtaggtaggtaatcggttcgagtggttgtcggttttttagttttttcgttcggcgttttttttttttttttcggttagcgtcggcggttgtatcggcggcggcgtagtttttgcgggaggggcgataagagttgagcggcggtcgtcgagcgtcgagtttagcgcggcggaggcggcggcggttcggtagttaatatggcggcggcggcggcggcgggcgcgggttcggagatggttcgcgggtaggtgttcgacgtggggtcgcgttatattaatttttcgtatatcggcgagggcgtttacggtatggtgtggtgagtgttcgcgatcggttacgttcggtttttttatcgttcggggtcgtagcggacgtagtttcggtttcgttcgcgtttcggttttaggcgtcgcggcgatttcgaattcggattttatcgcggttcgcgcgttagggttcgggcgcggtttcgggtcggttgaggtttaggtgttgttgttcgcggttttcgggttttcggtcgttcgggaaggggtttagggagtggcgcggggggcgtaggtcggtattagtggatttttggtttcgggcgtagcgcggtttttaaagtttggattttcgggaaggtaacggaagggtttttattttttaatttgttagtattatggtttttttttggattttcgattgtaaaattgtgaattttattagatgtttgtcggtgttggcggcggtggttgttgaggttttgaaagcgttttgttttcgcgtgtgtgtagaatatcgaaataatcgttttttttttttcgtttttgtttgtagttaacggtttttattaaatatttttagcggtgttaatggtggttttcgcgtaggttttttaaaatggattattgacgttagtgttggtggtatattttcgttttgaagtttttatttttaagtggattttaatatcgtattgttggcgttttaggaaggataaattaatattatttttttgatttgttaaagattcgtttagagttgggtttaatttgattttttttttagtttttaagtgagtttttttattagtataaatgtttttagatgttttagtttaattgttatggatttttgttaatgatttagtggttattatgtatgtagttttaatggagtttttgtagaattatacgtagatttttttattttgatttaggttttttagaaaagtgaaatgatagtgacggtttttttttttttttcgagacggggtttcgttttgtttttaggttgaagtgtagtggcgtgatttcggtttattttaattttcgttttttgggtttaagcgattttttttttttagtttttcgagtagttgggattataggcgcgcgatattatattcggtttatttttgtattttttagtagagatagggttttattatgttggttaggatggtatcgatgtattgatttcgtgattcgttcgtttcggttttttaaagtgttgggattataggcgtgagttatcgcgttcggttgatggtagtttttattagagtaaattagcgatagtattttgtgttggtgaggatttgtggaaatagatttttttaaatttgaattttgtgaatgtgttttttgtgttgattgaagaaagtaaattaataatttattgaatttttcgtggtaggtattgtgttatatatattattttattttatttgagtagttatattgagggaggaaaagatggtgttatttttttttttaggtgagaaagtatttcgaggtgaagttaatttttgaggttatagaattagagttattaagattgtagattgagattttattagatatattgtagttttttttagttgtttttaggaaaatattttgcgttttttagtgtaattaatatttgtagaattttttgtattttattgttataaagtaaatataagtttgtttcggaaatgtatttaaattttaattataattttagaaatgttatagaaggtatgttttattaagtattgtagttagatagaaagattagttaaaattttttttaaagagattttaattgaatttttaatgtttttattttgtttaggagtaaaatgttgaatataattgtgaaaattaatgtgaatttataggtttaggagttaagatagaatttaaattaggtcgagtttgaaagaaataaggttttaaaaagtaatggagagaaagtattgttagtagtattatttttttattatatatcgtattgttgttgtatttattgggaagtgtgttagtgaatatgttttattatgagaggtttagaattttttattatattttttggtttttttaataagattagtttatttaaaatgtggattgaaaaaagtattttacgtttaggatatgttaattgaaaagatatttttatttgataagattttttttgtttgataaggtttttattagtttgaagttgtttagatgtgggaattatttttgttattgttgtaggtttgtttgattttttgattttttatttgaaatgttaagttttttttttgtgattgtcgttttttaagtgaaatataaatgtaattggaatttgaatttaagatttagattatagttttttattaggttgatgaaatattttgttgttaattttttttattgtatattattagtatttaataaatattgg

SEQ ID NO: 272 - DNA, 6178 bp, Artificial Sequence
  chemically treated genomic DNA (Homo sapiens)
gatttttttttaatttaaaaggattattttttgtaagattttttttttttatttaacggcgtttatatgtttgttatatattaacgaaaaaatatatgttataaagcgtttatgaatttaatattaatttaaaatgaatatatgttattaattatatagagatttaatgtatgtttaaaatagtatatatatgtgtgtgtgtgtgtgtgtgtgtgtgtgtgtgtgcgcgcgttttagtttatagataattcgatttattaattttttggaaaggaattttagtatattttaaattgggaattgttgatattgttgatgtattaaagtgattttttaattggaaaattttatatgattcggttattttttttttaaattattttatttttaaataagttttgtgtttttaagaggaattatgattatatcgtatattatgtatatatatttaaatgaataattaatgaaaattgtttttaattatttaaaaaaaaaaaagaagaagaatattattttgcggaggtagtgcgtgtaaattttttgatgtgttatggtggagttatttttaatatttaatggttagaaaattgagtaaatatagaattaataaagaaaagatttttttatattatataaaattagtttataaaagagtatattgttgtggaaaattttgagataagtatagggattttttttatagtgatgatattttatgtttgtaggtattagttataaagttaaaaaatttttttttatatattaatattatagaagtgattgttgttaattattgttagtatgatttattttttttattatatttttattatttttttttttagtataaaatatattatatttaaagaaataagttattaattaggattaaaaatttttttttttattttttgtaagtatttgatagaaaatgtttttagttgatattttattcgtttgaattttgtttttattttttaaaaatattgggattatttttttttttagatttaatttgtaggataaaagttattatataattataaaagttattttatttttttttaatttatgaaatttgtgatttttattaatgttttataaaattataatttatttttaatattattttttttggttttatttttttttttttaaaataagttattaagtgagaagttatttaatgtttgtttttttgatagatttggaagttagatttaggaatttagtttatttttattttattgtttattgatttatttaatttataaatattgattaattattaagtattattattttaagtattaacgtttgtatataatggtaggtatttttagtgagtattaattcggtattaggtattttattaagtatttttattatttttttatgcgttggatattattattatttttgttttacgtatgaggaaattgagatagattaaataatttgtttaggaatttatatatagatagtttaaattttaatttttgataatatgatgaagtatttgttttttttttttttttttttgagacggagtttcgttttgtcgtttaggttggagtgtagtggcgcgatttcgatttattgtaagtttcgtttttcgggtttacgttatttttttgttttagtttttcgtgtagttgggattataggcgcgcgttattatgttcggttaatttttgtatttttagtagagacggggttttattgtgttatttaggatggtttcgattttttgatttcgtgattcgttcgtttcggttttttaaagtgttgggattataggcgtgagttatcgcgttcggtcgaagtatttgtttttaataagagtattttggatattaaagggttttagagtatgagagaaaaaagttagaaaaaaaaaaggaatagtaataataattttttaaaaagtagaaataaaaaggtaaggagttaatatttattagattttattttttatttaaatatgtatatttatatatagtattgttgaattgatttatagtttttaggttttatagaggagtgtagtgaaaaggaagataatttatatagtatagagttgaatataggatttataaataaaaaaaaagttaaggaatataaagtagtttttttaggtgtaaagtatcgggtttagaattttatgaggttagggagaagataaacgataaaagttataagagattagaatgaaaagagatttataagtttaagaagtttaggtttttgaggagaattatgaatttgagtaggattttattaatttttttaaaaagtagttattgttttaaagtacgattttattagtataggtaggaaagtgggagtgaggaaaggtttagagttttttagtttggttggggttagataatttgtttggggaaatagtgggagttgaggttgaaaagatcgattggttttacgtttgtggtaggttttgtttaaaaagtaataggaagtcgttgaaaggttttgtgtaggggagcgataggattaaggtattatttagtaggaagttatattaaaagtagtaatttgataaatggtaaatacgatagaaggaaaaaaaataataggaattttttttataatgattcgattttgaggtaataaatgtttgagttatattggaagtaggggttttagaaggaaggcgtagatgggaaaggtttttttgggcggtggcgttttaatgtaaggagggcgtttgaattattgatagattttaagttaagggagttttcgtggttgaggttagtaagttatacgtatagttttttaaaggtatgtatggggaacgttagttttggttaaaagattgatttaagttatgttcgttattttgagtaattaaaattatttattatagggtaggtgattttataaagtaaattaagttatttggtttacgttttttatttttcggagggagatggaaaagtttcgggagtagttttcggttaatcggaaagatatttttttattttttaattattatttttaggtgttttagggagggaggatgattttttgacggtttttttgtcgtttttttttcgggttaattatgaaattttgggtatttttgattttatttcgttagggttcgggaggggttttttagtataaagttcgtagtattagatagttgagtttatttgtttgatatttttagtgttagagggatatagttaacgtggggttttttttaggttgatagtcgttttttagttattgtcgcgagttcgtttgttttcgttttgttcgtgtatttttcgtagtcgtttttcgttaagttttagcgttcgtttttatcgtcgatgatcgcggggaggaggatggagatgttttgtgtcggtagggtttttgcgttgttgttttgtttgggtaagttttttttttttggttttcggtcgttttaaagaggagataaataaggaaggtttttgtgtatttgttattcgataagtacggagttgtttttaggtttaagtgtgttttatttaaaattacgttttgttttgtgagtttgtttttttttatggtgggattggggtgggggggattggggatcgatgttaaaatgttttttattggtgaattaattattggtatatatgttatgtatggattgaaatatttttttattaaataaaataaaaagttgttgaaaaagttttttttttttttttgaaaagttgttagttttagaaatttaaaggtttggaacgtattgttaatattttatgttttgtttttttttgttggagagtggggaatagaaattagcgtaagaaattttttggaggggggaaaaagttttttttttttgttttgcgtttagttttttaaaatttagtttggtttagttttttcggaggagttggtatgcgttagtgttagttggttgagttttagatataagagaaataaaatattggtcgagggtatttggagtagaagggttttgggtaggttttggcgttttttatcgtttttcgtttttatatttgttgtttgcgtttttttttgtagttttttaagtagtttttggagtaagcgttttgtatttgttgttaattgtattttatagtttgtgatcgttgagggtatttaaatgttagtttttttatttgagatgatttagtttaaggggaaaaattttttaaatagtttttttgttaaaaaaaaattatttttttttaattttttaaattttagtttaaggaatttgaaagagtttgaagtcgtatatgaatattttaataaaaaaataaaagttattattagttttatattttttttggagttggaatgaggttgattttttagatattttaattttatttgtgaaggatgtgattgttaaattattattttggtatattttattttaggggttgagagatttaatgaaatgtatattatgtataattgaaatttataagtttaagtttaggaatataagtggaaattagatatgtggtttttgttaaaattgagttaagaaagatttgttagaagatttttagtaaataatgtggttttgttgtttttgttttgaaaagaattaaattagaaaggtgatagtttttttagagttagaaattaatttcgaggttagaataatttagtatttattattttttttatatgtaaggttgtatttgaataatgtatatgtttgttttgggtgttttattgaatattttaatttgagatagttagagtttgtgaataatttggttattatttattagtgtgtgtgttgtgtgtgtgtttgttgttatgaaagtgtttattttttttattgtattatttaattatagtttatttatttcgttagttgttaagtttatttttaaatgagttaggttagtttttgtttttttagtttgtttggatatttttttgttattaggaaagtttttgttttaagttttgtattatatttttaaattttatttagttatgtagagtttatagttttattttggtaagattatttgttatttttgaaattgtttttttttttttaaataaaatattttttaaaaatattttttttaaattttgttttttttttagtaaaaaagagcgagatatttattttaaattttagtatatatgttataattgttttatgtagttatgattagggaataaagttttagtttttatttttaatatatatagatttaaattgttatgtataattatttggttatttttaaattttatatttgtttaatattgaggtttttgttttataaattggggaattgtgatttaagtttatatagaaaaatagtgataaagtgagagtttatatttgggtttgttagtatttttggtttattgaatattaagtagaagagttgaaatatcggataatatttttttaaataatttataattttagagtagaattttgttttttttattttgtgatttttttaaagagaggaggataaatttttatgttgaattttgtagttatgtttaggggttttttatttaatattaaatatttttatttatgtttatatgggtttttgaatatgtttttgaatgatatttttaagataatttagtcgtattttattaatgagagagaattaagtagaagaaatatttttttttgaaaatatgaggagtataaattttaatgagataataggtttgtttttgattatttttgttgattttgagagtttatgagttatttgagttttggtataatttgagatgataaattttgttagaaaacgtgatgataggttttttttgtttggattttgattaggtatttttattattttttgtatagttttgttatgtgagtagtttgggtaattggggtgtttgatttagtattaagatttaaatttaggagttgagaagaaaattaatagttattaaatgtttattgtgtggtagttatgttgtgtattaggtgttttaaatatattattatttttattttttaaaataattgtgtgaggtagatttgattagtttagtgaagttaagtattttataaagatttagagatagtaaatggttaggttattttgtgataatgaggaaagagttaatgagatttagggttagtaggagtataataaatatagtagattttaatagagaagtttta

SEQ ID NO: 273 - DNA, 6178 bp, Artificial Sequence
  chemically treated genomic DNA (Homo sapiens)
tggaatttttttattagaatttgttatgtttattatgtttttgttaattttgaattttattggttttttttttattattatagagtgatttggttatttattatttttgagtttttgtaaggtatttgattttattgggttaattaaatttattttatatagttattttaagaagtagaggtgatgatgtatttaaagtatttaatatataatatggttgttatatagtaggtatttagtaattgttagttttttttttaatttttggatttgggttttagtgttgaattagatattttaattatttaagttgtttatatggtaagattgtgtagaaggtggtgagggtatttggttaaaatttagataggaaaggtttgttattacgttttttgataagatttgttattttaggttgtgttaagatttaggtaatttataaatttttagagttaatagaaatgattaaagataagtttattgttttattgagatttatgttttttatatttttaaaaaagaatattttttttgtttaatttttttttattgatgaagtacgattaaattattttggagatgttatttaggaatatatttaaaaatttatgtaggtatgaataaaaatgtttgatgttaaatagaaagtttttgaatataattgtagaatttaatataaaaatttatttttttttttttagaaaaattataagataaaaaagataaaattttgttttaaaattatagattatttaaaaaaatgttattcggtattttaatttttttatttaatgtttagtaggttaaaaatgttagtaagtttaagtgtggatttttattttgttattatttttttatgtgaatttgggttatagttttttaatttataaaataagagttttaatattaaataagtgtaaaatttaaaagtaattaaatgattgtgtatagtaatttaaatttgtatgtgttaagggtggaggttggaattttattttttagttataattatataaagtagttataatatgtatgttaaaatttaaaataaatgtttcgtttttttttgttgggggaaggataagatttgggaaaagtatttttaggaaatattttgtttgggggaaagaaggtaattttagaaataataggtggttttgttaaaataaggttatgggttttgtataattgaatagagtttagagatataatatagaatttgaaataggaatttttttagtggtagagaaatatttaaataaattgggaaaatagaaattgatttaatttatttggaaatgggtttggtagttgacgaaatagatgaattataattaagtaatgtaatgaaggaggtaagtatttttatgataataaatatatatataatatatatattagtgggtagtaattaggttatttataggttttggttgttttaaattagaatatttaatgaaatatttagaatagatatgtgtattgtttagatgtaattttatatgtggggaaaataataagtgttaagttattttgatttcgaggttaatttttaattttaggaagattgttatttttttaatttaattttttttaaaataaagatagtaaagttatattgtttattgagaattttttagtaagttttttttagtttagttttggtagaaattatatatttagtttttatttgtgtttttggatttagatttgtaagttttaattatgtatagtatgtattttattaggttttttaatttttgagataaggtgtgttaaaataataatttaatagttatattttttataggtagagttagagtgtttggggaattagttttattttaattttagggagaatatgagattggtggtaatttttatttttttattaagatatttatatacgattttaaatttttttaaattttttaaattgaagtttaaggaattggaaagaagtaatttttttttaatagaaaggttatttagaaaatttttttttttgaattaaattattttaaataggaagattggtatttaaatatttttagcgattataggttatggagtgtaattagtagtaagtgtagaacgtttgttttagaggttgtttgggaggttgtagggaaaaacgtaagtagtaggtgtaggggcgaagggcggtggggagcgttaggatttgtttagggtttttttgttttagatattttcgattagtgttttattttttttgtgtttggagtttagttaattggtattggcgtatattagttttttcgggaaagttaaattaggttaggttttagaaaattgagcgtaagatagaggagaaaagtttttttttttttttaaaaaattttttacgttagtttttattttttattttttaataaaaaggaataagatatgaaatgttaatagtgcgttttaggtttttagatttttaggattggtaattttttaaaaaaaaaaaaaaagtttttttaataattttttattttgtttaataaggagatattttaatttatgtataatatatatgttaataattaatttattaataaaaagtattttaatatcgatttttagttttttttattttagttttattataggggaagatagatttataaaataagacgtaattttaaatagagtatatttgaatttggagataatttcgtatttgtcgaatgataaatgtataggagttttttttatttgttttttttttggggcggtcggaagttagagggggagaatttatttaggtagagtagtagcgtagggattttgtcggtatagagtatttttattttttttttcgcggttatcggcgatgggagcgggcgttggggtttggcggagggcggttgcggagagtgtacgggtagggcgggagtagacgggttcgcggtagtggttggagagcggttgttagtttagaagggattttacgttggttgtgtttttttgatattggaaatattaggtaagtgagtttaattgtttggtgttgcgaattttatattagggagtttttttcgggttttaacggggtgaggttaagagtgtttagagttttataattggttcgagggaggagcggtaggaggatcgttaggaagttattttttttttttggagtatttgagagtagtggttgaggaatgaaaaaatgttttttcgattggtcggggattattttcgaaatttttttattttttttcgggaggtggggagcgtggattagatggtttggtttgttttgtggggttatttgttttgtagtgggtggttttggttgtttagggtgacggatataatttgaattagttttttagttaaggttggcgttttttatatatgtttttggagagttgtgcgtgtgatttattaattttagttacgaaaatttttttaatttgaagtttgttagtgatttaagcgttttttttgtattgaaacgttatcgtttagaaaagttttttttatttgcgttttttttttgagatttttgtttttaatgtggtttaggtatttattattttaaagtcgagttattgtgaagaaaatttttgttattttttttttttttgtcgtatttgttatttgttaggttgttgtttttgatatgattttttattaagtagtgttttaattttgtcgtttttttgtataaaattttttaacgattttttattgttttttggataaggtttgttataaacgtgaagttaatcggtttttttaattttagtttttattatttttttaggtaaattgtttgattttagttaggttggaaaattttaagtttttttttatttttatttttttgtttatgttgatggagtcgtattttgaggtaatggttattttttaaaggaattagtgaaattttgtttaaatttatggttttttttaagggtttgggttttttaggtttgtggatttttttttattttgattttttatagtttttgtcgtttattttttttttagttttatagaattttagattcggtattttatatttgggaaagttattttgtattttttgattttttttttgtttgtaagttttatgtttagttttgtattgtgtaaattgtttttttttttattgtatttttttataggatttaagaattgtgagttaatttagtagtattgtatgtaaatatatatatttgaatagaaaatggaatttaatggatgttaattttttatttttttatttttattttttaaaaaattattattattattttttttttttttttggttttttttttttatattttaaggttttttaatgtttagaatgtttttgttagaaataaatatttcggtcgggcgcggtggtttacgtttgtaattttagtattttgggaggtcgagacgagcggattacgaggttaggagatcgagattattttggataatatagtgaaatttcgtttttattaaaaatataaaaattagtcgggtatggtggcgcgcgtttgtagttttagttatacgggaggttgaggtaggagaatggcgtgaattcgggaggcggagtttgtagtgagtcgagatcgcgttattgtattttagtttgggcgatagagcgaaatttcgttttaaaaaaaaaaaaaaaagaaataaatattttattatgttattaggggttaagatttaaattgtttgtgtgtgaatttttggataagttatttaatttgttttaatttttttatacgtaaaatagggataataatagtatttagcgtataggaaaataatgaaagtgtttagtagagtgtttagtatcgagttagtgtttattaaaaatatttattattatatgtaaacgttgatgtttaagatggtggtatttggtagttggttaatatttgtaagttaaatgaattaatgaatagtaggatagaggtaggttgggtttttaagtttagtttttaaatttattaagaaagtaggtattgagtgattttttatttaatagtttattttggaaaagaagaaatggaattaaggaaaatgatattagaaatgggttatagttttatggagtattggtagagattataagttttataaattagaaagaggtaaagtgatttttatggttatataatggtttttgttttataaattggatttggaaaaaaaaatagttttagtgtttttgaggaatggaagtagaatttaaacgaatggaatgttaattgggagtattttttattaggtatttgtaaagagtgagaggaagagtttttaattttgattaatggtttgtttttttaaatatagtgtgttttatgttgaaaagaaagatggtggggatgtgatggggagaatgggttatgttgataataattgataatagttatttttatggtattgatatgtgaagaggaattttttaattttgtaattaatgtttgtaagtatgagatattattattgtgaaaaaaatttttgtgtttgttttaaaattttttatagtaatgtatttttttgtaggttgattttatatgatgtgaagaaattttttttttattagttttatgtttatttaattttttagttattagatattgagaatgattttattatgatatattagaggatttgtacgtattgttttcgtaaaatagtatttttttttttttttttttttaaataattgggaataatttttattaattgtttatttaaatatatatatatagtatgcggtataattataattttttttaaaggtataaagtttatttaaagatagaatggtttgggaagaaaataatcgggttatatagaattttttaattaggaagttattttaatatattagtaatgttagtaatttttagtttgagatgtattgggatttttttttaaggggttggtaaatcgaattatttatagattaaagcgcgcgtatatatatatatatatatatatatatatatatatatatatattattttaaatatatattaagtttttatgtaattagtaatatgtatttattttaaattgatattgaatttataaacgttttgtggtatgtgttttttcgttgatatataataaatatataagcgtcgttaaatggggaagaagagttttgtaaaaaataatttttttaaattaaaagggagtt

SEQ ID NO: 274 - DNA, 6134 bp, Artificial Sequence
  chemically treated genomic DNA (Homo sapiens)
ttttagttagaatgcgagtgttatagatatagttaagtttagcgttgattaatattttgttttagaagaatttttataaggttttttgtagaatgattttgtgtttagtttaggagagttagggttttttttgatttcgttttggagtttttttaagtatttaaattatttgatggggataaatggagaggatagatgagggagtagggtggagcgttttagtagaatgttttttatttagaattcgttgttattttgtagttagtaaggatgtggggttaagaattaaggttagggttttataggaaaaaggtaaagggggaggggtgggaatttaagtttatttttttttttaagtatttaaaggttttttggatggagaagagtattggagtaaaaattttagtataaattttattggggatagtgggtaattttgtcgggttagtaaaaataaatggtgtgggttttggaaaatgagggttggaggttgtgaataaagtagtggatgtgtttgtttagtatattaacgggaagaagtatttagatgggaggagtattaggggtaggagaaatgttagatagattttagtgttagggtaagaaggaagattattttgtttgtagaatagggagggtatagggatggtgttaatttgtttttgtgatggttttgagtttttatttaataatgagaaagtttgtttttttttttttttttggatgatttaggagttttgggttgggatgtagtgattttatttttagtttttttttttttggtgatgaatttttttatttttatttagaaaatagatttggattagaggtattgtatagtttttttaggattttaaaggaggaagagtttttttttttgtttttaaagttgtttgttggaagaggattttaatagttattttagtcggatgtatagtaggattatggaattttttttttgtattatagggatttattttttattttattattgtttataaaaattgatggttttttttttgagatagagtttcgttttgttttttaggttggagtgtagtggtgcgattttggtttattgtaatttttgttttttgggtttaagtaattttttgttttagttttttaagtagttgggattataggtgtttgttattataattggttaattttttgtatttttagtcgagacggggttttattattttggttaggttggttttgaatttttgattttatgatttatttatttcggttttttaaagtgttgggattaaaggtgtgagttattgtatttggtttaaaattgatgtttttttttttttttttaatatataatttgggattttttagttttttattttttttttttttttttttttttttttgagatagagttttgtttttttatttaggttggaatgtagtggtttagtttcgatttattgtaatttttgttttttgggtttaagtgatatttttgttttagtttttttagtagttgggattataggtatatattattatggttagataatttttttgtatttttagtatagacggggttttgttatgttggtttggtaggtttcgaatttttggttttaagtgatttgtttgttttggttttttaaaatgttgagattataggtatgagttattaagtttagtttttttttttttttttgagatagagttttattttgttatttaggttggagtgtagtggtacgattttggtttattgtaatttttgtttttcggttgaagtgatttagttttttaagtagttgggattatagttatatattattatgttcggttaatttttgtatgtttagtagagatagggttttattatgttggttaggttgatttcgaatttttgattgtaaatgatttatttgttttggttttttaaagtattggtattagaggtgtgagttatcgtatttggtttttttttttatttttgagatagagttttattttgttatttaggttggagtgtagtggtacgattttggtttattgtaatttttgttttttaggtttaagtgatttttttgttttatttttttaagtagttgggattataggtgtgtattttcgtggttagtttttttttttaattggttagtgttttgtggtttttttatttttttatagtggaaaatggtttaggattgattgatatgaagataagtttaggggtttatatttaatttaatttttgtatttaagttttgggttaagattttggcgtgttgagtattatttattttgtaaggaattttgtaaaattttatttgaagtattatttataattttattttttttatttaaataaggattttcgttttatttttgttaggtatattgagttttatagtttttgttttttttttttggtgtttaggtttggttttttgagtttggtggttatattaatggtatttggtatatagtttttcgataatggggatatttaggaggtttcgagatattttatagttttgggttagtaatttggatttttttttttatttttttaggtattttataatttagttttttttttttttgtgggtaaagtgtttttgaatgtttatggtttaaaataagattttttttttatttatttttaaatttttttttagatttattttagaggaagggaatagaattttttatattttagtagttggtgataggttagaatagggaagaggtgagggtttagttggttttatataggagtgtagatggaggagtaggatttttttttgttttttaagtttttttaaatatattttttaatttttggcgaggatttttttttttttatatttttttttagtttttttaaggagggagtaggagtattcgaacgcggaaatcgaggtgttagtttaaattgttcggtcggttttagttatagttggataatgttcggtttaggtttattataagttatatagttgtttttttcgtgtttaatttgtttgtgatagaaattaagggggtttcggtatttagtatttaggcggtggaatcggggttttacgtacggtttcgcgggtaggttttcggttaggattcgcggggagttacgtagttaggagggtggggttgtttatcgatttaggacgcggtaacggatcggggagggcggagttttagcgatcgttttttttttcgttcgtcggtattttttggtttttatttggtttcggcgcggtttgcgagttagcgaggttcgcgcggtgaagtattgttcgagtttcgagttcgagtttttttggttgtagtagttattgttcgtcgtgttgttttaggttatttcgaaagaaggcgttttcgtttcgtttatagtcgtattcgttcgttttttagttttgcgcgttcgtagtcgttaattatcgtttcggtcgcgtgcgtgcgtgtacgcgtgttagtgtgcgcgtgcgttcgggttagagtcgcgtcgtaatcgttaagattgaaacgtagatcgtcgggatttagtttttgttttattggggtaggaacgtcggggcggggatacgtacgtttcgtttttaggaatgattttatcgtttcggagttttatttatagattttatttattatagggaacgggggcgggtgttagcgttcgggtaagcgtataagagtggtttttggtcggaggcgagggcgggaaggtgcgggaagtgcgcgtgcgcggagtttgggttagtttgggttcgggttcgtttgtagcgggtggagtatttgcggagtcggtaatttaggttttttttttagttttcgcgtagaattagtttttttgtgtcgtcgggaaatcggtaattagaacgttttttgcgcgcggtatttaggtagttttcgagaatgtttgtattgtggtttgtttattttcgttttttttatacgttttcggtttcgcgtttattacgttcgtgtttcgttttatcgcgggtttttagtttaggtttcggggttcgtaatagtttaggtagacgagcgcgcggtagcggtagtggtaggtgaatttgtaatttgtagagaggtttggcggtgaggcggaggagttttaggtcggggaaatgtttcggagattgaagggaagttttagggagagggtcgttgttcgttaggtttcgtaggttcgatttattttagtgggttattttatattgttacgcggattttaatgttggttatttgggcgtttggaaatcggtcggaaggttataggtagagaggtttgtttaatagttggatttttatcgtttagtatagaattttttttttttttattggtaattaaaaaaataataataaaaaattgcgttttgtttttgttatttaggttggagtgtaatggcgcgatttcggtttatcgtaattttcgttttttgggtttaagcgatttttttgttttagttttttgagtatttaggattataggcgttcgttattatgtttagttaatttttgtatttttagtagagacggggttttattatgttagttaggttggttttaaatttttgattttaggtgatttattcgtttcggttttttaaagtgttgggattataggtttgagttatcgtattcggttttttattgggaacgtatatggaatatatttgtttatttatttgaaggaaaaattaaatatttttaatttacgtttgttttgtggttgttatttgtttttattttttttagattaagatattggtttttatatattttaatttttcgtttttatttttttttttatttattttagttaggtttgtttttttttttaggaaattgttcgggatagggtttttagcgatttgtgtattattaaatggaatttagtgttttattttttatttttatttttttagtattatttgaagtttgttttttttgatttttaggggttatatttttttagttttttttttattttttgtagtttttgtttagtttttttgtagattttgatttaatttttatattttacgatgaagtttgggtttagttttgattattggtttggtttgtttatatttatttgttttagatttacggttgaaatattgatttaaatttttagattagatttttcgtgttagtatttttattaggatgtttaaaagacgttttaagtgaatatggttaaaatttaatttttttttttttagttttattgttatatttgtttagttttttttttgtagtaaaaatggttattaggtttttagttattggagataaaagtttaaatttatttttgattttttttttgtttttatttttgataaatatgtttaaattattttgttttttatttttatggttattttatttttttttgagaacgttgtaatgttttagttttgttttttttttttttttttttttttttgagatagagttttattttgtcgttaaggttggagggtagtggtacgatttcggtttattgtaattttcgttttttgtgtttaagtaatttttttattttagtttttcgagtagttgggattataggtattcgttattacgtttggtttatttttttttattttttagtagatatgaggttttattatgttggttaggttggttttgaatttttgattttaggtgatttattcgttttcgtttttcgaagtgttgggattataggtatgagttatcgcgttcggttttttgtttattttttgtattttgttataattttgtgttttttttagttgaatttgtgatgtttttttgtatcggatgagagggtttttatgtatatatagatttgggatattatttatttataagtttttaaataggttagagtagtgatgtttaatttagattttatgttataataatttggggagtttttaaaatttattgatgtttagggtttatttttagtagttgatttaataggtttgcggtgggatttaggttagcggggaggattgtaaaagtatttttggtgattttagttggtgtttatttaggggagagtaatttttgtttgttggcgatttttaggggtgtagaaggattgttgggtgtgtggttgcgtgtatattttagtatttgatttattgggttag

SEQ ID NO: 275 - DNA, 6134 bp, Artificial Sequence
  chemically treated genomic DNA (Homo sapiens)
ttgatttagtgaattagatgttaaaatatgtacgtagttatatatttagtagtttttttgtatttttgggaatcgttagtaagtaaaggttgtttttttttgggtagatattagttggaattattaggggtgtttttatagtttttttcgttagtttggattttatcgtagatttgttgaattaattgttgggagtggattttaggtattagtaaattttaaaaattttttaaattattgtaatatggagtttgggttgagtattattgttttggtttatttaggaatttgtggatggatagtgttttaggtttgtgtgtgtatggagatttttttattcggtataagaggatattataaatttagttggggggagtataaagttgtgatagaatgtaaagaatgaataaggggtcgagcgcggtggtttatgtttgtaattttagtatttcggaaggcggaggcgggtggattatttgaggttaggagtttaagattagtttggttaatatggtgaaattttatgtttattaaaaaataaaaaaaaatgagttaggcgtagtggcgggtgtttgtaattttagttattcgggaggttgaggtgggagaattgtttgaatataggaggcggaggttgtagtgagtcgagatcgtgttattgttttttagttttggcgatagagtgagattttgttttaaaaaaaaaaaaaaaaaaaaaaagaataaggttgggatattgtagcgtttttaaagagaaataaagtagttatggagataagaagtaggatgatttgggtatgtttattagaggtagagataagggagaaattaaagataagtttgggtttttgtttttagtaattgggagtttagtggttatttttgttgtaaagaggaagttgggtaagtgtagtagtgaggttgaagaaaagggaattaaattttggttatgtttatttgaaacgttttttagatattttagtgaaggtattggtacggaggatttagtttgagggtttaggttagtgttttagtcgtggatttggggtagatgaatgtagatagattaggttagtgattaggattgagtttagattttatcgtgagatatggaagttgagttagaatttgtaaaggagttgagtaggagttgtagggggtaggaggaaaattgggagagtgtagtttttgggagttaaagggagtaagttttaaatgatgttgagggggtgagaatggagaatggaatattggattttatttggtagtatatagatcgttgaggattttgtttcgggtagttttttggaggaagaggtaagtttggttggagtgggtagaggggagagtgaaggcgaaggattagagtgtatagagattagtgttttggtttgaggggagtagagataggtgataattatagggtagacgtaggttaaaggtgtttagttttttttttaagtaaatgggtagatgtattttatatacgtttttagtgaagggtcgggtgcggtggtttaagtttgtagttttagtattttggaaggtcgaggcgggtggattatttgagattaggagtttgagattagtttggttaatatggtgaaatttcgtttttattaaaaatataaaaattagttgggtatggtggcgggcgtttgtaattttaggtatttaggaggttgaggtagaagaatcgtttgaatttaggaggcggaggttgcggtgagtcgaaatcgcgttattgtattttagtttgggtgataaaagtaagacgtagttttttgttgttgtttttttaattgttaatgaggaaaggggaagttttgtgttaggcgatagagatttaattgttgagtaggtttttttgtttgtggtttttcggtcggtttttagacgtttaggtggttaatattagagttcgcgtagtagtgtgaggtaatttattgagataggtcgggtttgcggagtttggcgagtagcggttttttttttggggtttttttttaattttcgggatattttttcgatttggagttttttcgttttatcgttaggtttttttgtagattgtaagtttatttgttattatcgttgtcgcgcgttcgtttgtttggattgttgcgggtttcgggatttgggttgggaattcgcggtggagcgggatacgaacgtggtgagcgcggggtcgagggcgtatgggaagggcgaggatgggtaggttatagtgtaggtattttcgagggttgtttgggtgtcgcgcgtaaggagcgttttaattgtcgatttttcggcggtatagagaggttaattttgcgcgggggttgggaggggagtttggattgtcggtttcgtaagtattttattcgttgtaagcggattcgggtttaggttgatttaggtttcgcgtacgcgtatttttcgtattttttcgttttcgttttcggttagaggttatttttgtgcgtttgttcggacgttggtattcgttttcgttttttgtggtaggtggggtttgtgagtggagtttcggagcgatgaggttatttttgggggcgaagcgtgcgtgttttcgtttcggcgtttttgttttaatgagataagagttagatttcggcgatttacgttttagttttaacggttgcggcgcggttttggttcgggcgtacgcgtatattgatacgcgtatacgtacgtacgcgatcggggcggtggttggcggttacggacgcgtaggattgggggacgggcgggtacggttatgggcgaggcggaggcgttttttttcgaaatgatttggagtagtacgacgagtagtggttattgtagttaagaggattcggattcggagttcgagtagtattttatcgcgcgaatttcgttagttcgtaggtcgcgtcgggattaggtgggagttagggggtgtcggcgggcgggaggggaagcggtcgttggagtttcgtttttttcggttcgttgtcgcgttttgggtcggtgggtagttttatttttttggttacgtggtttttcgcgggttttggtcggggatttgttcgcggaatcgtgcgtaagatttcgattttatcgtttagatgttgggtgtcggggtttttttggtttttgttatagataggttgaatacggaaaaagtagttgtatggtttgtggtagatttgagtcgggtattatttagttatgattaaagtcgatcgagtagtttggattagtatttcgattttcgcgttcgaatgtttttgttttttttttggggagattaggggaggatgtggagagggaagagttttcgttaggaattgagaagtatgtttaggaaaatttgagaggtagagagagattttgtttttttatttgtatttttgtatggagttagttgagtttttattttttttttgttttggtttgttattagttgttggaatgtggaagattttgttttttttttttagggtggatttggagaaagatttgggaatagataggaaagaagttttgttttggattataagtatttaggagtattttatttataggaagggggaaagttagattataaaatgtttaaagaggtggaaaaagagatttaggttattaatttaggattgtaaggtgtttcggaattttttaggtatttttattatcggagaattgtgtgttagatgttattggtgtgattattaggtttagagaattaggtttaggtattaggaaaaagaaatagggattgtgaagtttagtatgtttggtagaaatggggcggaaatttttatttaagtaaagaaagtggagttgtgagtgatgttttagataaaattttataaaattttttataaaatgggtggtgtttagtacgttaaaattttagtttagagtttgggtgtaagggttgagttgagtgtagatttttgggtttgtttttatgttagttagttttgagttattttttattgtggaaaggtgggaaaattataagatattaattaattgaaaaggagggttagttacggaggtgtatatttgtaattttagttatttgggagggtgaggtagaaggattatttgaatttgggaggtagaggttgtagtgagttaagatcgtgttattgtattttagtttgagtgatagagtgagattttgttttaaaaatagaaaaggaagttaagtacggtggtttatatttttaatgttaatgttttgggaggttaaggtaggtggattatttgtaattaggaattcgaggttagtttggttaatatggtgaaattttatttttattaaatatataaaaattagtcgggtatggtggtgtgtgattgtagttttagttatttgggagattgaattattttaatcgggaggtaaaggttgtagtgagttaagatcgtgttattgtattttaatttgggtgatagggtgaggttttgttttaaaaaaaagaaagaaggttgggtttggtgatttatgtttgtaattttagtattttgggaggttaaggtaggtagattatttgaggttaagagttcgagatttgttaggttaatatagtaaaatttcgtttgtattgaaaatataaaaaaattatttggttatggtggtgtgtgtttgtaattttagttattggggaggttgaggtaggagtattatttgaatttagaagatagaggttgtagtgagtcgagattgggttattgtattttagtttggatgagagagtaagattttgttttaaaaaaaaaaaaaaaaaaaaagaaagaataggaggttgagaagttttaagttatatgttaaaaaaaaagaaaaaaatattagttttaggttaggtgtagtggtttatatttttaattttagtattttggaaagtcgaggtgggtggattatgaggttaggagtttaagattagtttggttaaaatggtgaaatttcgtttcgattaaaaatataaaaaattagttagttgtggtggtaggtatttgtaattttagttatttgggaggttgaagtagagaattgtttgaatttaggaggtagagattgtaatgagttaagatcgtattattgtattttagtttggaaaatagagcgagattttgttttaaaaaaaaaattattagtttttatggatagtggtagagtggagggtgggtttttatggtgtagaagggaaattttatggttttgttgtgtattcgattgggatggttgttgaaatttttttttagtaggtagttttggaaatagaaaaagaaatttttttttttttagaattttggaagggttgtgtagtgtttttaatttaagtttgttttttgagtgaagatagggaggtttattattagaagggaaggggttggaaatgaggttattgtattttagtttagggtttttgggttatttaggaagggaagaaggagtaagtttttttattgttaggtaggagtttagagttattataagaataagttagtattatttttgtgttttttttgttttgtaaataaaatgatttttttttttgttttggtattagagtttgtttggtattttttttgtttttagtattttttttatttgggtattttttttcgttggtgtattgaataaatatatttattgttttatttatagtttttagtttttattttttagggtttatattatttgtttttattaattcgataaggttgtttattgtttttagtaaggtttgtattggggtttttattttagtgtttttttttatttaggagatttttggatatttggggaagaaaatgagtttaaatttttatttttttttttttattttttttttgtaaggttttggttttagtttttagttttatatttttgttggttgtagaatagtagcgggttttgggtaaggagtattttgttaaaacgttttattttgtttttttatttgttttttttatttgtttttattagatggtttaagtgtttaaggggattttagggcggagttagggagaattttggtttttttgggttaggtataagattattttataggaaattttgtgggaatttttttgggataaagtattggttagcgttgagtttagttgtgtttgtgatattcgtattttaattaggg

SEQ ID NO: 276 - DNA, 6210 bp, Artificial Sequence
  chemically treated genomic DNA (Homo sapiens)
gggttcgtaatagtttaggtagacgagcgcgcggtagcggtagtggtaggtgaatttgtaatttgtagagaggtttggcggtgaggcggaggagttttaggtcggggaaatgtttcggagattgaagggaagttttagggagagggtcgttgttcgttaggtttcgtaggttcgatttattttagtgggttattttatattgttacgcggattttaatgttggttatttgggcgtttggaaatcggtcggaaggttataggtagagaggtttgtttaatagttggatttttatcgtttagtatagaattttttttttttttattggtaattaaaaaaataataataaaaaattgcgttttgtttttgttatttaggttggagtgtaatggcgcgatttcggtttatcgtaattttcgttttttgggtttaagcgatttttttgttttagttttttgagtatttaggattataggcgttcgttattatgtttagttaatttttgtatttttagtagagacggggttttattatgttagttaggttggttttaaatttttgattttaggtgatttattcgtttcggttttttaaagtgttgggattataggtttgagttatcgtattcggttttttattgggaacgtatatggaatatatttgtttatttatttgaaggaaaaattaaatatttttaatttacgtttgttttgtggttgttatttgtttttattttttttagattaagatattggtttttatatattttaatttttcgtttttatttttttttttatttattttagttaggtttgtttttttttttaggaaattgttcgggatagggtttttagcgatttgtgtattattaaatggaatttagtgttttattttttatttttatttttttagtattatttgaagtttgttttttttgatttttaggggttatatttttttagttttttttttattttttgtagtttttgtttagtttttttgtagattttgatttaatttttatattttacgatgaagtttgggtttagttttgattattggtttggtttgtttatatttatttgttttagatttacggttgaaatattgatttaaatttttagattagatttttcgtgttagtatttttattaggatgtttaaaagacgttttaagtgaatatggttaaaatttaatttttttttttttagttttattgttatatttgtttagttttttttttgtagtaaaaatggttattaggtttttagttattggagataaaagtttaaatttatttttgattttttttttgtttttatttttgataaatatgtttaaattattttgttttttatttttatggttattttatttttttttgagaacgttgtaatgttttagttttgttttttttttttttttttttttttttgagatagagttttattttgtcgttaaggttggagggtagtggtacgatttcggtttattgtaattttcgttttttgtgtttaagtaatttttttattttagtttttcgagtagttgggattataggtattcgttattacgtttggtttatttttttttattttttagtagatatgaggttttattatgttggttaggttggttttgaatttttgattttaggtgatttattcgttttcgtttttcgaagtgttgggattataggtatgagttatcgcgttcggttttttgtttattttttgtattttgttataattttgtgttttttttagttgaatttgtgatgtttttttgtatcggatgagagggtttttatgtatatatagatttgggatattatttatttataagtttttaaataggttagagtagtgatgtttaatttagattttatgttataataatttggggagtttttaaaatttattgatgtttagggtttatttttagtagttgatttaataggtttgcggtgggatttaggttagcggggaggattgtaaaagtatttttggtgattttagttggtgtttatttaggggagagtaatttttgtttgttggcgatttttaggggtgtagaaggattgttgggtgtgtggttgcgtgtatattttagtatttgatttattgggttagaaaagggtgtttgttaaataaagatttaataaaatttttgtttgtagggggtttattaaaggttttaaatttttttaggtttttttttataggtggtaatttttttttattttaaaggttttggagggggttatgagtgtttgagaagaggtaagtttgggaagatggatttcgaggatagtaggtataaatttttttttaagaagggttaaggtattttaaagataagaaatttaaaattagcgtatttttatatataagtagttatttttgtttatttgtggtttagatacgagtggagtgcgataagggataaattattttcgcgtattttttagcgatggggcgaaagtaacggatttagttttcgggagttgttttcgtcgattttttttgtcgcgatttgattcgcggcgattgcgttgttttttggttgtttttttcgttttcgtaggcgcgcggggttattatttacgcgcgtattgtaggtttttgcgtacgacgttttagatgaagtcgttatagaggtcgtattacgtgtgcgtggcgggtttcgcgggttggaagcggtggttacggttagggattagttgtcgtgtggggttgtacgcggtgtttcgcgcgatgcgtagcgcgttggtacgttttagtcgggtgcggttttttttagcgcgtttagcgggtgttagttttcgtagtttaatgagtttaggttttttcgatatggttcggttgggttcgtgtttcgttggttttgggcgttagtaagcgcgggtcgggcggggttatagggcgggtttcgattttagcgttttttttaggatttagattgggcggcgggaaggagttgaggagagtcgcgtaatggaaatttgggtgtagggattgtggggttcgaaggcggggttgggcgcgttttcgtagagtttttttcgttttgtttttttttttttttttcgttttttttttatattttatttcggacggttataacgacggcgatcgtaaagtattacgcggagatattcgtgtttttggaggttagttttattgtgttagaggaagagggtttttatattcggttttggtttttttggttcggtttgttgaagtaatatatttggtttatttattgggtggggtaggaagtttcgagtttttatttggggtgaggaggagggagatcggttagtagttttatcgttcgttttgttttttattgcggagattggggtttcggtagaggttggatcgtgattttgaggtttaggggtgtattttgggtggatttttttggtatgggtggtcggtttttagtaattgtagtttttatttggttttgttattttgggttgttaggatataagtttttttatgttttttttagtgtttgatttggtattttttgtaggtaggtgggtattgaggatggtaatgtatgtgggggatgtgggagtagggtttagaggtttaaggttttaggatatttttatttgtagtaatattatttattttggtatcgtgagtagcgtttagaagtttttgtattgtagtaagtatagcggggtcgttttggagttattgtttttagtatatttagtttgtaggttttagtttatttgggggaaagttaggaaggtttgattggttttggaaggtgggggtattttatttatatttatgttttttgtattttttttattttttttgttatttttataggttttattttcgcgtttgtagtcgtaggttttgttttgaggggttgaatatatgttggagttggtgtttggtaattgtttgttatttgtttttgttttttcgttttagtcgtttttagatttttgggatttaggagagagaagtggagagtggtaggaaggtgttggtaaagtgggatagtggttttgagtagttaattttttagtgtttatttgttttaatattaggttttttttaggaggttgggttttagttagggttagatgggttaggaaattttgtaagtgggttaggttgggtagttggtttagtagtgtgtttgtgaggaaggttcgaagttgtaagggtgtttagtggaggttagtgtgatgtaggtgttggttagggggttaaggaaaaggaaggggttgggttgggttgagaatgtttgtgggggtttatgttttattagttggtgtgttatttgaggtttaaggattgaaaagagtattggggttgaggtgggtgggtaaagataaatagtagggacgtagtcggggtaggatggggagggcggtattggggttgtgggggttggtgcggagggagtttgattttgagtagtcgttttttggtaaaatttgtgaggtagtagcgcgtttgagttttagggtttagtagtaggttgtatagggcgatttatatttgttcgtttaatttgtttagtttttgttgttttgagggggttatagtatgttaacggttgttttcgaattgttgtagtttgtttggggagaggaattagtatattgggtgtagacgttgaattttttttaagtgagttagttgtgggggttgggagattgattattgtttgggaatgggagaatttgggttgtaggatttgtttaggttatagggttgttgattttagagtagggtgagttttagtagtggatatatgggtttggtttgttgtagagtttaggtttaggttaattttggttgaggtattttggtatttttagtgggtttggggatagggtttgttttcgtgtgtgtaagttgtttttttttattaaaaagatattttgaagtagtagtttggggtttaggttggtgggggaggattttatttttttttcgtcggttttagggattatgttttagtagttttattaggaggtagggtaggttgtgtgtgttaagtatacggtttaaggtgttgagagagaggttaggggtagggacgttgtgaaggaggtgagtagaggtaggttataggttcggttttttagttttttatagtaggtttaggtttagtcggattgtttatttgtttatatagtttgtgatgtagcgtagtattgagagggtttttagtgtaattttaaattttattagttttgtttgtttttgtagtttttgggaggttatatagtgtttacgttgggttatttttatttgcgtaggttttggggaatttagatttaggtttttataattttaggtaattttaatttatttgtatggggttgttgttttgggattttttttttttaggggggttattatagttattttgggttattagtagggttagtttgcggtggtaatagtttattaagtttaagatagtgttttttgttgatttatatattttttgggaaaaggaggagggaaattttttgtgtttgatgttttttttatatagatataatttttttttttgttaggttttgattcggaattgtggtttatgggtagagatagttttttattttgtggaagaatattgtttttaagaggttgatgatggaggtttcgtggtgtatttgttagataaagagaaggatagggtttgaggaagggataggggttattagttttttttttcggtttagagttttttgaaggagtgagaagaggtatgaattaggggtttagtttattattatgtagatggggaaggtgttttggggtttgaagttttttattttgtagaatatagggaatattttttgtttttatatttttattgcgattagtttttttattagtgttgggatttttgaagggtagggtaaaggatagggatgagatgggtttatttttgtttggtaatttttttattttcggtttagtttaattttgatatttttaaatattgttgggtttttaaattattttagatttatgagtattttttttgattttttttttgtattttggatttttattattagttgtttttaatatttttgtggatgttttttatgtttatgtgattggtttttgtttagtttttagattgttttgttttgtttgtatttgtatttttattttttgttcgtttatttaggtattttttttaagtt

SEQ ID NO: 277 - DNA, 6210 bp, Artificial Sequence
  chemically treated genomic DNA (Homo sapiens)
ggtttgaaagggatgtttgaatgggcgggtagaggataagggtgtaggtgtaggtagggtaaggtagtttgggaattgggtaggagttagttatataagtatgagggatatttatagaggtgttgggagtagttggtaatgaaggtttaaggtgtaagagagaagttaggaaggatatttatgggtttggaatagtttaggggtttagtagtgtttggggatattagggttgagttgagtcggggatgggagggttgttaggtaaaggtaggtttattttatttttgttttttattttattttttaaaggttttaatattggtggaggagttgatcgtagtggagatgtggaagtagaaggtgttttttgtgttttgtagggtggaggattttaagttttagaatattttttttatttatatggtggtgagttgggtttttggtttatatttttttttatttttttagagggttttggatcggggaggagagttggtagtttttattttttttttaggttttgtttttttttttatttgataggtgtattacgaggtttttattattaattttttggagatagtgtttttttataaggtgagggattatttttgtttatgggttatagtttcgggttagggtttggtaggaagggagattgtgtttgtgtggggaaggtattagatatagaaagtttttttttttttttttttaggaggtgtgtgagttagtagaagatattgttttggatttggtagattattgttatcgtaaattgattttgttggtggtttagagtggttgtggtggtttttttgagggggagggattttaggatagtaattttatgtaggtgggttgaggttatttagggttgtgaaagtttaggtttgggttttttaaggtttgcgtaggtgagggtggtttagcgtgaatattgtgtgattttttaggagttgtagaagtaggtagagttgatggaatttgagattgtattgaaggtttttttagtattacgttatattatagattgtgtggataggtgagtagttcgattgggtttgggtttattgtggagggttggaagatcgggtttgtagtttgtttttatttattttttttataacgtttttgtttttagttttttttttagtattttgagtcgtatgtttagtatatataatttgttttgttttttggtggaattgttggagtatagtttttggagtcggcgggaaggaggtagggtttttttttattagtttaagttttaggttattgttttagggtatttttttgatagaggggggtagtttgtatatacgaagataaattttgtttttaagtttattgaggatattaggatgttttagttaaggttggtttagatttgagttttgtagtaggttaggtttatgtgtttattattgaggtttattttgttttggggttagtagttttatagtttgggtaagttttgtagtttaggtttttttatttttaggtagtggttagttttttagtttttatagttggtttatttgaagagaatttaacgtttgtatttagtgtgttggtttttttttttaggtaagttgtagtagttcgagggtagtcgttggtatattgtggtttttttagagtagtaaaagttgagtaagttggacgggtaagtgtggatcgttttgtataatttgttgttaagttttgaggtttaggcgcgttattgttttataagttttgttaagggacggttatttaaggttagatttttttcgtattagtttttatagttttagtatcgttttttttattttatttcgattgcgtttttgttgtttatttttgtttatttattttaattttagtgttttttttagtttttgggttttaggtgatatattagttagtgggatatgggtttttataggtatttttagtttaatttagttttttttttttttttggttttttggttagtatttgtattatattggtttttattggatatttttgtagtttcgggttttttttatagatatattgttggattagttgtttaatttggtttatttgtagagttttttggtttatttgattttaattgaaatttagttttttaagaaggatttggtgttggaataggtaggtattggaaagttagttgtttaggattattgttttattttattagtatttttttgttattttttattttttttttttagattttagaaatttgggagcggttggagcgagaaaatagaggtaagtggtaggtaattgttaagtattagttttagtatgtgtttagttttttagagtaggatttgcggttgtaggcgcgaaggtaaggtttgtggaaatggtagggagggtggaggggatgtaggaggtatggatgtgggtggggtgtttttattttttagggttagttagatttttttgatttttttttaggtgggttgagatttataggttggatgtgttagaggtagtggttttagagcggtttcgttgtgtttattgtagtgtagaggtttttaagcgttgtttacgatgttagaatgagtggtattgttgtaggtgagggtattttagaattttggatttttaagttttatttttatattttttatatgtattgttatttttaatatttatttgtttgtagggagtgttaagttaagtattgggaaaagtatggaaagatttgtgttttggtagtttagggtgatagagttaaatgagggttgtagttgttgagggtcgattatttatgttaagggaatttatttagaatgtatttttgaattttaagattacggtttagtttttgtcggagttttagttttcgtagtggagagtagagcgggcggtaaagttgttgatcgattttttttttttttattttaagtgaaggttcgagattttttgttttatttagtgggtaggttaagtgtgttgttttagtaaatcggattaggagggttagggtcggatgtggggattttttttttttagtatagtaaagttggtttttagaaatacgggtattttcgcgtggtgttttgcggtcgtcgtcgttgtggtcgttcggggtggggtgtgaggaggggacgaaggagggaaggaagggtaaggcggggggggttttgcgagagcgcgtttagtttcgttttcgggttttatagtttttgtatttaggtttttattgcgcggttttttttagttttttttcgtcgtttagtttggattttgggggaggcgttgaagtcggggttcgttttgtggtttcgttcggttcgcgtttgttagcgtttaaagttagcgaagtacgggtttaatcgggttatgtcgggggagtttgagtttattgagttgcgggagttggtattcgttgggcgcgttgggaagggtcgtattcggttggagcgtgttaacgcgttgcgtatcgcgcggggtatcgcgtgtaattttatacggtagttggtttttggtcgtggttatcgtttttagttcgcggggttcgttacgtatacgtggtgcgatttttgtggcgattttatttggggcgtcgtgcgtaaaggtttgtagtgcgcgcgtgagtagtggtttcgcgcgtttacgagagcggaaggggtagttaaggggtagcgtagtcgtcgcgggttaagtcgcggtagagggggtcggcggggatagttttcgaggattaggttcgttattttcgttttatcgttgaagagtgcgcgaaaatggtttattttttgtcgtattttattcgtatttgggttatagatgagtagaggtggttgtttatatgtaaaaatacgttgattttaagttttttatttttaaaatgttttggttttttttgagaaagggtttgtgtttattgttttcggagtttatttttttaggtttgtttttttttaaatatttatgattttttttagaatttttagggtgaagggaaattattatttatgggagggagtttggaaaaatttagaatttttggtgggttttttgtaagtaggagttttgttgagtttttatttagtaaatatttttttttgatttagtgaattagatgttaaaatatgtacgtagttatatatttagtagtttttttgtatttttgggaatcgttagtaagtaaaggttgtttttttttgggtagatattagttggaattattaggggtgtttttatagtttttttcgttagtttggattttatcgtagatttgttgaattaattgttgggagtggattttaggtattagtaaattttaaaaattttttaaattattgtaatatggagtttgggttgagtattattgttttggtttatttaggaatttgtggatggatagtgttttaggtttgtgtgtgtatggagatttttttattcggtataagaggatattataaatttagttggggggagtataaagttgtgatagaatgtaaagaatgaataaggggtcgagcgcggtggtttatgtttgtaattttagtatttcggaaggcggaggcgggtggattatttgaggttaggagtttaagattagtttggttaatatggtgaaattttatgtttattaaaaaataaaaaaaaatgagttaggcgtagtggcgggtgtttgtaattttagttattcgggaggttgaggtgggagaattgtttgaatataggaggcggaggttgtagtgagtcgagatcgtgttattgttttttagttttggcgatagagtgagattttgttttaaaaaaaaaaaaaaaaaaaaaaagaataaggttgggatattgtagcgtttttaaagagaaataaagtagttatggagataagaagtaggatgatttgggtatgtttattagaggtagagataagggagaaattaaagataagtttgggtttttgtttttagtaattgggagtttagtggttatttttgttgtaaagaggaagttgggtaagtgtagtagtgaggttgaagaaaagggaattaaattttggttatgtttatttgaaacgttttttagatattttagtgaaggtattggtacggaggatttagtttgagggtttaggttagtgttttagtcgtggatttggggtagatgaatgtagatagattaggttagtgattaggattgagtttagattttatcgtgagatatggaagttgagttagaatttgtaaaggagttgagtaggagttgtagggggtaggaggaaaattgggagagtgtagtttttgggagttaaagggagtaagttttaaatgatgttgagggggtgagaatggagaatggaatattggattttatttggtagtatatagatcgttgaggattttgtttcgggtagttttttggaggaagaggtaagtttggttggagtgggtagaggggagagtgaaggcgaaggattagagtgtatagagattagtgttttggtttgaggggagtagagataggtgataattatagggtagacgtaggttaaaggtgtttagttttttttttaagtaaatgggtagatgtattttatatacgtttttagtgaagggtcgggtgcggtggtttaagtttgtagttttagtattttggaaggtcgaggcgggtggattatttgagattaggagtttgagattagtttggttaatatggtgaaatttcgtttttattaaaaatataaaaattagttgggtatggtggcgggcgtttgtaattttaggtatttaggaggttgaggtagaagaatcgtttgaatttaggaggcggaggttgcggtgagtcgaaatcgcgttattgtattttagtttgggtgataaaagtaagacgtagttttttgttgttgtttttttaattgttaatgaggaaaggggaagttttgtgttaggcgatagagatttaattgttgagtaggtttttttgtttgtggtttttcggtcggtttttagacgtttaggtggttaatattagagttcgcgtagtagtgtgaggtaatttattgagataggtcgggtttgcggagtttggcgagtagcggttttttttttggggtttttttttaattttcgggatattttttcgatttggagttttttcgttttatcgttaggtttttttgtagattgtaagtttatttgttattatcgttgtcgcgcgttcgtttgtttggattgttgcgggttt

SEQ ID NO: 278 - DNA, 6155 bp, Artificial Sequence
  chemically treated genomic DNA (Homo sapiens)
gtttgggaagttgaggttgtagtgttttgttattgtattattgtattttaatttggattatagagtgagattttgttttaaggggaaaaaaaaaaaaaaatttaatttttaaaagtattttttgaatgtaaaggtagtaagttaagaaataattaggaaattatatttattgaataatttatttaagtaatttttttttttaggaaataatgataattttagcgtatgtatattttaaagatgtgtagataggtttttgttttttatttttttttaatttttatttaattatggaaggaatttagcggggagttttgttttaagttgtggttcgaaaaataagtatggtattgataggtagtttatgaatggtttgattattattttgataagggttttatttttatttttttttagtttttataggttttataatgtttgggttttattgatattggtattttggtttttagtttttttaatgattgtaaaaaatgtttgtgtttattgtaaaaagataattttgttttttaaagtgattagttaaatatatagaattttagtgtgtttgttatttatttgttaaatttttggtttataatttatgttttttttcgtgggggagaagaatgttttgtttagaaggtatttttggtgtggtttcgttttttgttagtgaaattagtttatgaaaagaggtttggttttgggtgtagatggaagtttggtttgattaattggtttttatcggtagtttagaggtttttttattaataaggagattttgttttgtaattaatttaggtatttggaagtagttcgatatttgggggtgtatcgttgtagttttttttggagttggagaaatttatgagtaagaatgggtttatgatatatttatttttattttattttttttttcgttgtatgattgtatggagtttttttgatttttagtagtgttatttgtagtttggtagtgagaaatagtaggtatggatggggtttatttttagtaatagtagcgttagttgggttatattttggtattgttttttaggaaatatattttgtgttgtattgattagatttgggattatttggataatgttttatgttgtttttttaggatagttgtgtgtttaggagggagtttttattgaaaggaaagaattgttgatttataagtttttgttatcggtttggtggttattaatgtgtttagaggtttgaagatgggcgtgtgaggagtttgatttagttttagaggttttgtttttcgatttatttgtgtgtttattgtatttttgtgttggtaggattttaatttttatttttagtatttgtgtggatagagagtttagtgtttaggaaagggttgggttttaggtttgtgatgtagatttcgtggtggttttgtgattttttttggtcgtttttaaagtagatagggagtttagatgttatttgtgtattttttttgttgttttacgagtgagtaaatagggttatagatagtattaagggatttgcgtatggttgtgtagtttatttatggtatttttggttttgggttttagtttttgaatttttttttggtttgacgtttttttgtgaatgtttaggaaaatgttatagggttgtttggtagtattgtaattataatttgtgttttattgtaaatgagaattaggttgaggattgattagttggttagaggttttggtttgggtgtaaatgaagatttttattagatgtagagagatttttaatggatatagtttttagggtagacgaagttttaggggttttgttttgttttggttacgttggttttgtagggagggttggggtttttttttttttgtgtgtttatatattagatttgtgagtggattttagaagttatttaaagtattgtattgatttttaaatttagtaagaagtagagtaggaagaggagaagaaggatttacggtttatggggattaggtttattagtatagaggatttagaagttaattttggtattgtttgttgtttttttggggaagttagagagaaaggtttattgcggggatttttttttagatttaagtcgtagttgtttgtttttttgtttttttagggatggatttgttttgttatttgggtagttagatagaacggttttttgtgttggttggatttgttattcgtgtgtatattttttggggtagaagttacgtttggtttggtgggttttggttttttattattttattggaatttagttttttttagattgttggttttttacgtgtggtttagggattatagtaggggttagtattatttgggatttgtgataaatgtagattttttgtttattttagttgaattagaagttttgggggtggggtttagttttttgtaaataagttttgtgtatattgaatttggagaattattgtgttggatttcgagtttttttgtttggatgagaggtttaagagtattgtatgttagtggttttttttttttttttatatttttagggattggagttggggttgtttagaatgaaagatgaatgggggagggagaaggtttagggttgattttttataagtttgtttttttgttttatgttgttttttattttattatgttgttgattgggtaggatttatttttatggataatgggagattttagagtaaagtgtacgttgtttcgattgggtagtagagtatgtttgtttttttatggattgtttttaagtacgttgtatatatttggttgagaaaaataattaaaggtattttttgggaatgattttagtaatattttttggtataagaagtattatttgatggtaatagtggttatagaattaattagtattttatcgattttgatatgttatttttgaattatgttgttgttattgttaatagtaattgtttgtttttttatagtgttaataattaaattttttattggtaaaggaaatgtattgtggagtaggtggtaaagaggatttgtgttacgtggttagtaggttagaggggattgtggttaagggtaggtgcgttaatatcgatttttgtgtttttaggaattattttttttacgttttcgataattagaatttgtagtaattgtgggattgggattatcgtaatttgattattaaagtagggaaaatgtattttgtttttaattttaaattatgtgttttcgaaatttatcgtatggaggaagtgacggggattaaagggcgttaaagtaaaggggatataaatattaggaataacggggagagagttttttgtgagtgatagtatttaaaatatcgtgggtttaattattatgataatagtagattttttttttatgtgtgatggtagtttttttttgcggttttttttggttttatatgggggattattagattattttaattagtattttgtttttatttatatgttattataattagtagtgggtagatacgtgatgtattcgtatttataaattttgtatatttttgtgagtgtgtgaaatatttataagtaggtttttaaattttaaagtgttgtttatagaatgtatagttaaatgtttttttatatataggtgtatagttagatatttttttttttttttttttttttttttttttttttttttttttttttttttttttttttgagatggagttttattttgttatttaggttggggtgtagtggtatgattttggtttattgtaatttttatttcggtttaagcggtttttatgttttagtttttcgagtagttgagattatagatatttgttattatgtttagttaatttttggatttttagtagagacgggattttattatgttggttaggttggttttaaatttttgattttaaatgatttacgtgttttagttttttaaagtgttgggattataggtttgagttattatgttttgttcgattattttttagggaagagttagtgtgttttagttttatgagttttatttttttgtttttatagaagggaagtataggtttgtggggtggagggggttttgttttaagcgtagtttttgtgggttacgggttttttgttttttatattcggtcgttttgttttttttattttaatatgaaaaagatggagtgagtttgtagttttgagttgatattgttttttaaattgagaataatataattatagttttgtattgtttataaaattttaaggttttatattagagatatagtagtgttttttttatttaattttgtgtagaatacggttgttgagaatggcgtggttttttggttggatagggttataaaagtaaatcgtttttttatttttggtttttaataagggaagggtattagaaaaaaagtaatttgtatgatgaagggtgatttgtgcgtgtgtgtagatagatatatatgtagggaggtaaattagaatcgatgcgtgtttggttttggtttgtttcgttggtgtttggatttatttggcgatatttgttgttttgggggattttagagggaagtacgttgattgatttagggttgaatagtaggttgacgattagcgtcgtttttcgttttttgtttattttatttttgtaaagtttttgttttgttttttgtttagattatagtaaaatcggatgtattcgagtattttagagtgtttgtttttttagagttagttagtttgatttgttagattataatatatagtagtcgtttatttttttttgaaagtaaaattatggttttttttttaaataatattttagtaggaattgtgatattttttaattttagttgcgtatattttgttttaaagattttttagtttttttattgtttttagtttttttgttttattttttgagtgtgtagtgggatttaggtagataagagggcgaaaggataattcgttagagagttttgggtttttatgagggtgggtagttattagtttttttttggtttttatcgtagtttgaatttggtttaaggaataagagagatatttggtatagtttttttgttatattcgttagttaggttattttttatagagtacgttaggtttggttaagtgagatttttttgttagtgtttaatttagtttttcgttgtttgttagttttagttggaggttttataggagtttttgtgtttttttagtttgatattaagtttagattaagaaaagtttttttttgtggtatatttgtagttttttatttgtttttggtggttgtatacgaataggtagatatttataattgtagaataagtgttatcgttttttttaagaagttttagggtagtttaaaggtttatttttattttattaggtttttttttatagttaggattttagggatggagaagaaagataagtttatttcgtttattgaagtcgttttttgtttttaggttaggaaatttaggtttatgtttaagtttttgggtaagtagttagcgtaattgattgatttaaaataaaggatggagtttttggagttttgtatagtgaaatgtatgattttttagtggaaaacgagaaagttattgaggaagtttagaagggaatttagtatatatagttagttttggggaagggggaagtagtgttaagtaagataggtgttttttagagatatatgaatttttgttatttacggatgtattttttgttttaggtgaaagtgacgttttgtattttatttttattattacgtcgaagaatcgtattattataatttggtatcggtatcggttttttgattatagggattttattagttttatcgtttattataaggaagcgtgagtttttgttttgggtgatgttattttgttgatagggttacgaatgggagaggttagtttttcgatttttgaatgggttggttgaatatagggggttagtagagtttttagggagagttacgttaaatatttttattttatttttatgtattttttcgggttgtttttgtgatgttagttatagttagtgatagttatgattgggaaagtgttagttcgaggtttgttattttttagtgagtgattagaggtgtttgaataaaataaatttaaaatggggaaagtttgttttttt

SEQ ID NO: 279 - DNA, 6155 bp, Artificial Sequence
  chemically treated genomic DNA (Homo sapiens)
gaaaaagtaagttttttttattttgggtttattttatttaaatatttttaattatttattaaagaatgataggtttcgagttaatatttttttaattatggttgttattggttgtgattgatattatagggatagttcgagagggtgtatgaggatgaagtagggatgtttggcgtggttttttttggggattttgttgattttttgtatttagttagtttatttaaggatcgaaagattggttttttttattcgtagttttgttaatagaatggtattatttaaagtagaaatttacgtttttttgtagtaaacggtgaagttgatgagatttttgtagttagggggtcggtatcggtgttaggttatgatgatgcgatttttcgacgtggtggtggaggtgaaatgtaggacgttatttttatttggggtaaagagtatattcgtgagtgatagagatttatgtgtttttgaaaagtatttgttttgtttggtattgttttttttttttttaaagttggttgtatatgttaagtttttttttgggtttttttagtggttttttcgttttttattaagaaattatatattttattatgtagagttttaagggttttattttttgttttaggttaattagttacgttggttatttgtttagggatttggatatgaatttgggttttttaatttgaaaataaggggcgattttagtgaacgaggtgaatttattttttttttttatttttaagattttggttatgaaagggggtttggtagggtgaaggtgagtttttaggttgttttgaaattttttaagagagacgatgatatttgttttgtagttgtggatatttgtttgttcgtgtataattattaaagataggtaagagattataggtgtgttatagaaaggaattttttttggtttaaatttggtattaaattggaaggatataggaatttttgtgaggtttttagttagggttgataaataacgggaggttggattaagtattgataagaagattttatttggttaagtttaacgtgttttatgggaagtagtttggttggcgggtatggtagggaagttgtgttaagtgttttttttattttttggattaaatttaaattacgataaggattagggaaagattgatgattgtttatttttatggagatttagagttttttgacgaattgttttttcgtttttttatttgtttgaattttattatatatttaagaggtgaagtagagggattgaagatagtaaaagagttaagaagtttttaggataaaatgtgcgtaattgagattgggaaatgttatagtttttgttgaagtgttatttagagaggaaattatgattttgtttttaaaagaaaataaacggttattatgtattatgatttgataggttagattggttgattttaaggagataagtattttgaaatattcggatatattcgattttattatgatttgaatagggagtaaggtaggggttttgtagggatagagtgagtagggggcgggaggcggcgttggtcgttagtttgttgtttagttttaggttagttagcgtgtttttttttaagattttttagagtaataagtgtcgttaggtaaatttagatattagcgaaataagttaaagttaaatacgtatcggttttgatttgtttttttgtatgtgtgtttgtttgtatatacgtataaattattttttattatataaattattttttttttaatattttttttttattaaaagttaaaggtgaaaagacgatttatttttataattttatttagttagagagttacgttatttttaatagtcgtattttatatagggttagatgagaaaggtattgttgtatttttgatatgagattttaaagttttataaatagtataaggttgtaattatattgtttttaatttaaaaagtaatattaatttagggttgtaggtttattttattttttttatgttggggtgggagaaataaggcggtcgagtgtaagggataggaaattcgtggtttataggggttgcgtttagggtagagttttttttattttataggtttgtgttttttttttgtgggagtagaagggtagagtttatagggttgaagtatattggtttttttttgaaaaataatcggatagggtatggtggtttaagtttgtaattttagtattttgggaggttgaggtacgtggattatttgaggttaggagtttgaggttagtttggttaatatgatgaaatttcgtttttattaaaaatttaaaaattagttgggtatggtggtaggtgtttgtaattttagttgttcgggaggttgaggtatgagaatcgtttgaatcgaggtggaggttatagtgagttaagattatgttattgtattttagtttgggtgatagagtgagattttattttaaaaaaaaaaaaaaaaaagaaaaaaaaagaaaaaaaagaaaagaaaaaagaaagagaaatatttaattgtgtatttgtgtataaaaggatatttaattgtgtattttgtaagtagtattttaaagtttgagaatttatttataagtgttttatatatttatagagatgtatagaatttataaatacgaatatattacgtatttgtttattattgattgtgatgatatataagtaggagtaaagtgttagttaagatggtttagtggttttttatgtgaaattaggaggggtcgtagaggaaagttgttattatatatgggaggagggtttgttgttattatgatggttgggtttacggtgttttggatgttgttatttataggaggtttttttttcgttgtttttggtgtttatgttttttttgttttggcgttttttagttttcgttattttttttatgcggtaaatttcggaaatatataatttgggattgaaagtaaagtatattttttttgttttgatggttaggttgcggtggttttagttttatagttgttgtaagttttggttgtcgaggacgtagaaggagtaatttttagaagtatagaaatcgatgttagcgtatttgtttttggttatagttttttttagtttgttggttacgtaatataggttttttttgttatttgttttataatatattttttttgttaataagagatttagttattaatattataggagaatagatagttgttgttaataatggtagtaatatgatttaaggataatatattaaaatcggtaagatgttaattaattttatgattattattattattaaataatgttttttgtattagaggatgttattagaattatttttaagaaatgtttttggttattttttttagttaagtatgtataacgtgtttgaaagtagtttatgagagaatagatatgttttgttatttaatcggaatagcgtatattttgttttaaagttttttattatttatggaagtaaattttgtttaattagtagtatgatgggataggagatagtatgagatagggagataagtttgtggggggttaattttgggtttttttttttttttatttattttttattttgagtagttttagttttagtttttggaggtgtgggggaggaggaagagttattaatatgtagtgtttttgggttttttatttaggtaagaggattcggagtttaatatagtggttttttaagtttagtgtgtataaagtttgtttgtaaagggttgggttttatttttagagtttttgatttagttggggtgggtaaagaatttgtatttattataaattttaggtggtgttgatttttgttgtggtttttggattatacgtggagaattagtaatttaggagaggttgagttttagtgaggtggtggaggattaaagtttattaaattagacgtggtttttgttttagagggtgtgtatacgagtagtagatttaattagtataggaagtcgttttatttggttatttaggtggtaggataagtttatttttggagaggtaagaaagtagatagttacggtttaggtttagagaaagattttcgtagtgggtttttttttttggtttttttaggaaggtagtagataatgttagggttgatttttgagttttttgtgttgatgggtttgatttttatggatcgtgaatttttttttttttttttttgttttgttttttattaagtttgggaattagtgtagtattttgagtgatttttaagatttatttatagatttaatgtataaatatataaaggagaaagaattttagttttttttgtagagttagcgtagttaggataaaatagaatttttaaggtttcgtttgttttggaggttatgtttattggggatttttttgtatttggtgagggtttttatttatatttaaattaggatttttaattagttggttaatttttagtttgatttttatttatagtaaagtataaattatggttataatgttgttaagtagttttgtgatatttttttgaatatttataaagggacgttagattaggaaggagtttagagattgggatttaggattagaaatgttatgaatgagttgtatagttatgcgtagattttttagtgttatttgtagttttgtttatttattcgtaggataataaggggaatgtataggtgatatttaagttttttgtttattttaagaacgattagaaggagttatagagttattacggaatttgtattataagtttgaagtttaatttttttttgagtattgggttttttgtttatataagtgttgggggtggaggttggagttttgttagtataggggtgtagtgagtatataagtgagtcgaaagatagagtttttgaagttaagttaggttttttatacgtttatttttaggtttttggatatattagtgattattaaatcggtagtaaaaatttgtaagttaatagttttttttttttagtaagggtttttttttgaatatatagttattttggaaaagtagtataagatattgtttaaatgattttagatttggttaatgtaatataaggtgtgttttttggggagtagtgttaggatatggtttagttggcgttattgttgttgggggtagattttatttatatttgttgttttttattattaggttgtaggtgatattgttggaggttagaggggttttatgtagttatataacggaaggagggatggagtggaaatggatgtgttataagtttatttttgtttataggtttttttagttttaaaggagattgtagcgatgtatttttaaatgtcgggttgtttttaggtatttgagttagttataggataaaatttttttgttgatgaagaaatttttgggttgtcggtaaggattaattaattaggttaaatttttatttatatttagaattaggtttttttttataaattaattttattagtagggaacggaattatattaaaaatattttttgaataaaatattttttttttttacgggaggaagtatgaattataaattaggaatttgataaatgaatggtaggtatattgaaattttgtgtatttgattaattattttgaaaagtaagattatttttttatagtaaatataaatattttttataattattgaagaggttgggagttaggatattaatattaataaaatttaggtattatggagtttgtggaagttaaagaaaaataaaaataaaatttttgttaaaataataattaagttatttatgagttgtttgttaatattatgtttgtttttcgagttatagtttggggtaaggtttttcgttaaattttttttatgattaggtgagaattaagagaaggtaaaaggtagagatttgtttgtatatttttaaaatatgtatacgttaaagttattattgttttttgaagaaaaagattatttaagtaaattatttagtaaatgtgattttttaattgttttttagtttattgtttttatatttaaagaatgtttttaaaaattaggtttttttttttttttttttttgagatagggttttattttgtaatttaggttggggtgtagtggtgtaatgatagagtattgtagttttaattttttaggt

SEQ ID NO: 280 - DNA, 6155 bp, Artificial Sequence; identical to SEQ ID NO: 278
  chemically treated genomic DNA (Homo sapiens)

SEQ ID NO: 281 - DNA, 6155 bp, Artificial Sequence; identical to SEQ ID NO: 279
  chemically treated genomic DNA (Homo sapiens)

SEQ ID NO: 282 - DNA, 6000 bp, Artificial Sequence
  chemically treated genomic DNA (Homo sapiens)
taatttataaatatgttattaaaatatttttttagaaaaatattttttaagtgtttgatgatttttagattttttattaaagatgattggttttattttttttttttttttttttttttttgatagattttggttgtgttatttaggttggagtgtagtggtataattatagtttattgtagttttaaatttttgggtttaagtgatttttttgttttagttttttaaagtgttgggattatagatgtgagttattgtatttagttttagatttttttatttgagtgaaagatggagagaaattaaatatatatttatggtataatttagtagttgtaattttggatatttattatagagaaatgaaatttatgttaatataaaaatatgtatattatcgtttatagtagttttatttgtaataattttaaattggaaattatttagatgttttatgatagatagttagttaaattgtgggatatttatattatggaatattattatttagtaataaaaaggaataaattattgaagtatattatttggatggattttaaggatattatgttttgtgaaaaagttaattttaaaagattatatattgtataattttatttatgtaatatttttaaaatgatagattatagttaggtacggcggtttacgtttgtgattttagtaatttgggaggttgaggtgggtggattatttgaggttaagagtttgagattagtttggttaatatggtgaaatcgtgtttttattaaaattataaagtttggttagttatagtggtttatatttattttagtattttgggaggttgaggtaggtagattgtttgaggttaggaggttaatatggtgaaattttatttttattaaaaatataaaaattagtcgggtttggtgatgggtgtttgtatttttagttatttaggaggttgaggtaggagaattatttgaatttaggaggtggaggttgtagtgagttgagattatgtcgttgtattgtagtttgggcgatagagtgagattttgttttaaaaaaaaaaaaaaagatagattgtagatatggaaaatagattagtggttgttaggtgttagggatattggggattaggttgggtagggtagtgagtatgaataggtggtattagggagagtttggtggtgacggaatagttttgtattttgattgtagttgtgattatataaatttatataagtgattagtgatatagtattatatatatatatatatatatatatatatatatatatatatatatagagttaatttttaggtttgatatttatattatgtaagatgtagtaaatattggaggaagttggatgaaggttatgtgggatttttttgtaattttttcgtaaatttttgtagttttttgtgattttataattattttaaaataaaatttttttttttaaatggaaagtttatagggtatgtagataaattagaaataatagaaggttaagtaaaaaagtgttgaaggaagtttttatttaggttggaaatgagaatgttgaatgtaatggtagaggaaggattttttttatttgtgggtgggtttagtttttgtaggatttttggggaagttatgatttttatttttttaaatatataataggaaaatattagagaagttttgtttatttgttagtttttaaataaaatagaattttgtatttttgttttagatataaaataatttttatgggtagggggaagggatattaataaaaagagttataatttatattgttttttttgaatgtttttattttacgaaatttgagagatgatttaagaataataatgtatatataatggttttttagtttattattttattatatatatatcgtataagttcgtattatttgttttgtttggaaattagtttaattttttgatttttgttttatatataattatagattttaaaggtttagttgttgggttagtattttgtttgttattttttaaataatggtaggtaagtaggaaaagtgttagttttatttgtttttgatttttggtggttcgtggtatgtttaggatagtatttgaaataagagtttattataaagtaatggaaattttttgtttttattgtgtatgtagtaaaagtaatatttggattaatttataagtttttgtaaaatatcgttaagaaataatttcggttgtgttttagtaagaaaataatggatttgtgttatattatatgttttttggtattttttattgggttttgttaaaatattgattgtaggagttagattattgttaggtagagatattgtattttttttgttgtttttgtttttttttttagcgatttttttaggtatataggttagggttatagtattagaaagtagttttgtttttttttagaattttttaagttttttttttgtagtattgttttttttatatggaattagttggtttattagttaatagtttatgatatataaatgttttgaggatgtagtatgtattttgtttggaagtaagtaatacgttttttttttgtaggttgtttttttttttgtttgtaatgtgagtggtttattttgggtgggtttgggggtgagatattatgtgattatatgaatattttaaaatagttgttttttttaatgtatgttgtaataataatgaaaagtatatttttatggtttttttaatgtaagaagatagatttaattatgtgtgtttttgatttttttttttttttttaatagtatgtattgtattttttgtgaaggtttttgttcgaaggtttgtgaggaagaaaagaaaataaagattattgattttgttatttttgtttagatgttttaaggatgtattatttttaagggtaatttgtttattaatattcgacgggggagtaagtattttatttttttggaaaaacggttagattttatggtttttttttgttgatgttttttatgttttcgtttttgagttattattaaaatatgggtttagataaataatatggtgtgtaagttttacgtatgacgttttttttttgagtttttttgaaagataaagaatagattgaaaggtaatttgttttttagttattggtacgttatttatttttgtaaagagggttatcgtttatttttttgttagttatattttgtataggagaggtaagttttgatatatataaattttagaagagattattggattagacgtgtgatttagtagattttagttgtagttaaatttatatattttttaagtttaaagagttttggttatttgaatttattgagaagattgagtaaagggaagtttagtgatattacgttaaaattttatgaagtttaaaagaatgttagatttttaaatttatttgtgagagataaaaggatataagtgtgtgttattgtgtatataaagtttcggttttatttttgtataatgatttttatttgtaatagatggtatttttggtaagttgtttttgagttggatttgtgtaaaggattttttattgatttagtttatgatttttttatttttttggttttttgtgtgtttgttttttggttttgttttgagatagggttttattgtattatttaggttggagtgtaatggtataattatagtttattgtaatttggaatttttagttttaaataatttttttgtttagttttttacgttgttgggattataggtatatattattatgtttggataattttaaaaatttttttatttttgattttttattgttaagggtttttagtaatggtgttttaaattttttgttattgggattatttggttaaggtattgatagttttataagttagaataaatatcgtaaaatggttttgaagttgaaaggaattttggggggggaatttttttatgaagaatttttttttttttttatagtttgagaggaaaaataatgtattttgagaatgtgttttttttaatatttgttaaatgagtagattgtatttttaaggtttagaaaggatagaaataagtttgtgtttagtttttttgaattagttgatattttttgttgttgtttataatatatttatttttagtttttcgtgatggagataattttgttttttataattagggtttgtttatttttatggtatttttgatgtttaatttttttggttgtgtttgtatttttttatttatttttaatttgtttatttttagaatatattttttgagtgtttaaatttttttatttttttgttttgaagataaaaatttaatttgtgaattaaatttatggagaagtattatttatgaagggattggtatatattgatgtatgatgatgaaatgtgttttttggtttatgtttattgtaggaaatagattggatttaggatgatgggatattttattagaggggaaattttttgattttgattaaggtatgttttttgttttacgtttaaaatttaggattttttttttaaaatattaattgtacgtaattttttatttttttaatttgaatttttttttaattttttttggaaagttattaaattaaattagatgtagggttttattttttagtatttttattattttatttgtattaatttaaagtaaaatagagtattttattaaatatgtttttataaattacgtatagtaaaattttattaattggattatatttagtttattatagtgtttattataattttagtattagttgaattgaaaattggtttttgtttattatgagaaaaaggtagattaaataagatgaaatttgttgtttgtatattatgtttgtatatttttattagtaattatttttttaattatttttaattatttttttaattattttttagttataaaagtaatatataaatattatagaaaatttagtaatgtagaaatgaatttttaaaaattttttatagatagttattgttaatattttggtgtattttttttaagttttagtaaaatggaatttttaaatatagatttttgtattttaggaattagaaaggtagtaaaggtagtttttaatgagatggagaaaatgttgatttagttatgtttttgtattgtgggggttatattgtttgttgatagagtatattaaaagacgttttttatattcgttagttttagttaattggtagtttggtatttatgattttatattttgttaattagtttgggagttgtagtattttttagttttttagaaatttggttttttttgtttgggaggtttcgttttaggagtcgttgttgagagttaagttagggaagtgtgtttttgttagggagtagttagttttgtgttgggagtattttagggggtatttgtcgttgaattgtttttatttgtgtttgtaagaatttaagtatgttatttttatattaagtgagtatatagtgatataatttttttttaatgtagataatattgttttagagttggagaattttatggggtttatcgaggtggtgacgggttacgtgaagattcgttatttttatgttttggtttttttgttttttttaaaaaattttcgttttattttaggagaggagtagttagaagggtaagtgttttaaattttatgagttgacgttttattataaaataagtagcgtgtttatgaaattgtgttgttgaggtaagagttttttttgttttgttaaagagaagaaaggaggaagtcgtagtattgtttgtgttgttcgagtaggttttgggtggagttatggttttttatttttaggaggttgttgtttggaaaatagagatgttattatttttattggattttgttttattagttaagggttgcgtgtttgattgtgattagtgagacggtagacgggggtgcgtttagggtttttttgttaagaatgatagtagttggtttggagtgtttatttttttgtgaaatt

SEQ ID NO: 283 - DNA, 6000 bp, Artificial Sequence
  chemically treated genomic DNA (Homo sapiens)
gattttatagggaggtgagtattttagattaattgttgttatttttggtagaaaagttttaagcgtattttcgtttgtcgttttattggttatagttagatacgtaatttttgattgatgaggtaaaatttagtaagggtgataatatttttgttttttaaatagtaattttttaagaatggagaattatgattttatttaagatttattcgagtagtataggtaatattgcggttttttttttttttttttttaataaggtagggagggtttttattttagtaatatagttttataagtacgttgtttattttgtaatagaacgttagtttatgaaatttggggtatttatttttttagttgttttttttttaggatgaggcgaaggttttttaggaaggataaggagattaaggtatgagaatggcggatttttacgtagttcgttattatttcgatgagttttatgaagttttttagttttgaagtaatgttatttatattgaaaggggattgtgttattgtgtgtttatttggtgtaagggtgatatatttggatttttataaatataagtgagaataatttaacggtaggtgttttttgagatgtttttagtataggattggttgttttttgataaaaatatatttttttggtttgatttttaataacgatttttggaacgaggttttttaggtaggggaagttaagtttttaggaggttggggggtattgtagtttttaagttgattaataaaatataaaattataaatattagattgttaattagttaaggttgacgaatgtagggaacgttttttaatatgttttgttaatagatagtatggtttttatagtataagggtatgattaaattaatattttttttattttattaggaattgtttttgttgtttttttaatttttaagatatagggatttatatttaaaggttttattttattaagatttgaagaaaatatattaaaatgttaataatggttatttatgagggatttttaaaaatttatttttgtattgttaaattttttatagtatttatgtattgtttttataattagaaaatagttggaaaaatagttgaaaatagttggaaaaatagttgttaataaagatgtataaatataatatgtaaataataggttttattttgtttagtttattttttttttatagtaaataaaaattaatttttagtttaattaatgttaaaattataataaatattataatgaattgggtgtggtttaattaatgggattttattgtgcgtaatttatgaagatatatttaataaaatgttttattttgttttgagttgatataaataaaataataagggtattaaaggataaagttttatatttaatttaatttaatagttttttaagaaaaattaaagggaagtttaagttggaaagatgagaggttgcgtgtagttgatgttttaaggaagagattttgaattttaaacgtggggtaggaagtatgttttagttaagattaggaaattttttttttaatgagatgttttattattttaaatttaatttattttttgtaatggatataaattagaagatatattttattattatgtattaatatgtattaatttttttataaatgatatttttttatgggtttaatttatagattaaatttttgtttttaggataggaagataaaaaagtttaggtatttaaaaggtatgttttagggataagtaaattaaaagtaaatgaggaaatgtagatatagttaaaagaattaaatattagaagtattatgagagtgggtaagttttagttgtggggaatagagttatttttattacggagggttgggagtgggtgtattgtgaatagtaataagggatattaattaatttagaagaattaagtataaatttgtttttgttttttttaaattttaagaatatagtttatttatttaataaatattaaggaaaatatatttttaaaatatattatttttttttttaaattgtaaaaaaaaaaaaaaattttttataaaaggattttttttttaaaattttttttaattttaaagttattttacgatatttattttagtttataaaattattagtattttgattaagtggttttagtggtagagaatttaaggtattattattagaagtttttggtaatgaaaaattagaagtgaaaagatttttaaaattatttagatatggtagtgtgtgtttgtggttttagtaacgtgggaggttgagtagaaggattgtttgagattaggagttttaggttatagtgagttatgattatgttattgtattttagtttgggtgatatagtgagattttgttttaaaataaaattaaaaaataaatatataaaaaattaaagaagtgaagagattataggttaagttagtgggaaattttttgtataaatttaatttagaagtaatttattaggaatgttatttattgtaaataaaggttattgtataggggtgagatcgaaattttatgtatataatgatatatatttgtatttttttgttttttataagtaaatttggaaatttagtatttttttggattttataaaattttaacgtgatattattaaatttttttttgtttagtttttttagtaaatttaagtaattaaaattttttagatttgaaagatgtgtggatttggttatagttggagtttgttgagttatacgtttgatttaatggttttttttggggtttgtatgtgttagggtttgttttttttatgtaagatgtgattaataaaaagatgagcgatgattttttttataggaataaatgacgtgttaatggttaaaagatagattgttttttaatttgttttttattttttagggaaatttaaagaagagacgttatgcgtgaggtttatatattatgttgtttatttaagtttatattttagtggtgatttagggacgggagtatgaaaagtattaataaaagaaaattatgagatttagtcgtttttttagggggatggaatatttattttttcgtcggatgttaatgagtaaattgtttttgaagatggtgtatttttggagtatttgagtagaagtaatagaattaatggtttttgttttttttttttttttatagattttcgggtaaggatttttataagggatgtagtatatgttgttgaagaagaaaaaaaaaattaaaaatatatataattgagtttgtttttttgtattaaaaaaattataaggatatgttttttattgttattatagtatgtattagaaaaagtaattgttttgaagtgtttatgtggttatatggtattttatttttaagtttatttaagataagttatttatattgtaagtaaaaggagaaatagtttataaaggaagagcgtgttgtttgtttttagataaaatatatgttgtatttttaaggtatttgtgtgttataggttgttgattggtgagttagttggttttatgtgggagagatagtgttgtagaaaggaagtttggggggttttggaggaaaatagagttgttttttgatattgtgattttggtttgtgtatttggaggagtcgttaggagagaaggtagggatagtaaagggagtgtagtgtttttgtttaatagtagtttagtttttgtagttagtgttttggtaaagtttagtgagggatattaaaaggtatgtggtatagtatagatttattatttttttgttaaagtataatcgaaattattttttgacggtgttttgtagaaatttgtaaattgatttaaatgttgtttttgttgtatatataataaaagtaaggggtttttattattttgtaatgagtttttgttttaaatattattttgaatatgttacgaattattaagagttagggataagtaagattggtattttttttgtttatttattattatttaggaaatagtagataaaatgttagtttagtagttgaatttttgggatttatagttatatatagaataagggttagaaagttggattgatttttaaataagataaataatacgaatttatgcgatgtgtgtgtaataggatggtaagttggggagttattatatgtatattattgtttttaaattattttttaaatttcgtgaagtaaaaatatttaagaaaaataatgtaaattatagttttttttattaatgttttttttttttatttatgaaggttattttgtatttaagataaagatgtagggttttgttttgtttaaaagttaataggtaaataaaatttttttggtatttttttattgtgtgtttgggagaatgggggttatggtttttttaagggttttataggaattggatttatttatagatggggagagttttttttttattattgtatttaatatttttatttttagtttgggtagaggttttttttagtatttttttatttggttttttgttgtttttaatttatttatatattttataaattttttatttaaaaaaaaaaattttattttaaaataattatagagttataaaaagttgtaaagatttacgagaaagttatagagagattttatatagtttttatttaattttttttaatgtttattatattttatatgatataagtattaaatttggaaattaattttgtgtgtgtgtgtgtgtgtgtgtgtgtgtgtgtgtgtgtgtgtgtggtgttgtgttattgattatttgtgtagatttgtgtaattataattataattaagatatagaattgtttcgttattattaagttttttttaatgttatttgtttatatttattgttttgtttaatttagtttttaatgtttttaatatttggtaattattaatttgttttttatgtttataatttgtttttttttttttttttgagatagggttttattttgtcgtttaggttatagtgtagcggtatgattttagtttattgtaatttttattttttgggtttaagtgatttttttgttttagttttttgagtagttggaaatataggtatttattattaggttcggttaatttttgtatttttagtagagatggggttttattatgttggttttttgattttaagtaatttgtttgttttagttttttaaggtgttgagataggtatgagttattgtgattggttaaattttgtaattttagtagagatacggttttattatgttggttaggttggttttaaatttttgattttaggtgatttatttattttagttttttaaattgttgggattataggcgtgagtcgtcgtgtttggttataatttgttattttgaggatgttgtataaatggaattatatagtatgtgattttttgaggttggtttttttatagagtataatgtttttgagatttatttaagtagtgtattttaatggtttgtttttttttattgttgagtaataatattttatggtgtggatgttttatagtttaattaattatttattataggatatttgagtaatttttaatttggggttattataaataaagttgttatggacgatggtgtatatatttttgtgttgatataaattttatttttttgtgataaatatttagggttataattgttgggttgtattataagtgtatgtttagtttttttttattttttatttaaatagaaaaatttgaagttgggtatagtggtttatatttgtaattttagtattttgggaggttgaggtaggaggattatttgagtttaggagtttgaggttgtagtgagttatgattgtgttattgtattttagtttgggtgatatagttagagtttattaaagagaaaagaaaagaaaaaaaaaatggaattaattatttttggtaaaaagtttaggagttattaagtatttaaaaaatgtttttttaaggaagtgttttgataatatgtttatagatta

SEQ ID NO: 284 - DNA, 6192 bp, Artificial Sequence
  chemically treated genomic DNA (Homo sapiens)
ggaggatttgggagtatagaatagatttttaaagttgtgttagtagttttgaaatagaaagaaaatttaataatttttaaatttaaaataataagaaaatataatattttgtgtaagaaatagattggttttaaggtattattttttagaaattataatataagtagttgtagaatggaaaaattgtttattttaaatggtttttaattaaaaagaaaaaataattttagtttaggtataatttgtatgaatggatagtttttttagaattttttaaatttttttttttatgtaattttttttttttttttttttttttttttttttttttttttttttttttttttttatttttttttttttttttttttttttttttttttttttttttttttttttttttttttttttttttttttattttttttttttttttttttttttttttttttttttttttaggtttggttgtttttggtgtttttattatttagtgtattgtttaatgagttaatagtttttaatttagtatttattgttttaatttttaaaaaatatttttcgtagataattttgtgtttagtttgaatttattttagattaatttattttaaattaaaaggttacgaaatttttatgtttttattttgttatatgatgttatgtaattttattgttatgaatttaaaaggtttatagaaatagaatattaaaatattattaatattagaaataatatgattgtataatgttatagattatcgagttaaatggtggatatggaaaggtgtttgaattgtataaaggtaggttatttgttaaggtagtttatttggattattttgattagaaaaattatttattgtttttatattgaaaattaagcgaagtttggatttaattttgacggagtaaaaaagttagttgatagtgtggagggggataggaattttaggagaacgtatttggattattttttagtttggttttgatatatggggtgtgttgtaagtaatttattattaatagtgaaagtattaaatttgtatatgatttgttttttaaaaatatatatatttgagtgtagttaaggttattttaatgatattattgtttttatgtttttataagtatgtttttttaagtgagagagaaagattggtgttagtaaaagtagtatagaatgttatataattaatagtttgtttattaatatttttagaaatattgtagagagtaagtttaattagtatatagttaatatatgtggtaattaaaaatgattataacgttttatttttaggaaaaatgtatttgagttttgtgaaaattatggtatattagtgagagtgtgttatttgtgagattattattaataatatgttgtgatatgaaaaattgtgagcgtttaaagtttttattatggttagaaaagggaattttgaatagagttaggtaaatattttggttttggggaaattttaaaaaaatttaaggaaaaaaattgttttgatttatgaaattgagttttaaataagattatggttaatgaagggagattttttaaaattaagaaataatttaaataaaatgggagatagtttaggaaagttgaatcgttgtttatttattttaaattttaaatgatatgtttataagatataagaagggagagtaattaaaggtgaatagggaaatgtagtaaatttattataaaagttttataaagtaagatttaaatgaatagaggattttaaaaaaggtaaatgtggtttttttttgagaaaaaaaaaaggtaaagatgattttgaggaaaaaaaaaaggtaaaggtgatttttttttgaggaaaaaaaaaaaaggtaataatgattaaaaggagttatgaggttttattttattttatttatttatttttttagagatagggttttattgtattgtttaggttgtagtgtagtggtatgattatggtttattgtagttttaattttttggtttaaagttgtttttttattttgattttttaaagggttgtgattatagttattagttattgtattagacggatgttttttttagttaaaaagaataaggaggggagagtgataatagtaagatgttgaatgggaaggttttagattttacgtttttttaataaaatatttaattaataattatttatagataagaatttatgtgaaaaaatttttaaattgggaatgagtttgatattagtgtggattatagaattggataaaaattatattaaaatggtaagagaaatggttttattttgatcgtatttttttttttttttttttaagttggtagagggttatatagatagaatttttttgggttttatgattttattttatttatttttgagttataatattttattggtagattagggaagagttaggagtaagtgtttttttttttttatttttttatttaggagatattttttaaaggagagtagaagtttaggagtttgtttttttagaggattttggaggtggataggttattgtagtgttttttttggttttcgagtaggttgaggtaggtggcgagtttttgttttagttataatttgatgtttatgagtagttggtatttttgattttgttttttattgttagttcgtatatcgtttagttgagttttaatattgttgattagcgtttggatttgcgttagttgtggtttaaagcgtgttggtgattttttaaggcggtttttatgttaagttgttattgtagtttaattttaagattttggaggttgtatcgtaggtcggtgatttgggatttgtttatttggagttgttttatgtggttaataattttttagtttagttttttagtgtagttggtgaattagcgtttagtattttttcggttttgtttggtatgattttatattggttttgtatgttatttaggatattggtggtattagcgtttagagtcgaatttatttttatattgatttggttttttatttggttttttagggtattaattttttttttatggtttttttttaggtaggttagttttttttttagtttttcggtttgtatttttaggtcggttttggttagggttagtttaattagtatttcgtgtaggttattatgttagtttttatatttacgagtagagtttgtttttttttatatttagtttagaagttatttgtagttagataggtattgttgatttgtaggataattttggaatttttaatgatgttattaagaattttgtagtataggtattcgatggtttcgtagtagtggttgtagttatgggagggtttggggtatatgattttaaaatgggaaaataataagagatagatatttagtttttttagtattttgaggtgtatttttggaagtttagattagttttgttttatgggggatattgggagtaatggtatggttagattgtgtggggttagttagaaataaaaaaaggaggtagagtttatagtgattagtgtgtagattttggtagtagttttgtgtttttgttagttgtggtgtttagttagagatattagttaatagtatagtttaagtttaaagttggattgattatttttagaattatggtgggaagtttaagttggttttagattttagatatttagtatttacgattagttttagagtttattttaaggttttgtttatttagggagatgtttataatattgtatttttttaaagtataggtgttaaatttgtttgatatgggaggttaaaaagtggtttgatttggttttagagtttatattaaggtattatttaggtagggtaataagttttaattgtgtatttttatggagtatagtttttgattttatttgtttcgaatggtaattttgttagtattaaaatttagtttgtagttttgtttagttgtggaatttaaatagtgatattatttagttagggatatattttgttatttggttgattagggattattatgttgtttggttattagttttatttgatagtagagtttagttagtggttttattttatagtagagtttagttagtagttttagataattttagagtaacggtagtggtttaattaattagagaatttaatagtaattttatttattgtggttattattagttgatttatttagaattatagggtagattaaatagtgaaagtttatttttgttaaagaatatttgtagattgtaagaggtggttgtttttttaaatatatagatattaatttaggatataaggattatgaagaattagaaaattatgatatttttaaaagaaattaataaagttttaatgatggattataaaataagggagttttataaaatgattgatagagaatttagaataatttttttaaagaagtttagtgaattatataaatatattgatagaaaattaaatgaaatttagaaaataaatatgaataaaatgagatgtttgataaaaaaataaagaaataggtatttttaaaaaaattagaaattttagagatgaggaatataattattggattgaaaatattgtatagaaaattttattagtagatttagttaagataaagaattagtgattttaaagatagaatattttaaattatttagttagaggagaaaaaagaataaagaatgtttataggaattatgtaatattattaatagaattaatatgtatataataggaatttaagaagaagagagaaaaaaagtgttagaaagtatatttaaagaaatggtgtttgaaaattttttaaatttgggagaaaagatatttaggtatagtaagtgtaggagtttgtaattaattttaatttaaagaagagttaattaagatatgtaataattaaattattaaaaattaaagattaattaaaaattttgagagtagtataagataaatatattatatataaggtagttttaatgttagtggattttttagtagaaatgagggagaaataaaagtttttttagataaagaaaagttaagagagtttattattataagttaagggagtttataagggtataaagttttagttaaataggaggaaggaattattttagatatagtgtatagtatggtaattatatttaataataatgtatattttaaaattgttaagataatatattttaaatgtttttgttataaaaaagataagtattgaagtgatggatatattaattagtttgatttagttattttatgttgtatatatatgttataatattattttgtattttgtatatatatatatatatgtgtatatatatatgtgtatatatatatatataaatatatatatatatatatatatatataaggtaaatatatatatatatatatataaggtatatatgtgtatgtatatatatatatataaggtatatgtatatatatatatataaggtatatgtgtgtgtatatatatatatatatatatatataattataatttgttaatttatgattttaaaaagaataaggaaataagtttattttttagagatgatagtagaaggtatattagagataagatagtattatttaattttttttttttttttttttttttttagattggggtttaaattgaatatggagaataaattatgaaaagtagaaattgtagtttaagataaaagagggattggtaagttaattttaagatgtttaaaatgagattagataaattatgtattagggtgtaaatagaatttttagttataaattgtttggtagtttttgaaaagttatggtaaataggagaggtgttataagattatagatgggtatattttatgtttatttttaagagaggaatagaaaggatttaggaaattatagataatttgatttatatttgtagatttaataatagattgttaaaaatgttttagtttttgagtatttagaaatgaatgttaaggttattagtaattaataaatgtgaagtaaggataagtttgatatatttatttgatttattttttatgaggatattaagtatatagattaacggattttttgaaaattaaattgaaatagttagtaattggtattatcgtgatggagtaatatgggattgtttttttttaagagtgtttattaatggttttatagtttttagtag

SEQ ID NO: 285 - DNA, 6192 bp, Artificial Sequence
  chemically treated genomic DNA (Homo sapiens)
ttattagagattataaagttattaatagatatttttgaaaagagataattttatattgttttattacggtgatattaattgttagttgttttaatttgatttttaagaaattcgttgatttatgtgtttagtatttttataaaaaataaattagatgagtgtattaaatttgtttttattttatatttgttggttattaatgattttaatatttatttttgaatgtttaaaaattagagtatttttaataatttgttgttaaatttgtaaatatgaattaagttgtttataattttttgaattttttttgttttttttttaaaaataaatatgaaatgtatttatttgtggttttgtggtattttttttatttgttatgattttttaaagattattaaatagtttatagttggaaattttatttgtattttggtatataatttatttggttttattttaaatattttggagttagtttgttaattttttttttattttgggttgtaatttttattttttatagtttattttttatatttaatttaaattttaatttagaaaagagaggagaaaaaaaaagaattgaatgatgttgttttgtttttgatatattttttgttattatttttaagaagtagatttatttttttgttttttttgaaattatggattgataaattgtaattgtgtgtgtgtgtgtgtgtgtatatatatatatatatattttgtgtgtatatatatatatatattttgtgtgtgtgtatatatatatatatatatattttgtgtgtgtgtatatatgtatttattttgtgtgtgtgtatgtatgtgtgtgtgtttatatatatatatatatatatatatatatatatatatgtatatatatatatagggtataaagtaatgttatgatatatgtatataatatgaaatgattaaattaagttaattaatatatttattattttaatatttattttttttgtggtaagaatatttaaaatatattgttttagtaattttgaaatatatattattattaaatatagttattatgttatatattatatttaaaataattttttttttttgtttaattgaaattttgtatttttatgagtttttttagtttatggtaatgagtttttttagtttttttttgtttaggaaagtttttattttttttttatttttgttgagaaatttattgatattgagattattttgtatgtgatatgtttattttgtgttgtttttagaatttttaattagtttttgatttttgatagtttgattattatatgttttggttaatttttttttgagttgaaattgattgtaaatttttgtatttattgtatttaggtatttttttttttaaatttggggagtttttaggtattatttttttaaatatgttttttgatatttttttttttttttttttttgaatttttattatatgtatgttagttttattgatggtgttgtataatttttgtaggtattttttattttttttttttttttgattgaataatttaaaatgttttgtttttgagattattggttttttattttgattgagtttgttgatgaagttttttatgtagtgtttttagtttagtaattgtattttttatttttaggatttttaatttttttaaaagtatttatttttttatttttttgttaaatattttattttgtttatgtttgttttttaaattttatttaattttttgttaatatatttgtgtagtttattgagtttttttaaaagaattattttgagttttttgttagttattttatagaatttttttattttatggtttattattggagttttattagttttttttggaggtgttatgattttttgattttttataatttttgtgttttgggttggtgtttgtgtatttgaggagatagttattttttatagtttataggtgttttttggtagggatagatttttattatttagtttattttgtgattttggatagattagttagtaatggttatagtaggtagagttgttgttgggttttttggttggttgggttattgtcgttgttttgaggttgtttgagattgttggttgggttttgttgtgaagtgagattattggttgggttttgttattaggtgaagttgatggttaagtaatatgatggtttttgattagttaggtaatagggtatatttttggttgggtggtattattgtttgggttttatagttgggtagggttgtaggttgggttttgatgttagtagagttgttattcgggataaatgggattagaggttatattttatagaaatgtatagttgaggtttgttgttttgtttgggtggtgttttgatgtgggttttggggttagattaagttattttttggttttttatgttaggtaggtttggtatttgtgttttgaagaaatgtaatgttgtgggtatttttttgagtaggtagggttttgaaataggttttgaggttggtcgtggatgttggatgtttagagtttaaagttagtttgaattttttattatgattttgggagtgattagtttagttttggatttgggttgtgttgttggttggtatttttgattaggtattatagttggtaggaatatagagttattgttaagatttgtatattggttattgtgagttttgttttttttttttgtttttaattgattttatatagtttaattatgttattatttttagtgttttttataaggtaagattggtttgagtttttaggaatgtattttagaatgttagggaagttggatgtttgttttttgttgtttttttattttaaaattatgtgttttaggtttttttatgattatagttattattacgggattatcgagtatttgtgttataagatttttggtgatattattgagaattttaggattgttttgtagattaataatgtttgtttggttgtagatgatttttgaattaagtatgagagggagtagattttgttcgtgagtgtggaggttgatataatggtttgtacggggtgttggttgagttgattttggttaggatcgatttggagatgtagatcgaagggttgaaggaagagttggtttatttgaagaagaattatgagggggaaattaatgttttgaggggttaggtgggaggttagattagtgtggaagtggattcggttttgggcgttgatgttattaatattttgagtgatatgtagagttaatatgaggttatgttaagtagaatcgaaaggatgttgaacgttggtttattagttgtattgaggaattgaattgggaagttgttggttatatggagtagttttagatgaataggttttaggttatcgatttgcggtgtaatttttagggttttgagattgagttgtagtggtagtttagtatgaaagtcgttttggaaggttattagtacgttttggattatagttggcgtagatttaggcgttgattagtagtattgaagtttagttgggcgatgtgcgagttgatagtgagaggtagaattaggagtattagttgtttatggatattaagttgtggttggagtaggagttcgttatttattttagtttgttcgagggttaggaagagtattataatagtttgtttatttttaagattttttaaggaggtaggtttttgggtttttgtttttttttagagggtgttttttgggtaggaggatgggaaggaagggatatttatttttggtttttttttgatttattaataaaatgttatggtttaaggataaataaaatagaattatgggatttaggggaattttgtttgtgtggttttttgttaatttggggggaagggaggagagatgcggttaaaataagattattttttttattattttaatgtggtttttatttagttttgtggtttatattagtgttaggtttatttttaatttaggggtttttttatataagtttttgtttgtggatagttgttagttggatattttgttgaagggacgtgaagtttgggatttttttatttaatattttgttgttgttatttttttttttttgttttttttgattaaaagaagtattcgtttggtgtagtggttaatggttataattatagttttttgggaggttagggtgagaggatagttttaggttaggaggttgaggttgtagtgagttatgattatgttattgtattatagtttggataatatagtgagattttatttttagaaaaataaataaataaaataaaataaagttttatggttttttttggttattgttattttttttttttttttttaaaaaaaggttatttttattttttttttttttttaaaattatttttatttttttttttttttaaaaaaaggttatatttattttttttaaaattttttatttatttgggttttattttatagaatttttatagtagatttgttatatttttttatttatttttggttattttttttttttatattttataaatatgttatttaaaatttgagataaatagataacgatttaatttttttgagttgttttttattttatttgaattattttttggttttaaaaaatttttttttattagttataattttatttgagatttaattttatgggttaaaataatttttttttttgaatttttttaaagtttttttaaagttagggtatttgtttgattttatttagggtttttttttttggttatgataagagttttgaacgtttatagttttttatgttatagtatattattgataatagttttataggtgatatatttttattggtatattataatttttataaaatttaaatatattttttttgaaaataaaacgttgtaattatttttaattgttatatatattggttatatattagttaggtttgttttttataatgtttttggggatattgataaataagttattgattatgtggtattttgtgttatttttgttaatattaattttttttttttatttaagaaaatatatttgtaagaatatgagagtaatgatattattgagataattttgattatatttaaatgtatgtatttttagaaggtagattatgtgtaaatttagtgtttttattattagtaataaattatttgtaatatattttatgtgttaaaattaagttgagaaatagtttaggtgcgtttttttgaggtttttatttttttttatattattaattagtttttttatttcgttaaaattaagtttaggtttcgtttgatttttaatatgaggatagtgagtaatttttttgattaggatggtttaagtaaattgttttgataaataatttgtttttgtataatttaggtatttttttatatttattatttggttcggtagtttgtaatattatatagttatattatttttaatattggtagtattttagtattttgtttttatgagttttttaaatttatggtaatgaaattgtatgatattatatagtagagtaaagatataaaagtttcgtaattttttaatttaaaataagttgatttaaaataaatttaagttaaatataaaattgtttgcgaaaggtattttttaaaaattgaaataatgaatattgaattgaaaattgttagtttattagataatgtattgagtgatgaaagtattaaggataattaggtttgaaagaaaggaaaggagaggggaggggaggagaggagagatgaggggagggaaggagaggagagaggaggggaggggaggggaggggaggggagggaaaaaggaaaggaataaaaggaaaagaaaggaaaggaagggagggggaaggaaaggaaaggaaagaaaattatataagaaggggaatttggggagttttgagaaggttatttatttatatagattatgtttaaattagaattattttttttttttaattaagaattatttagaatgaataatttttttattttatagttgtttgtattataatttttagaaagtggtattttaaagttaatttattttttatataaaatattgtatttttttattattttaaatttaaaaattattaaattttttttttattttaggattgttgatatagttttagaaatttattttatatttttaaatttttt

SEQ ID NO: 286 - DNA, 6192 bp, Artificial Sequence; identical to SEQ ID NO: 284
  chemically treated genomic DNA (Homo sapiens)

SEQ ID NO: 287 - DNA, 6192 bp, Artificial Sequence; identical to SEQ ID NO: 285
  chemically treated genomic DNA (Homo sapiens)

SEQ ID NO: 288 - DNA, 6000 bp, Artificial Sequence
  chemically treated genomic DNA (Homo sapiens)
ttgtatttaatattaatgataatattagtttaggtgatatgtaattaagaaagtaaatttttttttaattaaaaataatatgagagattttaaatttaaatagaatagagttgtggattattttatgtttgtttttatattattttttttattttattttattgatatagcgtgatgtttgattgttttttaagttttttttattgttgttatttgggatgttggtaatgtattgtgttgaaagggaagtttattaataaagttagtaattcgaagagttagtgtaggttatttgtaggatgtttattatgagttttgagtttgatttagtttagaaagtaatggaatatttcgtataattatttaaaggattttttttttttttttttttagggtttgttttttttgtaagggtttagagttgtttggtagaggttggttgaaataggagaaattttgatttaagttgttttaggaaagtgatttagtttttggagaataattaggatataattaagtatgagtaaaaggtttagagttagtttgtttttttttgtaatggggtgtttattagtgtgatagttgtttttgtgattattgtttttacgtatatttttgattagtatttggaatattattttagggtaatttaaatgaaagtttattttttaggatggagtaaattgatagaaatttttatcgtgtattaaatttgttataagttgtttgttttttgggtatttttgggttttagttgtatttttgaagaaataattattgttgttttaagtagaaagtggttgaggagatagttaatagatacgtttagtttttattttttattatagagatgtgaaaaaaaaaaagtttaaattattttagaaggaaaagtatttttttgtgttggatttttagtgttttttagttttgtattgttagtttattttttttaatgtttttataataataatttatttttttttttgtatttttggtttttcgtgatgttttattatgtttatgttgaaagaaaaggtgtttgtttatattgtatttttttatttggttttagggatttttttttgatttggaaagaataattttttaaatttcgttataaattatataggagaaagagaaaaataagataaagtttttggaatgtgtattggtattgatatttcgtttaaataatgggttgaaggtgaattatttttattattgtttatgtgaatgattaattattattaatttaaattattaatagtgttgtttattattgatttatattgtatggtttaattttgtttttatttttttagatattaaaatatagttaatatttagtagttttcgttatttattatgagtatttttatagtttttaattttttttttttagttttgtttaggatatttatggtgagtagcgagttattttttttttggtagttatttttgtttttttgtgtggaggaattgtttatattcgtatttgtaaatagaggtttatttaagtgttattaaaggaaaggaggtggagtttgaagagttttaaaaagtaaagttgagttattttattttttaaaaagagaaattgttgggagaggaatcgtatttttatatttttttttttagttttaatttaagggttgtagttggaattttttattagtttttttttttttttttttttttaagtttttgttttgttttgttatagtgaagttagttagagtagggttgttaaattttgtgaaatttgttataagggtgttaggtattttttattggtttttaaagaaatatagataaagaaattttttttgtggttttttttggtaggttgtatttagaaggttttttagttgaagaaagagtttggaggataatagtataataggagagtaaaagatgttttagggttgaggttttcgtttaggtagtcgtatttggggttaattatatttattttgttcgggttatgttttagtaaaattaagttgtttttttttgaaagtttaaatttattaagattatgttgtttatttttattattttgttgttagtagttttaaaatttagttttgttagttttttagtatcgtagtattggagttgttttgaaggtattttcgtaggaaatgggaattttatttgtgtgggtaagtattttaatgaaaaggtgttttaggttttcgggaaattgtttttatatttttgttggtttaatttggtatatttgggtatttaataaagtttgtttttgggtatgtatagttgtttaatttttgttttttgatgtatgtttatttttttattggttattagagttaatttgttattaattataaaattttataatttttaaattgtatttttgtgtataagtgaatgaatatgttttattttaaattagtagaatattttatggaagttttagtttttattttgataagaggagtaattaatatttggttaattgtttggaaattagggaaatagatggttgattttttgtttgtttgtttgaaatttttaagttataaagaaaaaaatttttttttttgataatttgtaagaatttagaagttttaaaaattagtgaaaaatggaaagggaattgtgaataaaggtagttgtgaaaattaatttaaattttaattttaattttttttattttttttttatttttattgtttttgaggttttgatataatttcggagttttagtaataggtgtattgtaattttaagaattgttaaatatgataatgggtaaataagttatattgtttttttatattaaatgaattttttgttaaggggaaatgggagtttgattgaatgcgaattataattttgttaaaggatattgtttgaaaaatattttttttttaattgttaatttatttatttaatttttgggtgagtttttaatttgttgtttagatacggtagtcgtttttgttgatgagaggttatagttgtttcgatattttatttttattagtttgtttttttgagatggcgtttggtttttaaaaagaggtagattgagggggaaaatatagtatagtttttagaagagatatttatggaagatagtatataataggtaatagtttgaataaagagagtagaatggagttaaattgttaaagttaggttgttgttttggtttttttattaaggaagttttcgatgaggaaattaggtgtttttgtttagaatttttggattttgtttttaggtagtattttttgtaataggtgagtagaattttagggtatttgaaataaagatttaattttagtgatttttatgtttttagtatttaggatatttttgtttttatagtgtgtatttagtaaatttttgtgtatgaatgaggcgtttttttttgatttgttaatgatatagttttagagaatagtaataaaaagagggtgataaatgataaaaatggttttatgaattttagatttagttgttggagatagaagtaaaatttttgtatatagttatgttaaatggattggattttttttggggtgggagaatttttcgtggagtagttggtaaatatttagagttgggtattgttatttgtatgggatgtgaggggtgatggttgggtcgatttattaggtagttagaagttaggaaagaagaatttaggttgttgaagtagaatttaagaaattataaaaatgagtttttatggatggttttaggattttagaatagtttgatttttgttggtaagtaagtttatgttttgttttttttgttatttttggtggtttagaagtgtttttattgaggtaggttgtatttaataaatatgaaatttaggatagaaataataagttggggagattgtgttatagagtggaaggaattataggttttagaaataaataagttttattttatatttatgttattaatttaatagttgagttattttagagtatttttgggaaataatattttcgtttattgtttttaggatttttttgtggggaattatatgagataatttagtatgtattaaagtatggtgtttagtagagtatgtttaataaatgtttttttgggttttacgttttggttaaatttttgattaagttatacgatgagatgtcgtatttgaatagtgtagtgatacggtatagatttatggagtgtggaatgtgtggatggtattttgggattttttgtttttttgttattttattttttgtaagttattggtttaaatttcgtattttacgtttttggttttatgttagttgataattgtttgggttattttttgttagttattgtgtgtattttagaggatagtattttttttttttttttaaatagatatggtgttattatttattttttttttatttaaattttatttgttttattttttgtttttggtattgagatagattatttttgtagttatttgatttagtaggaagaatgttttatggtttaatagtatttaggtaaatttatgtaagattgttatttatgtgattgttagtcggataaattaagtgatagtaatataattaggtttttttttatttttttttttttttttttttttaattgagtattttgttagcgtttatttgagttatagtaggtgaggatagtaggaaagaaaattgttggtaagtggtttttgaatttttaagtttatttattttggaggataaataatagttgaaaaagaaattgtttttgtttggtttttgtatttgtattatttatatgaatttttttggtaataaagggtaaggaagaagtatagttttttagttgcgggagggattttggggtggtattaagttattatttttagtagtaaatagtgaaattagtgattttagtatcggttaaggcgtggttagtattttagttatgtgtaaattagagtaattttgagattagaagtttgtttgtttttttagttagggttatgcgattttttttttttttttttaatagtagtgaaattaatttttaaatatttagtggtgtttggttattgagtttagtggtaaagaagtataaattttggagatagattttttgtttggatttaaattttatttttgttgtttgtgaattgtttgttttattttttttattttaaaatgaagataattgtattttttttcgaggatttttgttagtattgcgttaatgtatttatttttagtgttggttgtgtattagaattattaatgtttgggtggttatttcgggtagtttggattagagttttttttgggagtggaatttaggttttatttttttttaatgtggtgattttaattaatagtttgggttagaattattgagttaatatatgtaaagtgtataaaatagagtttggtatataataaatattcgataagttcgagattttattaatgttttgttgttttaaaaattatttttatgaatgtaatggtattttttaaatgtggtttggtttcgtttataattatcgaatattttttatatatgataaaatgttatagtgaaaaatttaataatagttttataatattaaaaattatagttaaaataatttaaaaatatataatttatatttttgtaattagaagaaatgtttattaaaaatataagaatatgttaatttgatttgagtaagtatttttgtgaaattgtggttttggtgtttgttttttttttatattaattgataaaaaattttatttattgtaaattaattttgttcgtcgggttttttatcggtaataattttattttaatagtagtaaaaataagttatttgaaagtgatagcgattattttagttttttgtatatttttgtttatgtgtggaattttttttttgtggatttttaaagttattaaaagtatataaaaatggtaaattagtttttttagttaatttatattttggggttaatttgagtttgttaaaatatttgatat

SEQ ID NO: 289 - DNA, 6000 bp, Artificial Sequence
  chemically treated genomic DNA (Homo sapiens)
atgttaaatattttgataagtttaaattagttttaaaatgtaaattaattgagaaaattaatttattatttttatatgtttttaatagttttaaaaatttataagggaagggttttatatatgggtaaaaatatgtaaaaaattgaaataatcgttattatttttaagtggtttgtttttgttgttgttaaaataagattattatcggtaagaaattcgacgaatagagttaatttgtaatgaatgaaattttttattagttggtataagaaaaagataaatattagagttatagttttataaaggtatttatttaaattaagttgatatgtttttgtatttttaataaatattttttttgattataaaaatatgagttatgtatttttaaattattttgattataatttttaatgttgtagaattattattgggttttttattatggtattttgttatgtataaaaaatgttcgatgattataggcgaaattaagttatatttagaaaatattattatatttataaaaataatttttaaaataataaaatattaatagaatttcgggtttatcgagtgtttattgtatgttaagttttgttttgtgtattttatatatattaatttagtggttttaatttaggttgttggttagaattattatattaaaaaaaaataaggtttagattttatttttagaagagattttgatttagattgttcggggtggttatttagatattagtgattttaatgtatagttagtattgaaaatgaatatattaacgtaatattgataagagttttcggaagagggtataattatttttattttagggtaaggaaaatgagataaatagtttataagtagtagaaatgggatttgaatttaggtaagaaatttgtttttaaaatttatgtttttttattattaagtttaatgattaaatattattgaatatttggaggttagttttattgttgttagaaaaaaagaaaaaaaatcgtataattttggttgaaaaaatagataagtttttggttttagaattattttggtttgtatatgattgggatgttgattacgttttagtcggtattgaaattattgattttattgtttattattaaaagtgataatttagtgttattttaggatttttttcgtagttgggaggttgtattttttttttattttttattattaaaaaagtttatataaataatgtaggtatagaagttaaataggaataattttttttttaattgttatttgttttttagggtaaatagatttgaaggtttagaaattatttgttagtagtttttttttttgttgtttttatttgttgtagtttaagtagacgttaatagaatatttagttaaaaggagggagagggaggggaatagaaagaaatttaattgtgttgttattatttggtttattcggttagtagttatatgagtaataattttgtataagtttatttgaatattgttagattataaagtattttttttgttgggttaggtggttgtagaggtgatttgttttaatgttaagggtaagaaataaggtaagtagaatttaaatgagggaaaaatagatgatggtattatatttatttagagaggagaaagaaatattattttttgaaatgtatatagtgattgataaagggtgatttaggtagttattagttaatatgagattaggagcgtaaagtacgggatttaaattagtgatttgtaagaaatgaggtagtagagaggtagggaattttaaagtgttatttatatattttatattttatggatttgtgtcgtgttattgtattgtttaaatacggtattttatcgtatgatttgattagagatttagttaagacgtggagtttaggaggatatttattgagtatattttgttaagtattatgttttggtatatgttaggttattttatgtgattttttataaaaaaattttaaaagtagtgggcgagggtattattttttagagatattttaaagtaatttagttattaagttggtagtatggatatgaaatgaggtttgtttgtttttaaaatttgtggttttttttattttgtgatatagtttttttaatttattgtttttattttgggttttatgtttattgggtataatttattttaatgaaggtatttttgagttattagaggtggtaaggaaaataaggtatagatttgtttgttagtaggaattagattattttgagattttagagttatttataaaagtttatttttgtaattttttgggttttgttttagtaatttgggttttttttttttagtttttggttgtttgatagatcggtttaattattattttttatattttatgtaaatgatagtgtttaattttagatatttgttaattattttacggaaaatttttttattttaaagagagtttagtttatttgatataattgtatatagaagttttatttttgtttttaatagttgagtttgaggtttatggggttatttttgttatttgttattttttttttgttgttgttttttaggattatgttattagtagattagagaaagacgttttatttatatataagaatttgttgagtatatattgtggaagtaggaatgttttaggtgttgggaatatagagattattaggattaagtttttattttaaatattttagagttttgtttatttgttataaggagtgttatttgagaatagagtttagagattttgagtaaaagtatttgatttttttatcgggaatttttttaatgggagagttaggatagtagtttagttttggtagtttggttttattttgttttttttatttaaattattgtttattgtgtattgttttttataggtgttttttttggaaattgtattgtgtttttttttttaatttatttttttttaaaagttagacgttattttaaaagggtaagttgataaaaatggaatgtcggggtagttataattttttattaataaaggcggttgtcgtgtttaagtagtaggttggaggtttatttaaggattaaataaatgaattaatagttagagagagaatgttttttaggtaatattttttggtaggattgtaattcgtatttagttaagtttttatttttttttggtaaaaaatttatttaatatgagaggatagtgtggtttatttatttattattatatttggtagtttttaaagttgtaatgtatttgttattaaaatttcggagttgtgttagagttttagaaatagtaagagtggggagaaagtgaaggaggttgaaattgaaatttaggttaatttttataattatttttgtttatagttttttttttattttttattaatttttagaatttttgaatttttataagttattagaaggaaggatttttttttttgtggtttaagagttttaaatagataaataaaaaattaattatttgtttttttaatttttaagtaattagttaggtgttaattattttttttgttagagtaaaagttgaagtttttatgaaatgttttgttagtttaaaatgaggtatatttatttatttatatatagaagtatagtttgagagttatgaagttttatagttggtagtagattagttttaatggttagtaagaaaataaatatgtattagaaaataaaaattaagtaattatatatatttaaagataaattttgttaaatgtttaagtatattagattgaattaatagggatgtgggggtagtttttcggagatttggagtatttttttattggagtatttatttatataagtagaatttttattttttgcgagagtatttttaggatagttttagtgttgcggtgttgagagattaataaaattaaattttgaaattattggtaatagaatgataagagtgagtagtataattttgatgagtttgaatttttaaaagaaaatagtttgattttgttggagtatggttcgggtaaggtgagtatgattgattttagatgcggttgtttgagcggaggttttagttttggggtattttttatttttttgttgtgttgttgttttttaagttttttttttaattgagagattttttgaatgtagtttgttaagggaagttataggaaagatttttttatttatgtttttttggaagttagtaagaaatatttgatatttttatgataaattttatagagtttaatagttttgttttggttgattttattgtgatagagtaaggtaaaggtttagagaggaaaaagaaaggaagaattgatggaaagttttagttataatttttggattggggttgaaagaagaaatatggagatacgattttttttttaatagtttttttttttgaaaagtggaatgatttagttttgttttttaaagttttttaggttttatttttttttttttagtgatatttgagtgagtttttgtttgtaaatgcgaatgtgggtaatttttttatataggaaagtagggatgattgttaaagaggagataattcgttatttattataaatattttgggtagaattgggagagaggagttgggggttgtggaggtgtttatggtgaatggcgggaattgttaaatattggttatgttttaatgtttggaaggatggagataaaattaaattatgtagtataaattaataataagtagtattgttgatagtttggattgataataattgattatttatatgagtaatagtaaagatagtttatttttagtttattatttgaacgaaatgttaatattagtgtatattttaggagttttattttattttttttttttttttgtatagtttatagcggaatttgaaagattattttttttaaattaaagggaaatttttgaggttaaatgaagagatatagtatggatagatatttttttttttagtatgagtatgataaaatattacgaggggttaggagtgtagagaaaggagtggattgttattatagggatattggaaaaaataagttaatagtgtaaagttgggaagtattggaaatttagtatagaggaatgtttttttttttaagataatttaggtttttttttttttatatttttgtgatagaaaataagaattggacgtatttgttagttgtttttttaattattttttatttggagtaatagtggttatttttttaggagtataattagggtttaaaaatatttagaaggtaaataatttatagtagatttgatgtacgatggaaatttttgttagtttattttattttggaaaatggatttttatttaagttattttgaggtagtgttttaagtgttggttaaaaatgtacgtaaaagtaatagttataaaaataattgttatattagtgaatattttattatagaggagaatagattaattttaagttttttatttatatttaattatgttttgattattttttaaagattggattatttttttgaaatagtttaagttaggattttttttattttagttagtttttgttaggtagttttgaatttttataggagaaatagattttggggaagggggaaagagaagttttttaggtggttatgcggaatattttattgttttttggattgagttagatttaagatttataatgagtattttataaataatttgtattgatttttcgagttattaattttattaataagttttttttttagtataatatattgttagtattttagatgatagtaatggaaggggtttagaggataattaagtattacgttgtgttagtggagtggagtggagagaatgatatgaagataaatatgaaatgatttatagttttgttttgtttggatttggaattttttatattatttttggttggaaaaaggtttgtttttttaattatatgttatttgggttaatgttgttattaatgttgagtataa

SEQ ID NO: 290 - DNA, 6196 bp, Artificial Sequence
  chemically treated genomic DNA (Homo sapiens)
tatttatagatggtatatgtatttattattgagtagaatatttttaattaaaatattattttttatttttgattaaaaataatttattatggttaaaaaatggtttttgataatattatatattattatagggttttgtttttgttttgtttttttaatatgagagagagagagagagagagagagagagagagattgattttttatttggggtatattagtagttgatataattataaatagaagaaaataatagaaatagaaaaaaatatgagaatcgaagaatgaaattggtttaaatagaaattatttttgtattttaaagtttttggttttaagtttaatattaaattaatacgtgttgagaattttttttgtgtatagggtattgggtttaaattggtaaaaattttttattttatttttagttataggaattatggttttattttttggagggatttatgtgttattgtatttattttatagtaaaatatattaagggatttttggttggtatgatttagttaatgatagattgttaaacggtagttttgttaaaagtagtagttttgtggtttaagtttttatttttattttaagtagtagaaattatgttaagatgattattaagtttttttatattgttatttgtggtataaagatgtggttttttttaagaagttttttaaggtgagtggttttattttttttagatgtatttatttttagtattatgggaagagtttttgatagggtgttaggtgaggggcgttattaaaagggttgtggagttatgttggaagttataattataagaagagtattttttttgaattttagagtagtggtaggtttatttaattttattatttttggagaaatagttatttattttttgattattttttttgttttttatggatttttaatttagtggttttatattagtggtaaaattttttttattattttaatgatgatttttattttttgtagttagatttttattttagtaattgaggaaaaaaaaaaaaaattaaaatttttgtttttcgttaataaaatataaatatttagttaatggttgtaaagtagttgaagatgaaaagcgttttttatttgtaaatgattataaataatggatataaaatagaagaggaggtaaaagtttaattgaatatttattgtattttttttaataagattttcgtatggaaattttttattttttatatagtttaaaatattgggattggaagaagtatgttattatttagtttttatttttttttttttttggttgtaaaattagtggggtttttttgtttaatatttttattggaaattttaataaatttaatttatttggatttcgtggtattttttaaaagaataaatttgtgattgattttgtagagtatatttttatattgcgggaatgggttagttttagaaagtatgttattttatcgaattttatttttttattttttttttttttgttgcgtttatagtaatgttgaaggttaagtatttgtaattgtagatgtttttaagttttttagtttttgtgaaatttagggaaaaaaattatttaagttatagttttagtgaattttaaattttattagatgttaaaattatatttttaatagttttagtataatatatttaagtgtagcgatatatataagtttttggaatttaagaatttaagattttttttaaatagatttttttttttttttttttttttttttgttgagttatattgttagataaattttagtatttatagttttaggataagatagaatttttagtgtatttttttttagtgtagggaatagtttagtatatttatagagaattagagaattttatgtttttataaatgaaaataatatcgaatttgtttaggagtttaaagtgtgaaataagtggttttatatgtttattatttttttggttttttattttgttaaatataaaagaaattaatagagagaaaggaaagatatgatagaaaaaaaagggaagaattagaaagatatgagaaaaaaagaaaaaaaaattagaaaatatttttttaaaaattatttataaatttaaattttaaaagtttttttttttttaattttagataaatggaatattaattgattttagatgtttgggttataatgaaaatgttttgtaaaatttgagggtaatagttataagaaaatatttattgtaggtgtaattatttttgtttgttttaggttttttatagtaggttagggtgggtattatgaggtcgatgtgaatagaaaattgaagttttaaaaatatgtgttgttttgtgggtggggtttgtgaaagtatttagttatatttggatatttaggtaggtatgttattatgagtttgggtaaattgttttttgtttattgaaataatgaataaattgtatagttgggatttaagttaattttttttttttagttaagttatttatttttattgtatgtttattgtagtagtttagatagtgatttaagttttagtttatttttttatttttttttttcgatttatttatttggaaatattttgagagttagagtataattagttggtgagttttgtttttgggtaggatatttttatttattgaattatatgtgaaagattacgtagtttttttaaattattttttgttttaagtatagaaaaaagtaataatttattaagagttttatttttgaagtgtttagtatatatagtatgaaaagtgtatttggaaataatttttttaatttgtaattaatgtagagataacgttttatagttttttttatgattttttaagtaaggagataaaaattttagttgttagattatatagtatgtatgtatagtgacgttatttttttgaaagtaaggtggtttgtatgtgttggtattttaggaatagtagaattaggtgtttgataagggtgtatttttaatttttggagttatttatttgattagggaaagtcgtagtggtgaagtgtttgaaagtagtaattgaatgttgtattaagtggtagagacgttttatgaattgagtttttaggtaattgaatcggtggagttagtgatagtagtttaaaagcgtttgtaaattgaaaaaaaaatataagttttgaaggatataattttgttgagaatggaaattagaattacggttagtaatcggaaacgagaagtcggtgtattgatagtagtagttagatttatttaaagggattttacgatattgaatataaaattagagttttataatatagaattttaagtttaaattttgtttatgaaagtttttttttaaatagaaaagttgggtaagtagtttttagaaagtttttgttttttatatatagtatgtatttgtttaaattatataaatatgtaaggttagtaagagttgttaaggagtttttttttggaagaataaattatattttattttaattttaatattttttttgggtataagtgtagagtttcgggattttagttttaaagattatatttaaaagttttaatattatttaaaatataattttttatatatagtatgttttgtaaataaagttttgatgagttatatatatagagatatatatatatagagatatatatatatatgtaaaagaatatggttttaaaaataaaatatttgtatttgtaaaagaaaaaaaaaatttttaagtttatatttatgttttatagtttttagttatagagaggatttaaaggaattttttgtaatgatattacggaagttttgtagaagtggaggatttagtataagtattttgtaatagtttttatttatatagatatttgtgtaaatgtatttattttttcgagttattttttagattttatagaattgtatatttagtaatttataaataattttcggtttcgaaataatgaaaattttaaagtgaagaatagttttaggtagaagtaaatagtatataatttaaatagaattttttaatgattttaaagagtaagaaatatttatttttaagaaattataaaagtagtatttaaataattgggttggaagattgttgattttttttattgtttttgaagtataaagtttgaaaatgaattggttagtaggaataatgaagtaaaaagaaatttagagagatgggagatgttgagagtaatgttatattttaattttgaggattttattttattgcgtaggttttatttgttttgaatttagtagtgatagtgagatttagtaaatagaagagggatttagagaaaatttttatatttatttataaaatatagatattgtagataggaaatagttgggggaatatttgtttttttttttttttttttttttggtaaagttattgagtaaggatttttttgggtatggtgataaataatattatatttttgtattttaaaattagagtatagaagtattttttttttttaaaagaatgtgtgttagtgatagggttcgtagatattaaaatatttatgttgttatagaaaataaggatttgttttttgattaattttttgttgggtatgaagatataaacgtttgttaatatattttattagtattaaaggaatatgggggatgggagagtaattttagattttagagtaaatgtattatttaaaataaaaaaagaaagaaaggacgataagattttttttagtaaattttataattttaattttgaagtgattggggtaaagtagattggaagatagtattcgggtgattttttgttttagttgttaagtgagaggtgtgattttattttttagaatttatggaggggtaggtagtattggattggtttttttagggtattgttttatatttttttttttgcgatgaggtaaagattatgtcgagttgtaaaatttaattgaaatagaatatttttttttatttttttattaggttgtttgttattgttttttttttattttattattttgggagaagggtatttggggggtaaataatttttttgttgtttgaattttttatataatttaaatttgtgtgtgtgtgtgtgtgtgtgtgtgtgtgtgtgtgtgtgtatgatagagggagtttgtgtgttagagtgtgttttttttttttgatttttgtgtattttaaataatattagttggttagtaatattttttcgagggttatgatgttatttaaattttttaattgggtgattggtcggtaatatggtttaagttagttgttttgttatttataatgtatatttgtttttgttattgagaatttagttttgattttttgtcgatatagtttgtatttatttttttttggttttgtgaagtagtagataagaaagtgaattataaaataaggttgtaaaagtttagagtagatatatttttttttttagagagttttttaggtttggttttttaggagtggtggaaataatttggattttgaattttttttttttttttttttttatatgatttttaggggattgatatattaattgaaaatatagttttgtttgaaattttattttggttttttgtgttattttggggttagaaatttgtttgtagaagtgggtgttttaataaaaaataaataaatttgttttgtttggaagggggttgggtttgtttgagttttttgtgtggttaatatattgtagtaatgtttattttttagaaattaaagttagaaatttggaattatgttgtgttaatggtgtattatgtttagtaatattttgtgagttttattatgtgtttaattataatatttttaggaaaataaagaggaataagatatggttaagtttttttaggggtttttagttgaatgttagagataaagaggaaaattttatagttatatgatgggtatgtgtttttttaaaaatatgaatagtgtataatgagagggagtgatatattttttgggaagataggggagtaaaattttttggaaaatttaaaatgagggaggtagattgtgttatgagaggttttggggtattatgttgggaaattttagtgggtgggatttgatttaaagagtatattaagaggtattattaagaggtggtttagtaggtggttttggattatttttaatgtagggattatttat

SEQ ID NO: 291 - DNA, 6196 bp, Artificial Sequence
  chemically treated genomic DNA (Homo sapiens)
gtggataatttttgtattaagaataatttagggttatttattaggttattttttgatgatattttttagtgtgttttttgggttaaattttatttattgaaattttttaatatggtattttaaagttttttatgatataatttgttttttttattttggattttttaaaagattttatttttttgtttttttagagaatgtgttatttttttttattgtgtattgtttatgtttttaaaagagtatatgtttattatatgattgtgaagtttttttttttgtttttgatatttagttgaaagtttttgaagggatttgattatattttatttttttttgtttttttagggatgttgtagttgggtatatagtagagtttataaaatgttgttgaatatagtgtattattgatataatataattttagatttttaattttgatttttgaaaggtaaatattgttataatgtattaattatatagaagatttaaataaatttaatttttttttaaataaagtaggtttgtttgttttttgttagggtatttatttttataaataaatttttggttttaggataatataaagagttagagtaggattttaagtagaattgtgtttttagttgatgtgttagttttttgagagttatgtggaaaaaaaaaaaaagaaaaaatttaaggtttaggttatttttattatttttgggaaattaggtttggagagttttttagggaaagaggtatgtttgttttgggtttttgtaattttattttataatttatttttttatttattgttttataaaattaaagggaaataggtataaattgtatcgataaaagattagaattgaatttttaatggtaaaggtaagtgtatattataaatagtaaaatagttggtttggattatgttgtcggttagttatttagttgagggatttgaatgatattataattttcgagagggtattgttagttagttggtgttatttagaatatataaaaattagagaaagaaaatatattttggtatatagattttttttgttatatatatatatatatatatatatatatatatatatatatataggtttgagttatatggaaaatttaaataataggaaaattgtttgttttttaggtattttttttttagagtggtggggtggggaggggatagtgataggtagtttagtagaagaataaagaaaaatgttttattttagttgggttttatagttcggtatagtttttgttttatcgtaggagaaaaagtatgagatagtgttttaaagggattaatttaatgttgtttgtttttttataggttttaggaaatgagattatattttttatttggtaattgggataaggggttattcgagtgttgttttttaatttattttattttagttattttagggttaaaattgtagagtttgttggagagggttttatcgttttttttttttttttttgttttaaataatgtatttgttttagaatttaaaattgtttttttattttttatatttttttaatattggtaaggtgtattagtagacgtttgtgtttttatgtttagtagaaagttaattagaaaatagatttttattttttatggtagtataagtattttaatgtttgcgaattttgttattaatatatatttttttaagggaaaaaaatgtttttgtgttttagttttaaaatgtaaaggtatgatgttatttgttattatgtttaaaaaagtttttatttaataattttgttagaagagggagagagagagaaggtaaatgtttttttagttgttttttgtttatagtgtttgtgttttgtagataaatgtgaggattttttttaaattttttttttgtttgttaaattttattgttattgttaaatttagagtagatagagtttgcgtaatggaataaagtttttaaaattgaaatgtgatattgtttttaatattttttatttttttggatttttttttgttttattatttttgttaattaatttatttttagattttgtattttagaagtaatgggaaaaattagtagttttttaatttaattatttaagtgttgtttttgtgattttttgaaggtaaatattttttattttttgaagttattggggaattttatttaaattgtgtattgtttgtttttgtttagaattgttttttattttaaaatttttattgtttcggaatcgagagttatttataaattgttgaatatgtaattttgtggaatttgaaaaatagttcggggagatggatgtatttgtatagatatttgtatgagtagaaattattgtaaggtatttatgttaaattttttatttttgtagggttttcgtggtgttattatagaagatttttttaaattttttttatggttaagggttatagagtatggatatgaatttggggatttttttttttttttgtaggtgtagatgttttatttttaagattatgtttttttgtatgtgtgtatgtgtttttgtgtgtatgtgtttttgtgtgtgtaatttattaggattttatttataaggtatgttatatatgaagggttgtattttagatgatattaaagtttttaaatatgatttttggagttaaggtttcggaattttgtatttatgtttagagagagtgttaaagttagagtaaagtgtaatttgtttttttaaaaaagaattttttgataatttttgttgattttgtatatttgtataatttaaataaatatatattgtatatggaaagtagaaattttttaagagttgtttgtttaatttttttgtttagaagaggatttttatgggtaaagtttggatttggggttttgtgttataaaattttgattttatatttagtgtcgtgaagtttttttaggtaaatttggttgttgttgttagtgtatcgatttttcgttttcgattgttggtcgtagttttagtttttatttttagtaaaattatattttttaagatttgtgttttttttttaatttgtaagcgtttttaagttgttgttattggttttatcgatttaattgtttgagggtttaatttataagacgtttttgttatttagtgtagtatttagttgttgtttttaaatattttattattacgattttttttagttaagtaagtggttttaggagttaaagatatatttttgttaggtatttgattttgttgtttttgagatgttaatatatgtaggttattttgtttttaaagaaatgacgttattgtgtatatatattatgtgatttagtagttggagtttttgtttttttatttaggggattataaaagaggttgtggagcgttatttttgtattaattataagttaagaaaattgtttttaaatgtattttttatgttgtgtatgttgaatattttagaagtggagtttttaataagttgttatttttttttgtatttgaagtaggaagtggtttgagggagttgcgtggttttttatatgtaatttagtgggtaaaggtgttttgtttagaggtagagtttattagttgattgtattttgatttttaaggtatttttaagtgagtgagtcgggggaagggagtaagggagtggattggagtttgggttattatttgggttgttataataggtatataatggaaataggtggtttgattggggggaaaagattgatttaaattttagttgtgtaatttgtttattgttttaatggataaaaggtagtttatttaggtttataatagtatatttgtttgggtgtttaaatgtaattagatgtttttataaattttatttataaagtagtatatgtttttaagattttagttttttatttatatcggttttataatatttattttgatttgttgtaaaagatttggaataaataaaaatgattatatttatagtgagtatttttttatgattgttgtttttaaattttatagggtatttttattgtggtttagatatttggaattaattaatattttatttatttaagattaaaaaaaaaagaatttttaaaatttgggtttgtgaatgatttttgagaaagtgttttttgattttttttttttttttttttatgtttttttgattttttttttttttttttattatattttttttttttttttattgattttttttgtgtttggtaaaataaaaggttaaggaaataatgaatatatgggattatttgttttatattttaaatttttaagtaagttcggtattgtttttatttgtgggaatataaaattttttggttttttgtgggtgtattggattgttttttatattaaaggaaaatgtattagaggttttgttttgttttagaattgtaagtattgagatttatttgataatataatttagtaaaaaaaaaaaaaaagaaaaagagaaatttatttaaaaaaaattttaaatttttaagttttagagatttatatgtatcgttgtatttaaatgtgttatattagaattattaaaaatatagttttgatatttaatgaagtttgaaatttattaaggttataatttgagtaatttttttttttggattttataaaaattgaagaatttgaaggtatttatagttgtaggtgtttagtttttagtattgttatgaacgtaataaagaagggaggggtggagaaataggattcggtagaataatatattttttagaattggtttattttcgtagtgtgggggtatgttttgtaagattaattataggtttgtttttttgaaaaatgttacgaggtttaggtgggttggatttgttgaggtttttaatggaaatattgaataggaaaattttattaattttataattaaaaaaaaaaaaaaatgagaattggatgataatatgttttttttagttttagtgttttgggttatgtagggggtggaagatttttatgcggagattttgttgagaaaaatgtagtaaatgtttagttgagtttttatttttttttttattttatgtttattatttatgattatttgtaaatagagggcgttttttatttttaattgttttataattattaattgaatatttatattttgttaacgagagataggggttttggttttttttttttttttttagttgttgaggtgaaggtttgattataaaaaatggaaattattattagaatgatggggaaaattttgttattgatatagagttattaaattgagagtttatggagggtaaggagggtagttagaaaataaatgattgtttttttaaaagtgatggggttgaatggatttgttattattttgaggtttaaaaaaaatgttttttttataattatagtttttagtatgattttataatttttttaatagcgttttttatttaatattttgttagggattttttttatgatgttgaaagtagatgtatttgagagaagtgaagttatttattttgagaggttttttggaaaaagttatatttttgtgttataagtaataatatggaaaaatttaatgattattttagtatggtttttattatttagagtgaggatgaagatttgagttataggattgttgtttttggtaaggttgtcgtttggtagtttattattgattaagttatgttaattaggggttttttggtatattttgttataaaatagatatagtgatatataagtttttttaagagatgaagttataatttttgtgattaaaaataaaataaaagatttttgttagtttgagtttagtgttttatatatagaagggatttttaatacgtgttgatttgatattggatttgaggttagggattttagaatataggagtggtttttatttgagttaattttatttttcgatttttatatttttttttgtttttgttatttttttttatttgtggttgtgttaattgttgatatgttttaggtaaggaattagttttttttttttttttttttttttttttttttttatattgaggaaataaaataaaaataaaattttgtgatgatatatagtattgttaaaagttattttttggttatagtaaattatttttagttaaaaatagggaatgatgttttggttaaaaatattttgtttaataatgaatgtatatattatttatggatg

SEQ ID NO: 292 - DNA, 6196 bp, Artificial Sequence; identical to SEQ ID NO: 290
  chemically treated genomic DNA (Homo sapiens)

SEQ ID NO: 293 - DNA, 6196 bp, Artificial Sequence; identical to SEQ ID NO: 291
  chemically treated genomic DNA (Homo sapiens)

SEQ ID NO: 294 - DNA, 6000 bp, Artificial Sequence
  chemically treated genomic DNA (Homo sapiens)
taaagattatgtgtttagagttgatttttttatatatagtaaattttagcggatgaaaaggaaattgaatgaaatttgttgataataattgatgtttgtaggaataattggtttagatataaaatagatattaatgtagtttggggatgattaaaatgtagtagtttttaagttattgttagtatatatttttttagtttaaaaaaaaataaaagtagttttattaaataattagataattatgaggtgagaagtattgtttatagtatttgataattttaatttttgatggtttttaagattaagattttaaataagtaattttattttattcgattggatttaattagatttaatttaatttaatttaattttgttagtttaataattaaatatgggtagttattatagtatttaggttatgagttagatatttggatttaaatgtaaataaatatgttttttggtattaagaagtttattgatagggtattatttttggtagggtagattaaaatatttaagaaaaatataaaggatataatttattttttatggttattttttttttatgataataatatttagttgtattttttttttattatttaattgtaagttttttgaaaataaggttaattttttatttatttttaggtattttatttatattttatttaatgtttatatataatagatgttttattaatgttttgaattatatgaaaataatttaaatggattaattttttttgggtaaataagattgtttagttgattagaaagttagtaagaatatttttgggtatgaaggtatgttggatatttttgtgtatgagggtatgtcggattaatataagttatggaattttataaggtaaaatttatgatatatatatttttaatgataatattgataagaatatatgatttataaagttattttttagttaaagttatatagtaagaattaagatttgttatatataatattttttttttaagttattgagatataatttttaaaaatttgttgaaatttgattgttgtagtaatagaataagagaatttggaaattggtttttattttagttgtttaatatttttaagtgtttgtgtaaatatttataagtattatatagttatttaggaataattattttttttattttaattttttattatttaatgtaaatattataggtatagaaagatttagtttttatgtattgtgtatggaaattttggagtaatgtcgtgttgaatattataatttaatttggtacgtaatagaggatatttttaggtttggtaattatttagtgaattggattaaaggaaattgtataaatggattattaaggaaaaaaaaagtttttttgggtataataagtgagaattatttttttatttttttaaaaaatgaggattagtagttgtaaattatagaataattatgatttattgttggattatgtgatgttttatagttattttttataggatattttaaaggtaaaataagtttgttattggaaaattatttatttaatgtatttatttatttgttttgtaatagagaattggatagaattgttttattgttagaaaaataaatgagttcgtttaattaaaggattggttggaagtaaatagtgggaatttgtttatttaaatagtagaaggtatttttgattttttgttattagtgatttaaaaattatttgttgttaaatttattgtaagtattgatcgttaatatttttataagtttttttttttttattttttttattgatttttagattggtatatataggttattttttattttgttagttatatatatatatattttatttgtttagagagaggttgatatttgggaaggatgagagagattttaagtgtgtgagttattataggagttatttaaagtatagtgggtaattgaggtaagttgtttatattggagtgatatgaatttttaagaatgatttatgtttagttttttggaattttttaaaattttaaagaattataaggaataagtatttggttttaaatttttttttgttttataatatatagtgagatagatgtatgggagttagattttttaagtgattagtttttataggaattattgatttttgtttgtgtgtattatttatacgttttgatttggttgtttattttttattggttgttgattttttaattatttaagagttatttaagagataagtgattttgtatttgttagagatttttttttagatggtgatattattgatgggtttcggagaagaattatgttaaaagagagtaataataaaaaaattaaggttaagtggtatagagggtaaattagtatggtattttagtttgtatttagagatagtttgtgtatttgtaaataggtttgtttttaaggggagttaattttttgtttgtttatggtgattttatattgaatggagatatttaggatatgttttttaatatttttttttttagatttatatgattggagagtttttattattttattttaaattatatagtatttaaagtagttttgtatgtgttttatatgtttatatgtgcgtttataggttttgaaaataaaaatattaatattttagggttattttgttttgtttttttattgaaaggaatggaatagtgaggtggattataatagttgaaagaaggtttagtaggaagtagttaaagacgaattgttaaggaggaaaattttattttagatttgtaaaatttgttaaagtttcgttaaaatattatgtttattttaaggtgaggaattttagaggtttaggatggttgttagatacgggtatttatttagttatttatatattttttgcggttgtaaatttatagagttgtatattttagatttgagtagtatattgagagggagggttatttattgaaataaaagtttttgtttttatatacgaattgaagagtatttattagtttagtttcgtagagcgttttcggtttagtcgtggtagagttggtgaaggtgagtaggtatagcgttaggtagaagagatgcgaggaggatatggtgtgtatttttatttgtttaagaaatagagggagggttaggttttttttttgatttttgtaaggggagtggggtgggatagaagtgtattgatttttacgattttacgattgttattaattaggattatttagtatagaagttaatagagtatatgagaatttagagggagttgtggatggagcgtgtttcggtatttaataatttgtgtttatttttttggttattgtggatttttggaggagttttttttgaattttttttttatgggtttttattttaatgaattgagataaaatatttagaaacgtttattacggaaatgaaagatgttattattatagtgggattttatattattttgagattttggtagaatttttgaattattaaaggttaaattgtgtttagtatagatttggggttaaataagttttgttaatttaaatttttttaatattggttatttatagatggtatatgtatttattattgagtagaatatttttaattaaaatattattttttatttttgattaaaaataatttattatggttaaaaaatggtttttgataatattatatattattatagggttttgtttttgttttgtttttttaatatgagagagagagagagagagagagagagagagagattgattttttatttggggtatattagtagttgatataattataaatagaagaaaataatagaaatagaaaaaaatatgagaatcgaagaatgaaattggtttaaatagaaattatttttgtattttaaagtttttggttttaagtttaatattaaattaatacgtgttgagaattttttttgtgtatagggtattgggtttaaattggtaaaaattttttattttatttttagttataggaattatggttttattttttggagggatttatgtgttattgtatttattttatagtaaaatatattaagggatttttggttggtatgatttagttaatgatagattgttaaacggtagttttgttaaaagtagtagttttgtggtttaagtttttatttttattttaagtagtagaaattatgttaagatgattattaagtttttttatattgttatttgtggtataaagatgtggttttttttaagaagttttttaaggtgagtggttttattttttttagatgtatttatttttagtattatgggaagagtttttgatagggtgttaggtgaggggcgttattaaaagggttgtggagttatgttggaagttataattataagaagagtattttttttgaattttagagtagtggtaggtttatttaattttattatttttggagaaatagttatttattttttgattattttttttgttttttatggatttttaatttagtggttttatattagtggtaaaattttttttattattttaatgatgatttttattttttgtagttagatttttattttagtaattgaggaaaaaaaaaaaaaattaaaatttttgtttttcgttaataaaatataaatatttagttaatggttgtaaagtagttgaagatgaaaagcgttttttatttgtaaatgattataaataatggatataaaatagaagaggaggtaaaagtttaattgaatatttattgtattttttttaataagattttcgtatggaaattttttattttttatatagtttaaaatattgggattggaagaagtatgttattatttagtttttatttttttttttttttggttgtaaaattagtggggtttttttgtttaatatttttattggaaattttaataaatttaatttatttggatttcgtggtattttttaaaagaataaatttgtgattgattttgtagagtatatttttatattgcgggaatgggttagttttagaaagtatgttattttatcgaattttatttttttattttttttttttttgttgcgtttatagtaatgttgaaggttaagtatttgtaattgtagatgtttttaagttttttagtttttgtgaaatttagggaaaaaaattatttaagttatagttttagtgaattttaaattttattagatgttaaaattatatttttaatagttttagtataatatatttaagtgtagcgatatatataagtttttggaatttaagaatttaagattttttttaaatagatttttttttttttttttttttttttttgttgagttatattgttagataaattttagtatttatagttttaggataagatagaatttttagtgtatttttttttagtgtagggaatagtttagtatatttatagagaattagagaattttatgtttttataaatgaaaataatatcgaatttgtttaggagtttaaagtgtgaaataagtggttttatatgtttattatttttttggttttttattttgttaaatataaaagaaattaatagagagaaaggaaagatatgatagaaaaaaaagggaagaattagaaagatatgagaaaaaaagaaaaaaaaattagaaaatatttttttaaaaattatttataaatttaaattttaaaagtttttttttttttaattttagataaatggaatattaattgattttagatgtttgggttataatgaaaatgttttgtaaaatttgagggtaatagttataagaaaatatttattgtaggtgtaattatttttgtttgttttaggttttttatagtaggttagggtgggtattatgaggtcgatgtgaatagaaaattgaagttttaaaaatatgtgttgttttgtgggtggggtttgtgaaagtatttagttatatttggatatttaggtaggtatgttattatgagtttgggtaaattgttttttgttta

SEQ ID NO: 295 - DNA, 6000 bp, Artificial Sequence
  chemically treated genomic DNA (Homo sapiens)
tggataaaaggtagtttatttaggtttataatagtatatttgtttgggtgtttaaatgtaattagatgtttttataaattttatttataaagtagtatatgtttttaagattttagttttttatttatatcggttttataatatttattttgatttgttgtaaaagatttggaataaataaaaatgattatatttatagtgagtatttttttatgattgttgtttttaaattttatagggtatttttattgtggtttagatatttggaattaattaatattttatttatttaagattaaaaaaaaaagaatttttaaaatttgggtttgtgaatgatttttgagaaagtgttttttgattttttttttttttttttttatgtttttttgattttttttttttttttttattatattttttttttttttttattgattttttttgtgtttggtaaaataaaaggttaaggaaataatgaatatatgggattatttgttttatattttaaatttttaagtaagttcggtattgtttttatttgtgggaatataaaattttttggttttttgtgggtgtattggattgttttttatattaaaggaaaatgtattagaggttttgttttgttttagaattgtaagtattgagatttatttgataatataatttagtaaaaaaaaaaaaaaagaaaaagagaaatttatttaaaaaaaattttaaatttttaagttttagagatttatatgtatcgttgtatttaaatgtgttatattagaattattaaaaatatagttttgatatttaatgaagtttgaaatttattaaggttataatttgagtaatttttttttttggattttataaaaattgaagaatttgaaggtatttatagttgtaggtgtttagtttttagtattgttatgaacgtaataaagaagggaggggtggagaaataggattcggtagaataatatattttttagaattggtttattttcgtagtgtgggggtatgttttgtaagattaattataggtttgtttttttgaaaaatgttacgaggtttaggtgggttggatttgttgaggtttttaatggaaatattgaataggaaaattttattaattttataattaaaaaaaaaaaaaaatgagaattggatgataatatgttttttttagttttagtgttttgggttatgtagggggtggaagatttttatgcggagattttgttgagaaaaatgtagtaaatgtttagttgagtttttatttttttttttattttatgtttattatttatgattatttgtaaatagagggcgttttttatttttaattgttttataattattaattgaatatttatattttgttaacgagagataggggttttggttttttttttttttttttagttgttgaggtgaaggtttgattataaaaaatggaaattattattagaatgatggggaaaattttgttattgatatagagttattaaattgagagtttatggagggtaaggagggtagttagaaaataaatgattgtttttttaaaagtgatggggttgaatggatttgttattattttgaggtttaaaaaaaatgttttttttataattatagtttttagtatgattttataatttttttaatagcgttttttatttaatattttgttagggattttttttatgatgttgaaagtagatgtatttgagagaagtgaagttatttattttgagaggttttttggaaaaagttatatttttgtgttataagtaataatatggaaaaatttaatgattattttagtatggtttttattatttagagtgaggatgaagatttgagttataggattgttgtttttggtaaggttgtcgtttggtagtttattattgattaagttatgttaattaggggttttttggtatattttgttataaaatagatatagtgatatataagtttttttaagagatgaagttataatttttgtgattaaaaataaaataaaagatttttgttagtttgagtttagtgttttatatatagaagggatttttaatacgtgttgatttgatattggatttgaggttagggattttagaatataggagtggtttttatttgagttaattttatttttcgatttttatatttttttttgtttttgttatttttttttatttgtggttgtgttaattgttgatatgttttaggtaaggaattagttttttttttttttttttttttttttttttttttatattgaggaaataaaataaaaataaaattttgtgatgatatatagtattgttaaaagttattttttggttatagtaaattatttttagttaaaaatagggaatgatgttttggttaaaaatattttgtttaataatgaatgtatatattatttatggatggttaatattgagagaatttaaattaataaaatttatttggttttaaatttgtattgagtataatttaatttttgataatttaaaagttttattagggttttagagtgatatgggattttattgtaataatagtattttttattttcgtagtaaacgtttttagatattttgttttaatttattgaaataggaatttataaagaaagggtttagggaggatttttttaaagatttatagtagttaggggaataaatataggttgttggatgtcgagatacgttttatttataattttttttgggtttttatgtattttattggtttttgtgttgggtagttttgattaatgatagtcgtggaatcgtgggagttaatgtatttttgttttattttattttttttgtaaggattaaggaggaaatttgattttttttttgttttttgggtaggtgaagatgtatattatgtttttttcgtattttttttatttggcgttgtgtttgtttatttttattagttttgttacggttggatcggagacgttttgcggggttgagttggtggatgttttttagttcgtgtgtggagataggggtttttattttagtaagtagtttttttttttaatgtgttgtttaagtttaaagtgtatagttttgtggatttataatcgtagggagtgtgtgaataattgaatgagtgttcgtatttggtagttattttaggtttttgagattttttattttaaagtaagtatagtgttttggcgggattttggtaggttttgtagatttaggatggaatttttttttttaataattcgtttttaattattttttgttaagtttttttttaattattatgatttattttattattttattttttttaatgaaaggataggataaaataattttgaggtattgatgtttttgtttttaaaatttatgggcgtatatataaatatatggaatatatgtagggttgttttaagtgttatgtgatttggagtaaaatagtaaggattttttagttatgtggatttgggaaaaaaaatattaaagggtatattttagatgtttttatttaatatgaaattattatgaatagatagaaggttaattttttttaaaggtaggtttgtttgtaaatatatagattgtttttaaatgtaaattgaaatgttatattgatttgttttttatgttatttgattttgatttttttgttgttgtttttttttggtatagttttttttcgggatttattaatgatattattatttggaaaagggtttttgataagtatagaattatttattttttaaatagtttttaggtgattagaaagttaatagttagtaaaaagtagatagttaagttaaggcgtataaataatatatataagtaaaagttaatgatttttgtgggaattgattatttaaagaatttagtttttatgtatttattttattgtatattataggatagagaaagatttaaagttagatgtttgttttttataattttttggagttttagagagttttaggaaattgagtatgagttatttttaaaggtttatattattttagtgtagatagtttattttagttatttattatgttttgaatagtttttgtgatgatttatatatttgaagttttttttattttttttaaatgttagtttttttttaggtaggtggggtatgtgtgtgtatgattggtagggtagagggtggtttgtgtatattagtttggagattagtaagggagatgggaagaaagaggtttgtgagggtattggcgattagtatttatagtggatttggtaataaatagtttttaaattattagtgataaagaattagaagtgttttttattatttgaataggtaaatttttattatttgtttttagttagttttttaattgaacgaatttatttatttttttggtaataaagtaattttatttagttttttgttgtagagtagatgaatgagtgtattgggtgagtgattttttaatagtagatttgttttatttttaaaatattttgtggaagataattgtgggatattatatgatttaatagtgggttataattattttataatttgtagttattgatttttattttttaaagaaatgaaaaagtggtttttatttattatgtttaaggggattttttttttttttgataatttatttgtgtaattttttttgatttagtttattaggtaattgttaagtttagaagtgttttttgttacgtgttaggttgaattgtgatgtttaatacgatattgttttagaatttttatgtatagtgtatgaaaattggatttttttatgtttatgatgtttgtattaaatgatgaaaaattagaatggaaaaaatgattgtttttaagtaattgtatgatatttataagtgtttgtatagatatttaaggatattggataattaaaatggaaattaatttttaggtttttttattttgttattgtaataattaaattttagtaaatttttaaaaattgtattttaataatttgaaaaggaaatgttatatatagtaaattttgatttttattatatgattttagttagaaagtggttttgtaaattatatgtttttgttagtattgttattgaaaatatgtgtgttatgagttttgttttatagaattttatgatttatgttaattcgatatatttttatgtatagaagtgtttaatatatttttatgtttaaaagtatttttgttaattttttagttaattggataattttatttgtttaaaagaaattagtttatttagattatttttatgtaatttaaaatattgatggagtatttgttatgtgtaagtattgaatgagatatgaatgagatgtttagaaatgaatgagagattgattttgtttttaaggggtttatagttgagtggtaaaagaaaaatgtaattaagtattattgttataagagaaaaataattatggagaataaattatattttttatgttttttttgaatattttggtttattttgttaagaataatattttgttaatgggttttttgatgttaaaggatatatttatttatatttgaatttaagtgtttagtttatagtttggatgttatagtagttgtttatatttgattgttgaattgataggattgaattgaattgaattgagtttagttgaatttaatcgaatagaatggaattatttgtttgggattttggttttaagaattattaagaattaaggttgttaagtattgtggataatattttttattttatggttatttagttatttaataaaattgtttttatttttttttgaattgaaaaaatatatattaataatgatttagaggttgttgtattttggttatttttaggttatattgatgtttgttttgtgtttgagttaattatttttataggtattaattgttgttaataaattttatttagttttttttttattcgttgagatttattgtgtgtggagaagttagttttaagtatatagtttttg

SEQ ID NO: 296 - DNA, 6157 bp, Artificial Sequence
  chemically treated genomic DNA (Homo sapiens)
tttaagtagttgggattataggtttatattattaaattcgttaaattttttgtatttttagtagagttagggttttgttatgttggttagattggttttatattttcggttttaggtgatttgtttgttttgattttttaaagtgttgggattataggtgttaattattgtgtttggttttaattggataattttttttttttttgagattaagtgttattttgtcgtttaggttggagtgtagtggcgcgattttggtttattgtaattttttttttttaggtttaaacgattttttttttttagttttttattaattggataatatttaaaataataaatgtaattatttgtattggatttaaaagagtaataaatgatagggtatattgttattagtaattaattagaagtaataggtaaggtgaaattttttatttgttatttttgaattggtgtatagataaaggagagttaaggatagtgaggaatttagaaaatattattatatgatgagtaattgatgtgaagttatcggagtaatttataagtttatatgatgttatagtagaaagatttaagaattattttatattttttatttggaggaattgtattttgtttggagaaaagatagtattatttttattttttatttattgttttttttatatttaaattatttagttttatttatttagtttatttgttttgttgtataaagtattttaaagtaatttatagtagaaatatttataataattagataaagaatatagtatagtttgtaaattagggtaaaaagatattagttacgtagtttttattatatgaaattgaaattaagaaggtttttttgattaatgatttttaataatggttagattattttttgttttgttatttttttattttgtagtagatgtgatattgtgatatttagagtttaggttttaagaggttttatatatttcgtttttaaaattttgtttagtttttatgagaagttcggttagtttgtaggagtatgagagattatatagattatagttgaattatagtagttgtttaagtttagattttagatttatgagagaatttaggtaagataaagtgggggtttgatttaggtgaattgaattttttagtatattttagatttataagtattgataaatggttgatgttttattaaagttttgggaatagtttcgtttgttatgtagtaatagattatttataaagaatttatgaaatgaagtaaaatattttataattgaattttaaaataagtaagtggaatttaattaagtggaataggtttattgttttttttaattatgggaattttttttggagttttttatttttaaggaatattttatttgtgtttttattatatttttattaaaaaaaatttattggttttgtgttttttttatagttttgatttattttaaaatgatagttataaatttgatgaattaatttgtagtaatatgttttaattttttttttttttttagttattattttgtattttagttatattgttttaatgtttttaataatgttataagttaaatatttgatagtaggaatttttaaaaattttagttaatgtttttttatttttttttttttttgtaaggtttgttattatattgtgaatgttattttattagtgtaaattgtatttgtttatttgtaatataatagaattgaaataaaagatttttattattttttgtagttttttggatttgggttttgtatagttatttatttgttttggtgtgtgtattttttttttagttaataagtataagaggttttttatatagtagttggttaaaatgtagggatgtatattacggtttgaataaaattgtaatatgtatatgatatattttattttaatatggaggaaagttatgaatatttttaggaaaatggttatatgtaagtaagttgtgttttttatatgaaggaaaaataatatatcgattagaattatattgacgattataatgtagggaatataatttttttttggaagtttttataatatttttgaatttatagaaatttgttataaggaagtgattagatatagatgaaagatttatgtagaatgatgtttatagtagttttattagtaatagtgaaaaattagaaattgaattttttaattgttagttaaagtataatttatatagtagaatattaaagttaggtttttaaagattatttaattttatattggaaaatatttacgtataaaattaaatgaaaatgaaggaaagaaaatatagatagtattattttattattgtaataatatatagaaatgtaaataaatggaaatagagagggagaaggaaaaatattttaaaatgttaatgtgtttgggtagtaagatatgtttatgtaatttatttttagtgtttattatgagtattattatattcgcggttaaaaatcgtttaggaacgttttggagttttagtttttcgagcgtaggtagagtagttcgggttcgtttacgtttttggttttgcgcggtgtagtttgaatcgtttcggaaatagttggttcggcgcgcgcggcgggagggacgcgagtgttcggaagagtcgttttacgtgttttcggggaaattgttcgggagcgagaaggattgggattgagaggaaatcgaaaagcgaaagttagagtttgcgggagtagtacgtaggcgtagtacgtaggcgtagcggggttttttcgtagttcgtttttttttaacggtttttttttggcggcgggcgtattgttcgtacgttcgttttggggttgtagatcggtttgcgggacggggttttagagaggtcggtttacgcggttcgtacgcgcgagtgttagttttgtatacgacggaaggcggaggcgcgggtggttgtcgttttattttagagggagggagggaaacgtgttttgatttttgtatttaaggtgttggaaattttatttttgtatttttatcgtttttttttttgttttgaaaaggttttttttattcgttttatttcgttatttatatagtttgtatttgtattgatttagattttgttttgtttggtaagttgtgatttttagttagtttgggtagttgtttttgaattagaggttggggtttggtagtttttataggcgtttttaggttcggtttgtaaggggtttgttttttttttttggggttttttcgtttttatgtttttttagttgtggtgattatattagaaggaacgtgggagaagtataatggagaatgtttagttattggataatgatttcgaaagttcggttggttgaggaaataagagttttgtgtaatgtttgtgatttatttaatggttttaggaggtacgagattgagtttttttgggttttgttcgtttatttttaaggggttttatttttttagggtgaattcggtatttatttagaatttttagtgtgtgaaagggtttatttattttattgggttttaatttttagttttttgtgagagtgacgattagttttaaaatggttgtatataaataagattttaaggtatagagttttattatgtaaatagacgtttatttttttttgttagaataatataggattagttatgtaatttgtagggagggttcgttgtaaaatgaaaatgtggggttttttatttaaaattaatgaagaattttaagaaggtaataggagagtatgaagttaagcgtggagtttttttgagtgtttgttttgtggaagttagatttaggtggggaatttgggggtattttttgtatagtaattttgttcgatgtttatttaaatgaagaaataaattttataatattatttatttgtttaaaagtttttgttggttttaatttgtaataagaatttagggttcgttaatttgggtttatttattttttttatttattttattttattttatattttattaggttttttttaatttttttagtttttttttgttttttagatattttaagtttttatttgtttgagttttatgtatatatatattggttttttgggatgttgtttttttgattgtgtttatggattgttttttttttattttttaggttttagtttagttattatttttttaaagatatttttattgattgttttttttagtgattgtattatatttgtaatttttataatatttgttaaatttatttttgtttattatttgtttgtttttattttttttcgttagcgtgtaagtttataataggagggagtttgttttgtgttaatagttttttttatttagtattttatgagataatttagtttaattttttagggtatttatgtgtgtaatgaattttttgtttttttgtatatttagaatgttattgtatgttatttttgggagaattgagaaaatcgttaagtaaattattttttgtgttttgtggtttagaaattttggttaagtaaagtaatgtttgatataggtatttttaaatattttaaaaatattttttgaatgaataaatgaacgttattgattaatattgagattaggaattataggttaatttagttatttagattttagtattggttttaagatttatcgagttataattgaggggggaagagaataatgagtatgtatagcgtaaaaaatttttttaaaggatttttaatgagagttttatttttttatattttttttaattttttttttttttttgttttttttggacggtagagtttttttcgtttgcggtagtttattagtttgtgagatgtttaagaagatgattgttaagtttgatataagagtgttgtggaggattttttttttttttgagtcggagttttgttttgtcgtttagattgtagtgtagtggtgttatttcggtttattgtaagttttgtttttcgggtttatgttattttttgtggaggatttttattaggggtagaagtagtaatgtttttgagtgtaatggagagtttaggggaaattttaggaatatttggtttatttatgagtaggtagatgtttaggatgttaggtatgtatgagataatatttagtattaaagggaagttagagtgagtttataaattgtaattttagataatgtttattggaagtttagggtgaggtagggaggaagttttttttgtgtgattaaaagtaagtgtgttttggttaattaggatgaagtataatattgggggttgttttatgattttagagtttggagttgttaggaagagaattttagtttagttttgtaggtagtttaaggagtaaaggaaaggaaggaattaatgattgtttttgatgtgtttaaatattaaattattaataaatatttatttagggttagattgtattagattttagggatataattgtgagtagggttgttttggtttatgtatatatagagtttgtttagagtttattgaggaaaatagatgatattatttatattaaaggagataagtattgtgtcggggatgtagaggatgttatggaggaagcgtggtatgatttgagttatgcgtatatatgcgtgtgtgtgtgtgtgtgtatgtatgtgtgtgtgtttggtaggaaggttttttagagtttgaagaatgcgtaaatattatttaggtgtagggatatatgggatggggttggagaattgagaggatgtggtaggggaaatagagagaatatgggttattaaagaaattgaaagtagtttagttagttttgtgtgtagatgttttggtggataagaagttgttggggaggagtgaagagagatgagttgaagattaagaggggattaaataatacgtgattttggaaagatttgttgcgaattgtggtttttatttaaagttgggatttttaattagtttttgtgatatggatttttttggtagtttgatgaaatttgtaagttttttagaaaataatgtttttagttgaataagataagatgtataagatttaaaagaaaattaattatattgaaatattgatatcgggttaattttgtgatatattaaaattaattttgtgatatagtaatataaatgatttttttttttttttttttttgagatagag

SEQ ID NO: 297 - DNA, 6157 bp, Artificial Sequence
  chemically treated genomic DNA (Homo sapiens)
ttttgttttaaaaaaaagaaaaaaaaagaattatttatattattatgttataaagttggttttaatatattataaagttggttcgatattagtattttaatgtaattggtttttttttgaattttatgtattttattttatttaattaaaaatattattttttgaaaaatttataggttttattagattgttaaagaggtttatgttataaaaattagttaagaattttagttttggataaagattataattcgtaatagatttttttaaagttacgtattatttagtttttttttagtttttaatttatttttttttatttttttttaatagttttttatttattaaaatatttgtatataagattgattgaattatttttagtttttttgatggtttatgttttttttgttttttttgttatatttttttaattttttaattttattttatatatttttgtatttggataatgtttacgtattttttaggttttggaaagtttttttgttaaatatatatatatatatatatatatatatatatacgtatgtgtgcgtatggtttaggttatgttacgttttttttatagtattttttatattttcggtatagtgtttattttttttggtgtaaatgatattatttattttttttaatagattttaagtaagttttgtatgtatatggattaagatagttttgtttatagttatatttttggaatttagtataatttggttttgaataaatatttattaatgatttggtgtttggatatattaagaatagttattagttttttttttttttttgttttttgggttgtttgtaaaattaagttgaaattttttttttaatagttttaaattttaaaattatgaaatagtttttaatgttatgttttattttgattaattaaaatatatttgtttttgattatatagagaggattttttttttattttattttgaatttttaatagatattgtttagaattatagtttataagtttattttaatttttttttgatgttaggtattattttatgtatgtttaatattttagatatttatttatttatagatgaattaagtgtttttgaaattttttttaaattttttattatatttaagggtattattatttttgtttttagtaaaagttttttataaagaatggtatgaattcgggaggtagagtttgtagtgagtcgagatggtattattgtattatagtttgggcgatagagtaagatttcgatttaaaaaaaaaaaaagttttttataatatttttatgttaggtttgatagttatttttttagatattttatagattgatagattgtcgtaaacggaaagaattttgtcgtttagagagggtagagagaggggagaggttggaaggggtgtgaaggagtagagtttttattaaaagttttttagggaagttttttgcgttatgtatgtttattatttttttttttttttaattgtggttcgataggttttagagttagtgttgagatttgaatggttgaattaatttgtgatttttgattttagtgttggttagtgacgtttatttatttatttaaaaaatatttttgaaatatttgaaaatgtttgtattaggtattgttttgtttaattagggtttttgaattataagatatagaaagtgatttgtttgacgatttttttagtttttttagggatggtatatagtgatattttagatatataggagagtagggaatttattatatatatagatattttgggggattagattgaattgttttatggaatattggatggaaaaggttgttaatatagaataaatttttttttgttgtgaatttatacgttggcgaggagagatgaaaatagataaataataaatagggataggtttaataagtgttatgaggattgtaagtgtgatatagttattggaagaagtaattaatgagggtgtttttgaggagatgatgattgaattgagatttagagaatgggaaggaggtagtttatgaatatagttaggaaaatagtattttaaaagattagtgtatgtatgtatagggtttaggtaggtaaaaatttggggtatttgaggaatagaaagaggttaaggggattgaggggagtttagtgaagtatggggtgagataagatgagtaagaggggtaggtgagtttaaattggcgggttttggatttttattgtaaattgaagttagtagaggtttttaaataggtgagtggtgttataaaatttgtttttttatttaagtgaatatcgaataaggttgttatataagaaatgtttttaaattttttatttaggtttggtttttatagggtaggtatttagaagggttttacgtttggttttatgtttttttgttgtttttttgaaattttttattaattttgagtaagggattttatatttttattttgtaacgggttttttttgtaaattatatagttggttttgtgttgttttaataggggaaaataaacgtttatttgtatagtaggattttgtattttagggttttgtttgtgtgtagttattttggggttggtcgttatttttataagaggttggaggttggggtttaatgaggtaggtaggtttttttatatattggaggttttaggtgggtgtcgagtttattttaagaaggtagagttttttaagagtaggcgagtagagtttaaagaaatttagtttcgtgttttttagaattattgagtaagttatagatattatataaaatttttgtttttttagttagtcgaattttcgaaattattgtttagtgattaagtattttttattatattttttttacgttttttttggtataattattataattgagaaggtatgggggcgagaagattttagaagaaagaggtaagttttttgtagatcgagtttgaggacgtttatagaaattgttagattttaatttttggtttaagggtagttatttaggttggttgagggttatagtttattagataggataagatttgagttagtgtaagtgtaaattgtgtagatagcgaagtgaagcgggtaaaagagatttttttaggataaggaaagaaacggtggaagtgtaagggtaaggtttttagtattttaggtgtagaaattaggatacgtttttttttttttttttaaggtgaaacggtagttattcgcgttttcgtttttcgtcgtgtgtagagttaatattcgcgcgtgcgggtcgcgtggatcggtttttttgggatttcgtttcgtaagtcgatttgtagttttagggcgagcgtgcgagtagtgcgttcgtcgttagggagaaatcgttgggaggaagcgggttgcgggaaagtttcgttgcgtttgcgtgttgcgtttgcgtattgttttcgtaggttttaattttcgtttttcggtttttttttaattttagtttttttcgttttcgggtagttttttcgaaagtacgtggggcggttttttcgagtattcgcgtttttttcgtcgcgcgcgtcgggttagttgttttcgaagcggtttaaattgtatcgcgtaaagttaggggcgtgggcgggttcgggttgttttatttgcgttcggaaagttagggttttaaagcgtttttgagcggtttttgatcgcgaatgtgatagtgtttatggtaaatattgaaaataaattatatagatatattttattatttagatatattaatattttagagtatttttttttttttttttttgtttttatttatttatatttttatatattattataataataggataatattgtttatgtttttttttttttatttttatttaattttatacgtggatattttttaatgtgaaattaaatagtttttgagagtttaattttgatattttattatatgaattgtgttttaattgatagttggaaaatttagtttttgattttttattgttattaatgaagttgttatgaatattattttgtataaattttttatttatatttgattatttttttatagtagatttttgtaagtttaagaatattataaaaatttttaaaaaaagattgtgttttttatattataatcgttaatataattttggtcgatgtgttattttttttttatgtaaagaatatagtttgtttgtatatggttatttttttaaaagtatttatagtttttttttatattgggatgaaatatgttatgtatatattgtagttttgtttaaatcgtgatatgtatttttgtattttaattagttgttatgtaggaggttttttgtatttattaattggaaagaaaatatatatattaagataggtaagtgattgtataaaatttaaatttagagaattataagaaatgatagaaattttttattttaattttattatattatagatgaataaatatagtttatattgatgaagtgatatttatagtataatagtaagttttatagaaaggaggagaggtgaagaggtattgattggaatttttagaaatttttattattagatatttagtttataatattattagaaatattgggataatatagttgaaatgtaaaatggtagttggaaggagagggaaagttaaaatatattattatagattggtttattagatttgtagttgttattttgaaatagattaaggttgtaaagaaagtatagagttagtaagttttttttaataggaatgtggtaaggatatagataaagtattttttaaggatgagagattttaggggaaatttttatggttgggaagggtaatggatttgttttatttaattaagttttatttatttgttttagaatttagttgtaggatgttttgttttattttataaattttttatgagtgatttattgttgtataatagacgaaattatttttaaaattttggtaaaatattaattatttattagtgtttgtgagtttagggtatgttggggagtttagtttatttgggttaggtttttattttattttgtttgggtttttttataaatttgaggtttaaatttgaataattattgtgatttaattgtggtttgtgtggttttttatgtttttgtaagttagtcggattttttatggaggttgggtagggttttgagagcggagtgtgtaaggttttttgaggtttagattttaaatgttataatgttatatttgttgtaaggtggggaaataatagagtagggaataatttggttattattgaaaattattgattaggagagtttttttagttttagttttatataatgaaaattacgtaattgatatttttttgttttggtttgtaggttgtattgtattttttatttagttattgtagatatttttgttataagttgttttaaaatgttttgtgtaataaggtagataaattaagtaaatagaattggatgatttgggtataaaagaaatagtgagtgaagaataggaatgatattgttttttttttaagtaaaatatagtttttttaaatgggaagtgtggagtagtttttaagtttttttattgtaatattatgtgaatttatgagttatttcggtgattttatattagttatttattatataatagtattttttggattttttattgtttttgatttttttttgtttgtatattagtttaggggtggtaaataggaaattttattttatttgttgtttttgattgattgttggtgatagtgtattttgttatttgttgtttttttaaatttaatataagtagttgtatttattgttttaaatgttgtttagttgatgggaggttgagggaggagaatcgtttgaatttaggagggggaggttgtagtgagttaagatcgcgttattgtattttagtttgggcgatagagtgatatttggttttaaaaaaaaaaaaagttatttagttgaggttaggtatagtggttgatatttgtaattttagtattttgggaggttaaggtagatagattatttgaggtcgggagtgtgagattagtttggttaatatggtaaaattttgattttattaaaaatataaaaaatttgacgggtttggtgatgtaggtttataattttagttatttggg

SEQ ID NO: 298 - DNA, 6157 bp, Artificial Sequence; identical to SEQ ID NO: 296
  chemically treated genomic DNA (Homo sapiens)

SEQ ID NO: 299 - DNA, 6157 bp, Artificial Sequence; identical to SEQ ID NO: 297
  chemically treated genomic DNA (Homo sapiens)

SEQ ID NO: 300 - DNA, 6000 bp, Artificial Sequence
  chemically treated genomic DNA (Homo sapiens)
tttttgttttatatttatgatttatatggtaaaatttattattttttttatatatatttaaaaagatatatttttttttttgtttattataaataataaatttggtataaagaagtaatgatttttaaagattaaaatattattaaatgtaatttaaaaggataaagtaatatttagttttttggataattgttaagtttatttttatatagtgattttaaagatttaaaattataataaaaatttgatataagtaagttttaaaatttattaggaaaacggagagttttttatgattattatgtaatttaggatttatattagtatataggtggtaatatgtagagtagatataagtgaattttgttttgttagatttttggggaaggagtttggatttttaagtagggtatggaagagtgtgtatgtatatttgtagtcgagtatatgtatgtaggtatgaggttacgtttattttataaatgtttttttaaaggagtgtgaggaaatgtttggtttataaagttagttatttttatatatattagtagaaacggatttaagtttagttttttggtatttttgttgaagtaatttgattttttagtttagttttattttatttgagtggaaaaatttgtggttgtttttttttttgtttggtaattaataaggatttatttaaagtagatatgttggatcgttaggtaatgggagttgtaacgttttttattagttaagcgaatttaggtaatttatttttttattaataaggtgtgtgtgtgtgtgtttagtagataggaatttgttttgttatttaggttggagcgtagtggtagtggagcgtagtttattgtagtttttaatttttggattagagtaatttttttattttagttttttaaggagtttagattgtaagtgatatggtttggttttatgtttttatttaaattttatttcgaattgtaatataatttttatgtgttaagggcgggattagtggaggtaattgaattatgggggtagttttttttatgttgttttcgtgataatgagtgagttttatgatatttgatggttttataagttattggtattttttttgtttgtatttatttttttttttgttgtttcgtgaagagatgttttttgttatgtagaattgtgagttaattaaatttttttattttataaattatttagtttcgggtagttttttatagtagtatgagaatagattaatataataaatacgagttaagaagtttggttaatttttaaattttttgtagagatagtttttcgttatgtttttgaggttggttttaaatatttgattttaggtaatttttttattttagttttttaaagtgttgggattataggcgtgagttttcgtattttgttatagttggtttttaaggttggttgagttagtatatatgtagtatttggtatagaagaggtgaattaataagtttatgtttgggttggttaggtggtttacgtttgtaattttagtattttcggaggttaaggtgggcggattgtttgagtttcggagtttaagattagtttgggtaatatggtgaaattttgtttttattaaaatataaaaaaaaattagtagggtatggtggtgtgtatttgtagttttaattattcgtgaggttgaggtaggggaattgtttgaatttaggaggcggaggttgtagtgagttgagatcgcgttattgtattttagtttgggagatagagagagattttgtttttaaaaaaaaaaaataatgaataaataagtttatgtttataaatttggagttagttttatttatttataaaatttgttattaatttagggagtggtatggttattttttagttattgagtttaaattttagatttagggttgattttttttattttattttaagatttgtttttttttgtttttaatattttatttttttagtttagtttttgttgtttatagattggattatattaattttttgtgtaaaaattttatgatttgtttatttttaggtagatttttattttattttatttttatttattaataaagtaatttagttattaaattatttattgttttttaattgtgtttaatatttttgttttgttttagttattcgtttttggaaatagtttttttataaatttttgcgtttttaaattttatagtatttaaagttatgtataaaagtttttttttttataaagttgtttgagatttatttataattaagttttttttgatttgcgttttattgaattttgtatttttattagagtatcggttttagttttttttgtaaagttttgtgatgtttttagagttttcggcgggggaaggtgggtggggagggggtagagtagtggggtattttgttttttaatattttatggattttggatagtgttttgtatatattatgtgttcgaaatagtttgttgaattgaaattatgtatattttagacggaattagaaagtaaaaagtaaattatattatgattttataagtgtgagtttagtatttttattaagtaatggttgtataatggattgtgttggaggtttaagttttgtttttgttttatgaaaataattttttatttatataaataatatttaaagtataattaattatatttttgtatatttattatagaattttttagtatcggttagaaatttttttaagattatattattttggggtggggggtttgtaaaaattaaatattatttttaaattttaggaagatattaagtttttttatttttgaatatagaaatataattaagatttcgaagttatgtatttatttatttgattttatgaatatttattgatttgttattttgtgttttaataagggtttggggatttaattaaaggagtagttacgtatagtacgttaggtgttaagattgtcgaggttatatatatagagtgcgaacgttaatttagatagttttcgaggatggtatatagtaaatgaaattttttgcgaaaagaagaaaacgtgattgatggaaaggggtggaaacgggagaaagtgacggtaaatgggaaggtgtagtgttttttagaggaaaattatattttataagttttttttattgttagagtacgattggtaaggataatcgtgttgagtagtgttattttcgagaataggtggtattgttcgtatttggaatatttaggacgcgttttttttttgggattattattcgcgggttagtatagacggttcgttttcgttcggcgtttaattgtacggttcgaggattttgtttttgcgcgttttattttcggtattcggaattttacggttatttattttgcgcgtaggattcggaagggttaggcgggggcgcggcggtgtagtttttttcgagcgcgttgggtcgtttttgttcggtttggggtttgttaggcgcgattttttcggtgtagtcgagttttttcgtagattttgcgtaggaaagcgaaattattcggtaggagaaaaggtagcgttggcgttcggttttttttcgtttttattaattatcgggcggtttcgcgtttagttaattagacgcggttgtttcgtgggcgttatcgtttttttttgcgggtcgttgtttcgtttacgcgttggggtattttcgtcggttttcggcgggggtcgtcggttgggtgagttgtagtttagtttcgtgttgttacgttgggaattggcgttttgtttatatattttagagaacgattagaaggacgtgttgtgtttgtagaagtttaaatttggaggtttttgtagtagttttatcgtcgagaatttaggtagaggatagatttggcgacgtcgttattttagaagttttttttagtaattgattttcgtgttgttaaatttagggaacgtttttttgttttttttattttatttgatagttcggaagtatggggtagagttgacgtttttgtttttgaaatacgttttttttttggttatgatgataatatattttttttgtttttttttgtttttggtattttttttatattgtttttatttttattattaaattattatatgttaaggttgttagggtttagatattcgttagtttttttatttgggttttttttaaacgttgtgttgtgatgattttatttatagttttagtttttttttagatggaggagttttaaatgtttatttcgtttatattttttttttgggttttatatttataatttttatttgtttttttatttgtatgtgtagtgagttttataaattatgtttagaattaaatatttttttttttaaatttgttttttttttagaaatggtatatgatagatatttaggatttatagttgatattgtttttttttttatttcgtaatatttgatttttaaattttaattgatttttttttttaaatattttttaagttttatttattttgttttattttttttgttgtttttttttgtagtagattttcgaatggttgttttattttagtttttatttattttttaatttattttttatataagagtttgagtgtttttttttttaattgaaaagtagattatgttatttgttaatttgaaaatttttttatggtttttttttgtttttataaaatttagttttttaatatatattataaagttttggttgttcgatttttttgtttaattttataatgtgttattttgttttgtttattttagtatttagttttttaaataaattatattttttaaatttagggattttttattttgagtttggaaaattttttgagttaatatttgttttatttaatttttcgttggttaatttattttttagattttagtttaaaaattttagtttaaatgttatttttttaggtaggtattgttgaagttagataaattaaatttttttggattatatgtttataaaattaattagtttttttaagtagacgggatttgagttaagttttgaataattaggtattttggggtaggagaaggatttgaataattttttatggatatgtttatatgtgtgtgtatgagttttttttttttgtatatttatttgttttttttgttataaatgtatttttataaagtaagttagtagtgaaattagatttttttgttaagagatgttacggtattaaaagtgttttttttgtttttatttatttaagaattaagataatgttttattgttttttgaaaaaagttgtattaatttatttttaacgttgttaataaagatttgagattgggtaatttataaaataaagaggtttaatggatttatagttttatatggttggggaggttttataattatggcgggaggtaaggaggaataagttatattttttattgatggcggtaggtaaagagtttgtgtagggaaatttttatttttaaaatgatcggattttcgagatttatttattattataaaaatagcgtaggaaagtttcgtttttataatttaattattttttattagtttttttttatgataggtgggaattgtgggagttattatttaagatgagatttgggtggggatatagttaaattatattaaaagttgattttaggaagggtagattatatgttaaaaattttttttttggtattataaaatttgtatagatattagttttaatattgatgaaggaatggaataattttaatatttgtaaataggattatttggtattttaaattttaatttggattattaagatttgtggatgtttttttttttatttttttttattttagtatttatagtaatatttattataagtttttattatttgagaattggaatgttatgttaatttttaggtatattattttttttttgttttttttttttttattatatttgttaaatttaattttttaaaatattgtattgatatagttattttttgtt

SEQ ID NO: 301 - DNA, 6000 bp, Artificial Sequence
  chemically treated genomic DNA (Homo sapiens)
agtagggaatgattatattaatgtagtattttaaggaattgaatttggtaaatatagtgaaggagaaagagataagaaaaaggtagtatatttagagattagtatagtattttaatttttaagtgatgaaggtttatggtaggtattgttgtggatgttaaaataaaggggggtagggaaggaagtatttatagattttgatgatttaaattgggatttggagtgttaaataattttatttgtagatgttaggattattttatttttttattaatattgaagttaatatttgtgtaagttttatagtattagaaaaaaaatttttaatatgtaatttattttttttagagttaatttttgatatagtttggttgtgtttttatttaaattttattttgaatgataatttttataatttttatttgttatgggaggaaattggtgggaggtgattaaattatgggggcgagatttttttgcgttgtttttgtgatagtgaatgagtttcgaggattcgattattttaaaaatgggagtttttttgtataagttttttgtttgtcgttattaatgaaagatgtgatttgtttttttttgtttttcgttatgattgtgaggtttttttagttatgtggaattgtaagtttattaaatttttttattttgtaaattgtttagttttaggtttttattagtagcgttaaaaatggattaatatagttttttttagagaatagtaaaatattgttttggtttttgggtgagtaagagtagaagggatatttttggtgtcgtggtattttttggtagagaagtttaattttattgttaatttgttttgtgagggtgtatttgtgataagaagaataaatagatgtgtaaagaaaaaaaatttatatatatatatataggtatatttatgggaaattatttagattttttttttattttaaagtgtttaattatttaaggtttgatttaaatttcgtttatttgaaggaattaattgattttatgagtatatagtttaaaaagatttagtttgtttggttttagtaatgtttatttggagaagtgatatttaagttgagatttttaaattaagatttaaaagatgagttagttagcgaagagttgggtgaagtagatgttggtttaaggggttttttaaatttagggtgagaagtttttgagtttggagagtgtggtttatttgaagaattaaatgttgaagtaagtaaagtagagtggtatattatggggttggataaagagatcgggtaattagggttttatagtatgtattaagaaattgaattttataagagtaaagaaaagttatggaaggatttttaggttggtaaatgatatgatttgttttttaattaaaaaaaaaaatatttaaatttttgtatggagaatggattaaaaggtagataagggttgaagtgaggtagttattcgggaatttattgtagaaggaggtagtagaagagatggagtagagtaaatgagatttgggaaatatttaggaggaagaattaattaagatttgaggattaggtgttgcgaggtgagggagaaggtaatgttaattatgaattttaggtatttgttatgtgttatttttagaaaaagagtaggtttgaggagaaagatgtttggttttgaatatagtttgtagagtttattgtatatataagtggagaggtaagtgggagttgtaggtgtgaagtttagaggagaggtgtggacgggataagtatttaagatttttttatttagaaggaaattgaagttgtgggtgaggttattatagtatagcgtttaggagaagtttaggtaaagaagttgacgaatgtttggattttgataattttaatatataatggtttgatagtggaggtggaggtaatgtagaaagaatgttagaggtaggaaaaagtaagaaggatgtgttattattatgattaaggaagaaacgtgttttaagaataaaggcgttaattttgttttatgttttcgagttgttaagtaaagtgagaaaaatagaaaagcgttttttgggtttagtaatacggaggttagttgttaaagggagtttttagaatgacgacgtcgttaaatttgttttttgtttggattttcggcgatgaaattattatagagatttttaagtttgggtttttgtaaatatagtacgtttttttgatcgttttttaagatatgtaaatagaacgttagtttttagcgtggtaatacgggattgggttgtagtttatttagtcggcggttttcgtcggaagtcggcggaaatattttagcgcgtgggcggagtagcggttcgtagagggaggcggtggcgtttacggaatagtcgcgtttaattggttgagcgcggagtcgttcggtgattggtgggggcggaagggggtcgggcgttagcgttgtttttttttttgtcgggtagtttcgtttttttgcgtagagtttgcggaggggttcggttgtatcggggggatcgcgtttggtagattttagatcgagtagaggcgatttagcgcgttcgggagaggttgtatcgtcgcgttttcgtttagttttttcggattttgcgcgtagagtgagtggtcgtgaggtttcgggtgtcgggggtgggacgcgtagggatagagttttcgggtcgtgtagttggacgtcgggcgaggacgggtcgtttgtgttgattcgcgaatagtgattttagaggaagaacgcgttttgagtattttaagtgcgagtagtgttatttgttttcggagatggtattgtttagtacgattgtttttgttagtcgtgttttggtagtgaagaggatttgtgaaatataatttttttttagaaggtattgtatttttttatttatcgttattttttttcgtttttatttttttttattagttacgttttttttttttcgtagaaagttttatttgttgtatgttattttcgagagttgtttaggttaacgttcgtattttgtgtatataatttcgatagttttggtatttaacgtgttgtgcgtagttgtttttttggttgaatttttaggtttttgttggggtataaggtggtaggttagtaaatgtttatggaattagatgaatgagtatatgatttcggaattttaattatgtttttatgtttaaagatggaagggtttaatgtttttttagagtttaaaagtgatgtttagtttttgtagattttttattttaaaataatatagttttaaaaaaatttttggtcggtattgaagagttttgtggtaggtatgtagaggtgtggttgattgtgttttgaatgttgtttgtatagataaggagttatttttatagaatagaaataggatttgagtttttagtatagtttattgtgtaattattgtttaatgaggatgttggatttatatttgtgagattataatatggtttgttttttattttttaatttcgtttgaaatatatataattttaatttaataaattgtttcgagtatatagtatatgtagggtattgtttaaggtttataagatgttaaaaagtaaaatattttattattttattttttttttatttattttttttcgtcggggattttggaggtattatagagttttataaggaaaattggaatcgatgttttaatagaggtatagaatttagtgagacgtaagttaaagaaagtttaattgtgagtaagttttagataattttatgaaagaaggggtttttgtatatagttttgaatgttataggatttagagacgtaaaaatttgtggagaggttgtttttaagggcgagtagttggagtaaagtagaaatgttgggtatagttgaaaaatagtaaatgatttggtgattgggttgttttgttgatggatgaagatggggtggggtggaaatttgtttaggaatggatagattataggatttttgtataggagattgatgtggtttaatttgtgggtagtagaggttggattgggaaggtagaatgttggagataggaaggagtaggttttgggatggagtggaaggaattaattttaaatttgagatttgagtttagtgattgggagatggttatgttattttttgagttggtaataggttttgtgagtagatgagattgattttagatttgtgaatatgagtttatttatttattgttttttttttttagagatagagtttttttttgttttttaggttggagtatagtggcgcgattttagtttattgtaattttcgttttttgggtttaagtaatttttttgttttagttttacgagtagttgggattataggtgtatattattatgttttgttaatttttttttgtattttagtagagataaggttttattatgttgtttaggttggttttgaatttcggagtttaggtaattcgtttattttggttttcgaaagtgttgggattataggcgtgagttatttggttagtttaaatatgagtttattaatttattttttttgtgttaggtgttatatatgtattagtttaattagttttaagaattaattgtggtagggtgcggaagtttacgtttgtaattttagtattttgggaggttgaggtggaaggattgtttgaggttaggtgtttgagattagttttagaaatataacgagaggttgtttttatagaaaatttaaaaattagttaggttttttggttcgtgtttattgtattagtttgtttttatgttgttataaagaattgttcgagattaggtaatttataaagtgaagaggtttaattgatttatagttttgtatggtagaaggtatttttttacggggtagtaggagagagaatagatgtaagtaggggaaatgttagtggtttataaaattattagatgttatgaggtttatttattattacgagaatagtatgggggagattgtttttatgatttagttatttttattggtttcgtttttaatatatgggaattatattataattcgaggtaagatttgggtgggggtatagagttaaattatattatttgtagtttgagttttttgggaggttgaggtgggaggattgttttagtttaggggttggaggttgtagtgaattgcgttttattgttattgcgttttaatttggatgatagagtaagtttttgtttattaaatatatatatatatattttgttgataggggagtaagttatttgggttcgtttggttaataagaggcgttgtagtttttattgtttgacggtttagtatatttgttttaggtagatttttattagttattaagtagggagggagatagttatagatttttttatttaggtaaaataaaattgaattgaaaaattaaattgttttagtaggagtgttaaggggttgggtttgggttcgtttttattggtatatatgaggataattagttttataggttagatatttttttatatttttttggaaggatatttgtggagtaggcgtgattttatgtttgtatatatgtgttcggttataagtatgtatatatatttttttatgttttatttgaaaatttagattttttttttagaggtttggtaggataagatttatttgtgtttgttttgtatattgttatttgtgtgttgatataaattttaagttatatgatggttatgggagatttttcgtttttttaatgaattttaggatttgtttatattaagtttttgttgtgattttgaatttttaggattattatgtaaaaatggatttaatagttatttaaaaagttaagtgttattttatttttttaaattatatttaatgatgttttaatttttaaaaattattatttttttatgttagatttattgtttgtagtaggtaaagaagaaaatatatttttttaaatgtgtataagaaaaataatgaattttattatatgaattataaatataaaatagaag

SEQ ID NO: 302 - DNA, 6113 bp, Artificial Sequence
  chemically treated genomic DNA (Homo sapiens)
ttattttatttgttttgtagttttatttataagagttttttagtttttaaatatgatttatatagtgtaattattataatattaagggtatttatgatagttgttatttattgagtatttattttatgttaggatttggtattgtttatgtattttatttatttgatttgtttaaaagtatgtagttatttttattttttatttttagatgaggaatttgaattttttaaatattaagtaatttagtatgtgttggaatttgtatatgaaaatttatattggtttgaatttaaagtttatttaaagtattaagttatgttgtttttatgatttaggttatgtgtttagattatgtaaatgtttattttataaatttttaattggaaaaagattaagtaatttttaatataaatagtttatttttttaaaagtgaaatatttttgatgattgatttgtataatgtgtttttattttaataagaagagtaagaaaatggaaagtattgtatatgttaaatagtttgatttaattttattgtatatatatattaaaatattatgttatatattataaatatgaagttatttgttaattaaaaaaaaaaagaagaaaagagaagaataggtttagaatagaaatgaagtttatgggagtataaaggtgtaatagtgtagattaattgcgtgagttttaaataaagtttttaaaagaattttttgaaatttttgggtaagttttttaatttttttgaattataattgttttatttattagaatagataatagtgtaggtttttattttattttggaatgggtatgatatttttttagttttattttttatatttggttatatttttatattaggtttttattttatgtaaaagatttgttgggaaggtttttgaggggtttttttatttttttatagagttttttattaaatagaggtaaaattaaattatgttttttttttttatggtattttgaattttttttattatgtgatttattagaattatttatttatgtatttggtttatattattgagtttttggtgaatttatattgtttttttttataaaatataaagtaggtggtttatataaaatatatttttaataaatgtggaatagaaggtatgatttatgattattttattttattaaatgtatgatattatttggattacgtattgtgatatattattaaaaataagtgatttttaaaaaaaaatttttagaattaggatagatgtattgtgatttacgttattattattattattattattattattattattattattattttgagtcggagttttgttttattatttatgatggagtatagtggtatgattttggtttattgtaacgtttgtttttcgggtttaagggagttttttgttttagtttattcgagtagttgggattataggcgcgcgttattacgtttagttaattttttttgtatttttagtaaagatggggttttgttattttggttaggttgttttcgaatttttgattttaggtgatttattcgtttcggttttttaaagtgttgggattataggtatgagttattgcgtttggtttgatttatatttttaaaagggttgtgttattgaaataattaggaaagaattatatttttaggtgaaggaaaatgaataatgtttttttttttttttaagttaagaaaaatttagttttttagttgatagtatatttaagttagttaaattaagtagttttttgttttcgttttattttatttatttgttatgattaaatattttattaggttgtaagtgggtttttaacgttgatttttttattttgggatttgagaggtatagtttagagtattattttttatttaaatgttagtatgttattagtagaaattattttttaggttaaatattgttttttttagaaattttttttttaaggattagtttaaatttaaatttattagagaggaaaatagtagattttagagttagatgaagaatttatatttatttggttttgaatattatcggttgtgagatggtgtaggtaaaattttaagtgtataatttggtaataataaattattaataaatattaatgttgatgaggtttttgggttatataaagaaatagggagtgaggggatttgaaattttggttattttatagaaatgggtgggaaggggtttttgattgagatagaagtttattttatatgaagtaattttttattgagttttttcgttttttatttttgttggaaatattaggtaaagttatttttggttttaaagtatttttatatttaaatacggaatttttttatttaatttttgtttgttgtagatgttaagtatataaagaggttgttagagtttgaaatatttggatttttgttaggtattagtttcggaattttagttttgttcgtttttaaaaacggtttgtagttagaggtttaagttttatttttttttagcgaatttttacgtacgagggaggcggggcgtgtgtttttcgcgcgtggttttcgggtagtattttttggggcgtcgtttgtttttatttacggtcgggttttgacgttatgggttgcggttttttttcggttgagtttataaagcggtaggtgcgcgtcgttttatagacgttcgtatatttgggtgttagcgttttagaggtttcgggatagttcgaggcgtcgcgttcgtcgtttcgagttttttaagttttcgagagcggcgtatattttcggtttttattcgtttttttaatattcgttcgttttggcggtagttcgtgttttagagatcgagttgttttagagatcgagacgtcgtcgttgcgaaggattaatgagagtttcgttgttatcgtcggcgtcggtggtgttgtcgtttttgatattcggtttaggtgaggatttatcggcgttgaattgttgggttttttttttatggtaggttttgttttttgagtttggtttttgtttttttaaaaatcgttttttagttttttcgattttgcgtcgtaggaggtgattattgtagttttttttttaggaggaaaagagaagggtagatgttttaaacgtttaggataaggtgttttagagaatcgttgtattttttttttagtttagttgagaagacgggagagattatttgaatttaatttttcgttttatagattaaaagattaaaaagattaagatttagagaggtgaagtgattttcgtagatattggatttagtagtgtttgttgttttttgtttaattttttatttttgtttagtgattttttttttatttttttagagggatttagagtatttcggcgagaggttaaaagtattattttgatgttgttttattgagatttaagaaaaagtaagataaagtagtggtttaattttgggttttaaattttatttagtatttagtttattgtttatgtagtaataataataatgataatgaaaaatgataataataatcgatataattaattattgtttatattattttaaaagattattttttaaaaatattttttaaaaatatgaatatattttttaaaaatatgaatatattttttaaaaatattttttaaaaatatgaatatatttgaagaaaatttgatatttgtatttaaaatttatcgaaataggttaggatggtattttagtaaaaaaagaaatgtatttggaatgtgaagtgatgggaatttttagatattatttattaagtaattgtattagattaatttgttaatttggcgggatttttttgatgtggaaattaatgtggattatttgtggaaaagaaaaattttagaaaagtatttttgtaattgggatagttgaatttgtttgttggtaaaaatgtaaagttttttttatagaaatgatttaattataaataatagtatatgtgtaataattgttttgatgttaaaagataaatttttttatttaatatagttgattcgaaaggtattttattttatttttttttttttttttttatttttttttttgtaggttattatgttgttggattggattttaatgatatttattttgggaagcgtgaattattttttggggattatagtgttgatggatttgaggttattttaagaagtgagatgtttttagggagtgagattttttttgtgagtgaaatgttttttagtagtgaatcgttttcgggagtcgattatgattatttagaagagtatgataacgaattataaatatttggttatattgtcgatgatttagttagaggtgagtaggggataaagtaaaaatatggtttgtgagatgtgggtttatatgagtaaagttgttttagaagtaaagttgttttttagattttttagtggttttattgtatatttgttggatagtttttaggtaaattgtgataaaaagaattataatgtgggtatattttatatggttagagtgattataaatggtgtatgttttatttttaaatttaatttttataatgattttaagtaggaattgttatttttattttatagatgtgataattgaagtcgaaaaaggttttgttttaggttttataggtgataagtagatgagttagaattagagttttagtttgtttgattttatgtagaagagatattaagtttttttttattatgttatatgatttttattttgagagataaatttagatattaattatttttatttattttgtattttagtttttgtatttttttttttaatattatttttttttagataattgtattttaatataaataaggggataaggaagtaatgggataggaggtattagattttagcgtttaagtattaggtgatgagaagttgatggaataataataataatgttatttggaaatattaaagaagggtgaatatatttagattttgtattgttaaaattattttttaattttaaattttatttgttagttatataatttatggttttttttatttttttgttattttatattttaaaaaggttttttgtttggagtgaaagtattaaagtaagagagaaatattgtatattttggagtttgaaggaagaagaagttaatagtaaataagatttaaatattttaagagtatttattatagaggtagggtaagatggttttagagttgttgaaggttttttttgttttgatttgagtttttttggttttttttttttttgtttggtttttagaattggtgaagggatattaagtggtattagagggatagtgatttgggtgagtgggaagtgagaaaatttttagcgaatattttatttaattttttttttttttaaagtgtgtttttttgtgaggtgggtaaggggtttatttgtgtttatttttgaaggtatgagattagatttattaaggtgtttagaaattgtttttttaaatatgttttaagttgttaatattttagaaggttaagtaaatgattagtagtataaatgatgattagtgtttaaaattgtaatgtattgtgaaatagagtgaaaatgttggttgaatattttcgaaaggttaagttaaatgtttatgatgttagtgtttatcgtaatattttagtatagtgatttttttatttgtttttgtttatagtttgtaatttatttgataaagtgaagttataacgtttatttaaaatattttttttaaaggatttttttgttttgtgtttttttatcgttagagaaaagttttaatataaaaatcgtataattattttttaaatatttgttattaattttatttttgttaaatgttattataataaattgttaaaatatttagtatttattttttatttttttaattatagatattttatttttgatattttagttgatttttattatgtttttaatgttttgtattgaatgggtgttgtatgattattatgattaatggtattttttttttattgaaatttgtttgttaaatatttatttggataaatttttttagatattagtgtaataaaatgtatagtattaatatgtaaagttatttgttatttttagtatgtgggta

SEQ ID NO: 303 - DNA, 6113 bp, Artificial Sequence
  chemically treated genomic DNA (Homo sapiens)
tatttatatattaaagatagtaaatggttttgtatgttagtgttgtgtattttgttatattaatgtttgaagaggtttatttaagtgaatatttagtaaatagattttagtaaagagaaaatattattagttataatggttatgtagtatttatttaatataaaatattagaaatatagtgaaggttaattagggtattaaagatagaatatttgtgattaaggaaatggaaaataaatattgagtattttagtagtttattataataatatttaataaaagtaaaattagtagtaaatgtttaagaggtggttatgcgatttttatattgaaatttttttttgacgataaaaaagtataagatagaaaagttttttaagagaaatattttgaatgaacgttgtaattttattttgttagatagattataaattatagatagaggtaaataaaaaagttattatgttgaagtgttgcgataagtattaatattatggatatttaatttagtttttcgaaggtgtttagttaatatttttattttattttataatgtattgtaattttgagtattagttattatttgtattattaattatttatttggttttttgaagtgttaataatttgaaatatgtttaagagaatagtttttagatattttgatgggtttaattttatgtttttaaaaataagtataaatgaattttttatttattttatagaaaagtatattttgagaaggaagggaattaagtggagtgttcgttaaaggtttttttattttttatttatttaagttattgtttttttggtattatttgatgtttttttattagttttgagaattagataagagggggagaagttagggaaatttaagttaggatagaaaaggtttttaatagttttgaaattattttgttttgtttttgtagtggatgtttttaggatatttagattttatttattgttaattttttttttttttagattttaaagtatgtaatattttttttttattttggtatttttattttaagtaaagggtttttttaaaatatgagataataggaaagtgaaagaaattatgggttatataattaataaatgggatttggggttaaagagtgattttagtaatataaaatttaagtatatttatttttttttaatatttttagatggtattattattattattttattagttttttattatttagtatttaaacgttaaagtttaatgttttttgttttattatttttttgtttttttatttgtgttaaaatgtagttatttggggaagggtggtgttggggaaggggatataaaagttaagatataaagtagataggaatggttaatgtttaaatttgttttttagaatgggggttatgtagtatagtgggaaagagtttagtgttttttttgtatagaattaaatagattggagttttaattttagtttatttgtttgttatttgtagaatttagagtaaaatttttttcggttttagttattatatttgtaaaatgaggataataatttttatttaaagttattgtgaagattaggtttaaaaatgagatatatattatttatgattattttggttatataggatgtgtttatattatggttttttttgttatagtttatttaggggttatttaatagatatataataaagttattagaaaatttggggagtagttttatttttgaagtagttttgtttatataaatttatattttataggttatatttttgttttattttttatttatttttgattgaattatcgataatatagttaggtatttgtggttcgttattatatttttttgagtagttatagtcggttttcgaggacggtttattattagaaggtattttatttataggggaaattttattttttgaagatattttattttttgaggtaattttaaatttattagtattgtggtttttagaaaatggtttacgttttttagagtaggtgttattgaggtttaatttagtagtataatggtttgtaggggagggaataaaggaagaaaagaaaaggtaaagtagggtgtttttcgagttagttgtgttaggtagaaaagtttattttttgatattaaagtagttattgtatatgtgttattgtttgtgattgagttatttttatgaaagaaattttatatttttgttagtaagtaaatttagttgttttaattatagaagtgtttttttgaagttttttttttttatagataatttatattaatttttatattaaaaaaatttcgttaaattggtaaattaatttaatataattatttgatgggtaatgtttaaaaatttttattattttatattttaaatgtatttttttttttgttagaatgttattttggtttatttcggtaggttttagatataaatattagattttttttagatgtgtttatatttttaaaagatatttttaaaagatgtgtttatatttttaaaagatgtgtttatatttttaaaagatatttttaaaagataattttttaaaataatataaatagtggttaattatatcgattattattgttattttttattattattattattattattatatagataataaattgagtattaagtaagatttggggtttagagttaagttattgttttattttgtttttttttaggttttaataaaatagtattagagtggtgtttttaatttttcgtcgggatattttaagtttttttaggaaggtaaagaagaaattattagatagagatggagaattaggtaggaggtagtaaatattgttgggtttaatatttgcggaaattattttatttttttagattttggtttttttaattttttaatttgtgaaacgaagggttaggtttaaatgatttttttcgtttttttagttgaattaaagaaaaagtatagcgattttttgggatattttgttttggacgtttgagatatttgttttttttttttttttttagggagggagttatagtgattattttttgcggcgtagggtcgggggaattaaagggcgatttttagagaagtaagagttaaatttaagaggtaaaatttgttatgggaggagagtttagtagtttagcgtcggtgaatttttatttgagtcgagtattaagagcgatagtattatcggcgtcggcggtagtagcggggtttttattggtttttcgtagcggcggcgtttcggtttttggggtaattcggtttttgggatacgagttgtcgttaaaacgagcgggtgttggaagagcgagtggagatcgggagtgtgcgtcgttttcgaaggtttggggagttcggggcggcgggcgcggcgtttcgggttgtttcgggatttttggggcgttggtatttaggtgtgcgaacgtttgtagggcggcgcgtatttgtcgttttataggtttagtcgggagggggtcgtagtttatgacgttaaggttcggtcgtgggtggaggtaggcggcgttttagaaggtgttattcgaaaattacgcgcggaggatatacgtttcgtttttttcgtgcgtaaggattcgttgagaggaagtggaatttaaatttttagttgtaagtcgtttttgagggcgagtaggattggagtttcggagttagtatttgatagaagtttagatgttttaaattttgataatttttttgtatatttaatatttataatagatagggattaaatagaagagtttcgtatttagatgtaaaagtattttaagattaagagtgattttgtttgatgtttttaataaggataaaggacgagagaatttaatgaggaattgttttatgtaggatgggtttttattttaattaagagtttttttttatttatttttgtgaagtggttagaattttaaatttttttattttttatttttttatgtggtttaggggttttattaatattaatatttattgatgatttattattgttaaattatgtatttaaaattttatttatattattttatagtcgataatgtttaaagttaggtggatatgaattttttatttgattttgaaatttgttgtttttttttttgatgaatttaggtttaaattgatttttgaaaagagggtttttgggaagaataatatttagtttaaaggataatttttattggtggtatattggtatttaggtgaagagtagtgttttagattgtgttttttaaattttaagataaaaaggttagcgttgagggtttatttataatttagtaggatatttaattatgataagtagataaaatgaagcggagataggaagttatttaatttgattaatttggatgtattgttaattaaagaattggattttttttgatttgaggaagagaaaaagtattgtttatttttttttatttggagatatgatttttttttgattgttttagtaatatagtttttttaagaatgtaggttaggttaggcgtagtggtttatgtttgtaattttagtattttgggaagtcgaggcgggtggattatttgaggttaggagttcgagagtagtttggttaagatggtaaaattttatttttattaaaaatataaaggaaattagttgggcgtgatggcgcgcgtttgtagttttagttattcgggtgggttgaggtaggagatttttttgaattcgggaggtagacgttgtagtgagttaaggttatgttattgtattttattatgggtgatagagtaagatttcgatttaaaataataataataataataataataataataataataataataacgtgagttatagtgtatttgttttaattttggaaatttttttttaaaaattatttatttttaatggtatattatagtgcgtagtttaaataatattatgtatttagtagaatgaaataattatgaattatgttttttattttatatttgttgagagtgtattttgtgtgagttatttgttttatattttatgaaggggagtagtataggtttattaggagtttagtggtgtgggttagatatatagataagtaattttaatagattatatgatgagaagggtttagagtgttatggaaaaaaaggatatggtttaattttgtttttgtttaatggaaagttttgtggaaagatgaagaggttttttaaaggtttttttagtaaattttttatatggaataaagatttgatgtgagggtatgattaagtatgggaaataaggttagaaaagtgttatgtttattttaaagtgaagtaggggtttgtattgttatttgttttggtggatgaggtaattgtgatttagagagattgagagatttgtttaaagattttaaaagatttttttggagattttgtttggagtttacgtagttggtttatattgttgtatttttatgtttttataggttttatttttgttttaggtttgtttttttttttttttttttttttttttgattgataagtaattttatatttgtagtatatgatatgatgttttgatatatgtatataatgaggttaaattaagttatttaatatatgtaatattttttatttttttattttttttattgagatgaaaatatattgtgtagattagttattagaaatgttttatttttgggaaagtggattgtttatattggaaattgtttagtttttttttagttggaaatttatagggtgaatatttatatgatttaggtatataatttagattatggggatagtatagtttagtgttttggatgagttttagatttaaattaatgtgggtttttatatataaattttagtatatattaagttatttaatatttgaaagatttagattttttatttgaaaataaaaaataaagataattatatgtttttaagtagattaaatggataagatatatgaataatattagattttagtatagagtgagtgtttaataaatggtaattattatgaatatttttgatattatgatagttatattatgtaaattatatttaagaattgaaggatttttataaatggagttatagagtaagtgaagtaa

SEQ ID NO: 304 - DNA, 6113 bp, Artificial Sequence; identical to SEQ ID NO: 302
  chemically treated genomic DNA (Homo sapiens)

SEQ ID NO: 305 - DNA, 6113 bp, Artificial Sequence; identical to SEQ ID NO: 303
  chemically treated genomic DNA (Homo sapiens)

SEQ ID NO: 306 - DNA, 6190 bp, Artificial Sequence
  chemically treated genomic DNA (Homo sapiens)
ttgttttcgcggtgtgggttttttgggggtagggttaaggtattaagatggatgaggacgagggttttggttgttaagggtgaggggttgagggttggagaggtttttttagtggtttttttttcgtagagcgtattagttagacggtagagattttaaaatatacggtggatattgaggagaagggagttaagttgaagtttattatcgtggatacgtcgggattcggggacgttgttaataatatcgagtggtgagtgaggtttgttgagaaaggttttgtttaggcggttatagtattcgaggtttggttttattttttttttgtttatagttggaagtttattatcgattatgtggattagtagtttgagtagtattttcgtgatgagagcggttttaatcgaaagaatatttaagataatcgagtgtattgttgtttatattttattttttttttcgggtatgggtgtgtggttgttttggggttaggttcgggagtgtagtttttataatatggttttttggttgtgtttatgtttatttttggttgttttcggtaggttgcggttagtggatgtgggttttatgaaggtattgtatgagaaggttaatatcgtgttttttatcgttaaagttgattgttttgtttttagtgagattcggaagttgaaggagcgggtgagtttgtcgtcgtataggggtttggttagggttttggggttgagagtattagggggatttgtttggttttaaatttgatggtttttgttttattatagattcgggaggagattgataagtttgggatttatgtatattagttttttgagtgtgattcggacgaggatgaggattttaagtagtaggatcgggaattgaaggtgaatatgtagattggtggggtaggggggatggagttggtgaggggtagaattagagggttttgttttttttatattgagtttgttggaggagggttaggttagtttagttgggtgtaagagttatttgttttaggagtagaggatttgtattttttttatttagggttagaaggtaaaggttattatgtttttgtttggttggggtgggttatgtgggtttcgtgtggtgtttggtaggtatggagtatttgtttagatttagaggtgtagtagtgggttaggtttttaattttaattttttttttatgggttattagaggaaggggttgttttagtggtatattttggtttttagatttttgagttttagggttggtggttttgggtgtttcggtagttagagtgatgatggagattatgttaggggtaggtggttattagggtaggggtattagtatggggagatataggtttagttttggggagggaaggggtagttggagggggtggtttttgatgagggaggagatgaggagggagtatgtttggttgggtatagtttggaaaggttttggaatgtgagttatatgggttttggttttagttaggggtagagaggttagaaaggggtaacgttaggatttttttgaggagagatagttgatggtgatgttggaggggtgtttcgggagttatatgttcgttttttattagtaatcgtgtaattacgtttatcgggtgtgagttttttttttttttttttttaggagagcgcgtttttcgtcgttataggtagtaatacggtggtggaggttaaggggtagcgggttcggggtcgattgtatttttgggggatcgtggagggtgagtagagttttggggtattaggtttggtgggggaaggttgttttgggtcggcgttagtttattatttatttttatttcgtagtggagaattaggcgtattgcgatttcgtgaagttgcgtaatatgtttattcgtacgtatatgtacgattttaaggacgtgacgtgcgacgtgtattacgagaattatcgcgcgtattgtatttagtagatgattaggtgcgcgttttagtcgcgagttagatttcgtttttttggtttcgtttacgtttttataattgagggtcggttttgttagtttatttagatttgaattttgtattattttttaagtttttttttttttttagagtttggtttttttagaattaagtttagggttgtgagggtttcggagggtagggttttagtagtggcggggatgggttaggtatcgttagtttacgttgagtttttcggtggcgtcgtttcgtttattttttttttcgtttcgcgtagtaaattgatttaggatagtcgtatggagagttttatttcgattttgtcgttgtttatttcggacgtcgagattgagaagtttattaggatgaaggatgaggaagtatgtggggcggcgggggcggcggaggcgggcgttagggatgttttttcgcggtgttgtttattcgtcgggttgttttcgttcgtagttgaggcgtatgtaggagatgttgtagaggatgaagtagtagatgtaggattagtgacgttcgtcgcggatatatcgttcgttttcgggacgttttcgtatttttggatattagatcggattgttttcgattcggagacgcggggttatagtttttagttgattttaatttatttttagtattatttttttttaggttattgtgtttgttttcgaggggtttggatcgtagttttcgtttagttggttttttttgattttgggggattaggagcgaagttgggcgggattttagagattcgttttttttgtttttttttcgttttcggacggttatagtatttaaatcgtaggttttgttttggtaggtaggtaaagttaggtagaagaggatttttaggattttgggtttgttttttgttttagtgttgtagaacggatttgggagtttttttttgtttgttttcgcgggttatttagcgagtgttgagattttattttttgtcgaggcgggtcgagtttttttttatttttagacgtttagcgggtagggttgggttgaattaaatgggagttttttagatataaggaggttagaggttgtaaggagcggggtcgtgatcgtttatattttttttttatagttcggttcgatttggagggttttcggggtattgggcggtgagttattttttggtaattttcggtgtcgttttttgttttcgttcgaggttttttttttttagtatcgttgtggtgtgtcgggattttgagtttaggtttttcgatgtttttattcgtatgattttttttcgttatacgatgtttcgttttttttcgttgtgaatgtcgcgttttgttttggtgataggagaataatgttggtgaacgtcgtagcgggtgttcgagtgtttcgtgtgtttttgagagcgggtgggagcggaagtttgagcggtttgcggttttcggcgatagtgtgttatttgtcgttgtagcgcgcgttcgcgcggtttttgggttatttttggttaggtcgtagtattgtggtcggtgcgggcgtggtaggggcggggcggttttatcgttcggttttttcgtttacgtttttcgttgtagagtaagtcgggttgtcgttttttcgttatgggtttcggtgagtttggagttcggtcgggttttcggttgttttttaggtcgattcgggttgagaggagttttggtcgtttggttgtagttgggagagatttgggttagatttagaggggatttttagtcggcgtgcggggtggttagggtggagaggttggcgggttatcgggacgtcgggtattaggggttggatggagtcgggtcggtagtttgggtatttagagatgtcgtttaggtgttcgtcgatcgttcggtttattgcggcgttttttttgtagggtcgcgcggggcgttgagtttattgtttttgttgttggtttcgtcgagtcgttcggtcgtaggttgttcggcgttttgtagttgcgcggggacgttcgtggattgcgggcgtcgcgggttgatttgggtttcgttgtcgatcgttttttttgtcgatataatcgagttggtgttgatcggtaataatttgacggcgttgtcgtcggggttgttggacgcgttgttcgcgttgcgtatcgtatatttgggcgttaatttttggcgttgcgattgtcgttttgtgtcgttgcgcgtttggttggtcggtcgtttcgagcgtgcgttttatcgcgatttgcgttgcgtggcgtttttagcgttgcgcggtcgtttgttgttttatttggtcgaggacgagttgcgcgtcgtttgcgttttcggttcgttttgttggggggcgttggcggcgtagtttgcgttgttgggttttgggttgttgtacgcgttgttgttggtgttgttgttgtgtcgtttgcggaggttgcgggttcgggttcgcgttcgcgtcgtagttcggttgtcgttgatcgattcgttggtggtcgagcgagtcggaatcgacgagttttgaggagagaatcggtgcgttttgaggagagaatcggcgttgggtaatacgggtttgtaaattcgataggattttgttcgaggggttttcgcgttaatttggatcggttttcgtttttttcgttgtttaattttttagatttattttatttgtaggtttagattacgtgggatagaatttttgtttattttatttcgagggaggcgaattcgtatttttaggtttgggaggattatggggtataatgcggtttagattttgttgcgttttttttttaaattttggtgttgaataaatttttttgatttggttttttttgtacgattgatttggaaatttttttcgttaaatttaggaaaaggttttaggaggcggtttaaggggatataaatatatttttatatgtttattttaattttaggggtagataggagttagtgggtgatttttttttttttagatatatttttaaaaggttatatgggaaggtatgagagagatgttaagtgataacgtgggggttagtgaggacgttgtggggatattgaggattttgtgggggtagtgaggatgttgtggggatgttgtggggatagtaaggatattgggggtagtgaggacgttgtggatattgcggacgttgtggggataatgacgttgtggatagtgaggacgttgtgggggcggtgaggatattgtggagtgaggatattgggggtagtgaggacgttgtggatagtgagggcgttgtgggggcggtgaggacgttgtaggggcggtgaggacgttgtgggggcggtgaaggcgttgtggggatggtgaggacgttattcggggcggtgaggacgttgtggacggtgagaacgttgtggggatattgaggatgttgtgaggacgttgtgggggtagtgaggacgttgtggatcgtgaggacgttgtggggatggcgaagattttgtgggggcggtgaggattttgtggacggtgaggacgttgttggggtagtgaggacgttgtggatcgtgaggattttgtgggggcggtgaggattttgtggacgcggtgaggacgttgtgggggcggtgaggacgttgtggatagtgaggaggttgtggagataatggggacgttgtagataggacgttgtggaggcggtgagggcgttgtgggggcggtgaggacgttgtggatattgacgacgttggaggtaataatgaggatattggggataatgagtatattgtgggggcggtgagaacgttgtggatattgaggacgttgtgggggcggtgagggcgttgtggacgcggtgaggacgttgtgggggcggtgaggacgttgtggggatcgtgaggacgttgtcggggcggtgaggacgttgtggacgcggtgaggacgttgtggggacggtgaggacgttgtggggatcgtgaggacgttgtcggggtcgtgaggacgttgtggacgcggcgagggagttgttagggcggtgaggacgttgtggacgcggtgaggacgttgtggacgcggcgagggagttgtcggggcggtgaggacgttgtggacgcggtgagggcgttgtggggacggtgaggacgttgtggacgttgtcggggtagtgaggacgttgcggacgttgaggacgttgtgggggcgatgaggacgttgtcggggcggtgaggacgttgtcggggcggtgaggacgttgtggacg

SEQ ID NO: 307 - DNA, 6190 bp, Artificial Sequence
  chemically treated genomic DNA (Homo sapiens)
cgtttatagcgtttttatcgtttcgatagcgtttttatcgtttcgatagcgtttttatcgtttttatagcgtttttaacgttcgtagcgtttttattgtttcgatagcgtttatagcgtttttatcgtttttatagcgtttttatcgcgtttatagcgtttttatcgtttcgatagttttttcgtcgcgtttatagcgtttttatcgcgtttatagcgtttttatcgttttgatagttttttcgtcgcgtttatagcgtttttacggtttcgatagcgtttttacggtttttatagcgtttttatcgtttttatagcgtttttatcgcgtttatagcgtttttatcgtttcgatagcgtttttacggtttttatagcgtttttatcgtttttatagcgtttttatcgcgtttatagcgtttttatcgtttttatagcgtttttagtgtttatagcgtttttatcgtttttatagtgtatttattgtttttaatgtttttattgttatttttagcgtcgttagtgtttatagcgtttttatcgtttttatagcgtttttatcgtttttatagcgttttgtttatagcgtttttattgtttttatagtttttttattgtttatagcgtttttatcgtttttatagcgtttttatcgcgtttatagagtttttatcgtttttatagagtttttacggtttatagcgtttttattgttttaatagcgtttttatcgtttatagagtttttatcgtttttatagagttttcgttatttttatagcgtttttacggtttatagcgtttttattgtttttatagcgtttttatagtatttttagtgtttttatagcgtttttatcgtttatagcgtttttatcgtttcggatagcgtttttattatttttatagcgtttttatcgtttttatagcgtttttatcgtttttatagcgtttttatcgtttttatagcgtttttattgtttatagcgtttttattgtttttagtgtttttattttatagtgtttttatcgtttttatagcgtttttattgtttatagcgttattgtttttatagcgttcgtagtgtttatagcgtttttattgtttttagtgtttttattgtttttatagtatttttatagtatttttattgtttttatagggtttttagtgtttttataacgtttttattggtttttacgttattatttagtattttttttatgtttttttatgtggttttttgggagtgtgtttggaaggggagaggttatttattgatttttgtttgtttttgaggttagggtgggtatgtgaggatgtgtttgtgtttttttgaatcgttttttggggtttttttttgagtttggcgaggggaatttttaggttagtcgtgtagagaagattagattagaagggtttatttagtattagagtttggaagggagacgtagtagggtttggatcgtattgtgttttatggtttttttaagtttggaagtgcgggttcgtttttttcggggtagggtgggtaggagttttgttttacgtggtttgggtttgtaggtggggtgggtttgagagattgggtagcggaggaggcggggatcggtttaggttggcgcgagggtttttcgggtagggttttgtcgagtttgtaggttcgtgttgtttagcgtcggttttttttttaggacgtatcggttttttttttaggattcgtcggtttcggttcgttcggttattagcgggtcggttagcgatagtcgggttgcggcgcgagcgcgggttcgggttcgtagttttcgtaggcggtatagtagtagtattagtagtaacgcgtgtagtagtttaaggtttagtagcgtaagttgcgtcgttagcgttttttagtagagcgggtcgggagcgtaagcggcgcgtagttcgttttcggttagatagggtagtaggcggtcgcgtagcgttgggggcgttacgtaacgtaggtcgcggtagggcgtacgttcggggcggtcggttagttaggcgcgtagcggtataaggcggtagtcgtagcgttaggggttggcgtttaggtgtgcggtgcgtagcgcgggtagcgcgtttagtagtttcggcggtagcgtcgttaggttgttgtcggttagtattagttcggttgtgtcgatagggaaggcggtcggtagcgaggtttaagttagttcgcggcgttcgtagtttacgagcgttttcgcgtagttatagggcgtcgggtaatttgcggtcgggcggttcggcggggttagtagtaggagtagtaagtttagcgtttcgcgcggttttgtaagggaagcgtcgtagtaagtcgagcggtcggcgggtatttgggcgatatttttgagtatttagattgtcggttcggttttatttagtttttgatgttcggcgtttcggtagttcgttagtttttttattttgattatttcgtacgtcggttggaagttttttttaagtttgatttaagttttttttagttgtagttaaacgattagagttttttttaattcgggtcggtttagggagtagtcgggggttcgatcggattttagatttatcggagtttatggcgagaagacggtagttcggtttattttgtagcgggaggcgtaggcgggagagtcgagcgataaggtcgtttcgtttttgttacgttcgtatcgattatagtgttgcggtttggttagaaatagtttagaggtcgcgcggacgcgcgttgtagcggtagatagtatattatcgtcggaggtcgtaggtcgtttaggttttcgtttttattcgtttttaggggtatacggagtattcggatattcgttgcgacgtttattaatattgtttttttgttattaggataggacgcggtatttataacggaagaaaacggagtatcgtgtggcgggaagggattatgcgggtgggaatatcgggaggtttaggtttaggatttcggtatattatagcggtgttggggagaagaggtttcgagcgagggtaggggacggtatcgagagttgttaggaggtggtttatcgtttagtgtttcgggggttttttaggtcgggtcgggttgtggagaaggggtgtaagcggttacgatttcgttttttgtagtttttggtttttttatgtttggagggtttttatttgatttagtttaattttgttcgttaggcgtttggggataagggaagattcggttcgtttcgatagaaaatggggttttagtattcgttgggtgattcgcgggagtaggtaaaggagggtttttaagttcgttttgtagtattggggtagggaatagatttaggattttgggaatttttttttgtttagttttgtttgtttgttagagtagggtttgcggtttgggtgttgtgatcgttcgggggcgggggaagggtaagggaggcggatttttgaagtttcgtttaatttcgtttttgattttttaaggttagagagggttagttgggcgggggttacggtttaggtttttcggaaatagatataatgatttgggagggggtggtgttgagaataaattagggttagttgggggttgtggtttcgcgttttcgggtcgggaatagttcggtttggtgtttaggggtgcgagggcgtttcggagacggacggtgtgttcgcggcgagcgttattggttttgtatttgttgttttattttttgtagtattttttgtatgcgttttagttgcgggcggagataattcggcgggtgagtagtatcgcggaggagtatttttgacgttcgttttcgtcgttttcgtcgttttatatatttttttattttttattttgataagttttttagtttcggcgttcggggtgggtagcggtaggatcgggatggggttttttatgcggttgttttgggttagtttgttgcgcggggcgggggggaggatgggcggggcggcgttatcgggaggtttagcgtgggttggcgatgtttggtttattttcgttattgttgaggttttgtttttcggagtttttatagttttggatttggttttagggagattaggttttgggggagggggggggtttagggaatggtgtaaagtttaagtttgggtgggttgataggatcggtttttagttatggagacgtgggcggggttagaggggcgaggtttggttcgcggttggggcgcgtatttggttatttgttggatgtagtgcgcgcggtagttttcgtagtgtacgtcgtacgttacgtttttgaggtcgtgtatatgcgtgcggatgagtatgttgcgtagttttacgaagtcgtaatgcgtttggttttttattgcggggtgggggtgggtagtgggttggcgtcggtttaggatagtttttttttattagatttggtattttaagattttatttattttttacgattttttaggggtatagtcggtttcggattcgttgttttttggtttttattatcgtgttgttgtttataacggcgaagggcgcgtttttttgggggaaggagggagaaaggtttatattcggtgagcgtaattgtacggttattgatgggaaacgggtatgtaattttcggggtatttttttagtattattattaattatttttttttaaagagattttggcgttgtttttttttggtttttttgtttttggttggagttagagtttatgtggtttatattttagggtttttttaggttatgtttaattaggtatgttttttttttatttttttttttattaagaattattttttttagttgttttttttttttttagggttgagtttatgtttttttatgttgatgtttttgttttggtggttatttgtttttggtatggtttttattattattttagttgtcggggtatttaaagttattaattttggagtttagaaatttgggagttagggtgtgttattggggtagtttttttttttggtgatttatgggaagagggttggggttgggggtttggtttattgttgtatttttggatttgggtaagtgttttatatttgttaagtattatacggggtttatatgatttattttagttaggtaaagatatggtgatttttattttttagttttggatgaagggggtataggttttttatttttagaataaatgatttttgtatttaattgggttgatttggtttttttttagtaggtttaatgtgaaggagataaagttttttggttttgttttttattagttttattttttttgttttattagtttgtatgtttatttttagttttcggttttgttgtttgaagtttttattttcgttcgagttatatttagggaattggtatatatggattttaaatttgttaattttttttcggatttgtggtggggtaaggattattagatttgaggttagataagtttttttggtatttttagttttagggttttggttaggtttttgtgcgacggtaggtttattcgtttttttagttttcggattttattggggataagatagttagttttggcgatgagaggtacgatgttgatttttttatgtaatgtttttatgaaatttatatttattggtcgtagtttgtcgagagtagttaagggtgggtataggtatagttagggggttatattgtaggggttgtattttcgagtttggttttaggatagttatatatttatgttcgaagggggagatgaagtataggtagtagtgtattcggttgttttggatgttttttcggttgaggtcgtttttattacggaagtattgtttaaattgttggtttatatagtcggtgatgggtttttagttgtgggtaggagggaggtgaggttaggtttcgagtgttgtggtcgtttaggtaaggttttttttagtaggttttatttattattcggtgttgttgatagcgttttcgaatttcggcgtgtttacgatggtgagttttagtttgatttttttttttttaatgtttatcgtgtgttttagaatttttatcgtttggttgatgcgttttacggggaaggggttattggaagggtttttttaatttttagttttttatttttggtagttaggattttcgtttttatttattttggtgttttggttttatttttaggggatttatatcgcgagaatag

SEQ ID NO: 308 - DNA, 6231 bp, Artificial Sequence
  chemically treated genomic DNA (Homo sapiens)
ttttttttttgtttattttaggtagatataattgtttatgttttttcgatgagaggaaataggttgagagaagaaaaatgattgttttaggattatattatagtggagagcgggttataggatatgatgtagggtttaggtttttgttttgattaagttttatatgtttatttagtttttaggttttttttatttttttgtttttatttataagtggttttgagatacgtgaatattttttttttatgtattataaattttttttatcgagttttggtgttttggtttttggtatatttaattagtattggtagaggagagtttatatttttttttttatttagggaagatgttttaagaaattttgtttttgtgtagtagaggagttggaggtagttttttaggtatttttttttaaataaaggtttatgtattggtgaagtgtttagataggtttttttgattggataattttttttaggattagttagatagggggtggggaagggggattaagagacgggtaggggatatttgtagtatttggagttaagggaaaattattttattggtttggtgtttgagttgttttgggttgttaggggtttgttttatatttatattaagattcgaatttggggattttttttggtggaattataattagagggttatatttaacgagataattttttgtatgtttggagatttttgaattttgtttattttagtttatatttaattttttttatgtatatggaaggtatatttagatagtttttaataattagaatttatatttaaggtttggtttgatttaaatttatatttatatatttttatttaataagaatttatatttaatttttttttttttttttgagatagttttatttttgttgtttaggttggagtgtaatggtatagttacggtttattgaaatttttgtttttcgggtttaagtgatttttttgttttagttttttaagtagttgggattataggtatttattattatatttagttaatttttgtatttttagtagagacggggttttattatgttggttagattggtgtcgaatttttgattttaagcgatttattcggttcgattttttaaagtgttagggttgtaggtgtgagttatcgcgtttcgttaaatttatatttaatttaaagttatagattatatgttatagataagatttgttgtgttgagtgtgtttattttttttttttttttttttttttttttggagacggagttttattttgttgtttaggttgtagtgtaatggcgtgattttgatttattgtaatttttgttttttaggtttaagcgatttttttattttagttttttaagtagttgggattataggtatgtattattattttcggttaatttttgtatttttagtagagataggtttttattatgttggttaagttggttttgaatttttgattttaagtgatttattcgttttggttttttaaattgttgggatcgtaggtatgagcgattttgtttggtttaagtttattttgttaatagcgtttttggtttttgttgggtgtagtggtttatgtttgtaattatagtattttggaaggttaaggtaggaggattatttgagtttagaagtttaagattagttttttgggtaataaaataagattttttttttaaaaaaaaaaaaaaagaaagaaagaaagaaaagaaaaaagattatgtgattatgttattttagttatttgggatttgaggtgggagaattattggaatttaagaagttaaggttgtaatgagttacgattttgttattgtattttagtttgggtgatagagtaagattttgtttgaaaaattaaataaaataaagaaaaaaaaattataaagttttttttttttttttttttttttttttttttttttttaagatggagtttcgtttttgttgtttaggttggagtataatggtatgattttggtttatcgtaattttcgttttttaggtttaagtgattcgtttgttttagttttttcgagtagttgggattataagtatgtattattatgtttagttaattttgtgtttttagtagagacggggtttttttatgttggttaggttggttttgaattttcgattttaggtgattcgtttggttcggttttttaaagtgttgggattataggtgtgagttatcgtgattagttaggttttcgggttttatttgtttgagatttggttttattttgtcgtttagtttggagcgtagtggtgtaattttggtttattgtaatttttatcgttcgagtttaagcgatttttttgttttaatttttcgagtatttgggagtataggtgcgcgttattatattcgtttaattttttgtatttatagtagaggtagagttttattatgttggttaggttggtttttaatttttgattttaagtgatttatttatttcggttttcgaaagtgttgagattataggtgtgagttatcgttttcggtttgtttgtttttttgagataggattttattgtgttatttagtttggagtgtagtggtattattatagtttattgtaattttgaatttttggttttaagtgatttttttaatttggttttttaaagtgttacgattataggcgtgaggtatcgtgttcggttttaataacgttttttgaagtgtttattttgtattaggtgtttaaatgtgtttaaattaagaagggagtaaacgttaataaaattttatatttataggtttattattgatttttaaaattttatttaaggcgggaatttggtaatatagtttggtagtgagttggttatttagtaaatgtttcgatttgtagggttttcgagttagaggtattttgaggagattttgatgtagtcgtttttttttttggagtgaatcgaaagtaacgcgatttgttttttattacgtagtcggtttggtagtattcgtttttaatagggttggggattgtatttatatttatatttgtatatattttcgattttgttttatttaaatttaaaatatcgtagaattaaaacgggtttttagaaagttttgttgggaagatcgagggttttgcggaaaggattttgtaggttgaaggttaggcgtttcgttattttaggattataattttcgagaggttttgcgacggaagttatttttgttttttattaggttaagcgatttttcggagggggagtaagattttttgcgttatcggcgcgcgtagttgtcgtcgcggagagatgatgtttaggttcgggattgttagttagtgcgcggttaggtacgggtcgacgggttcgcggggtcggcgtcgttatggcggtcgtgtttgatttggatttggagacggaggaaggtagcgagggcgagggcgagttagagtttagtttcgcggtgagtgttttgttttggcgcgattggattttggagtcgattttgttatttagtcgaggtcggagcggcggtttcgtacgtttagagcgggtttcgattttttgtagatttagattttttttagatttcggtttttattaagttttgattttatttttatttcgattttttttttagaattttagttttttttttcgatttttttttttttgttttcggtttttttttaatttttatttattttttattagttgttatttttgatattttttttttttgggttacgtagtttaatttgaacgggagcggggaggtattttggtattttttttggtttttatttttcggttttttataggacgtatgtttttttgtcgagttgagggtagttggtttagagtgagtgagggtcgtgttgggggaggggggaatggagtggggaaggggaattggggagtattggagttttgtttttattaattttttgtgttcgtaggtttgtgggatattatgaagaggtggagttgattgagattagcgtgaacgttggtttagagcgtatcgggttttattgttttgagttgttgcgtgtgttgggtaaggggggttatggtaaggtaggggcgggcgtattttttttttggttttatagtttttatttggaggtagtaaagggtttttaaaataaattagatttgtgaattagtagggtttttaatgggatttagagttagaaatataaaggagggaaggttaaattttttttaatcggatttgaaatttttattgttttatttttggtagggtttaggttttttgattttaaagttagagttttagggtggggttttttgaagataggatgtggagagggaagttgattttgttttttttgttttataggtgttttaggtgcgaaaggtgtaaggtattaatttgggtaaaatatatgttatgaaagttttaaggaaggtgagttattcgtttagttaacgaatattgtgtggttgttatttttaatatgttgtattaggttttgggaagatagtagggaatatagtggaggaggatttttgattttggcgtttgttggtttattgtttgttgtgatgtgtattgttttgtagtaatttttaatgggggtaattttgatttttagtagatatttgataatagtgtttggatattattttattttatttttttttaagacggagttttgttttgttatttaggttggagtgtagtgacgcgattttggtttattgttatttttgttttttaggtttaagcgattttcgtgttttagatttcggagtagttgggattataggcgtttgttattatatttagttaatttttgtatttttttgtagaggtggggtttcgtttggttggtttttaatttttaattttaggtgatttgttcgttttggtttttaacgtgttgggagttgggattataggtatgagttatcgtttttagtttttttttttttttggatggagttttgttttgttttttagattggagtgtagtagtgtattttttgtttattgtaatttttgtttttcgggtttaggtaatttttttattttagttttttgagtagttgggattataggtttgtgttattatatttggttaatttttgtatttttatttgtttatttatttattttgagacggagttttattttgttatttaggttggagtgtagtggtgcgatttcggtttattggtaatttttattttttagggtgaagtgatttttttgttttagttttttgagtagttgggattataggcgtgaattattatttttggttaattttttttttttgtatttttagtagagatgggtttttgttatgttggttaggttggttttgaatttttgattttaggttattcgtttattttggttttttaaagtgttgggattatagttatgaattatcgtgtttggtttagtttttgtattttttagtggaggtagggttttattatgttggttaggttggtttcgaatttttgattttaggtgattcgtttgttttaattttttaaagtgttgggattataggtgtgatttattgcgtttggtatggatatatttttgattgttaaggtaagaggggagtgttattggtattcggtgggtggagattagggatgttgttgaatattttacgatgcgtagggtagttttttataataaagaatgatttggttttaggtgttagtagtgtcgaggttgagaaattttgtgttagaggataaatttatttttgaaaatgatggtggttgatagtagtagaattatggagaaatataatgtagtgatagaggatgtagtagttaataaatagatggatggtttgaggagttttggttgtttttattttttttttttttttttttttgagatagtgtttcgttttgttatttaggttggagtgtagtggcgtgattttagtttattgtaatttttgtttttgggtttaagcgatttttttgttttagttttttgagttgggattataggcgtgtattattatatttagttaatttttttatttttagtagagatggggttttattatgttggttaggttggttttaaatttttgattttaggtaattcgtttgttttggttttttagagtgttgggattataggtgtgagttattgtgtttagtttggatgttttagtttttaattaatttttgtatttttaggttaaaattgtgcgtaatgttaaggatata

SEQ ID NO: 309 - DNA, 6231 bp, Artificial Sequence
  chemically treated genomic DNA (Homo sapiens)
tgtgtttttggtattgcgtataattttggtttggagatataggaattggttagaaattgaggtatttaggttgggtatagtggtttatatttgtaattttagtattttaggaggttaaggtaggcggattatttgaggttaggaatttgagattagtttggttaatatggtgaaattttatttttattaaaaatagaaaaattagttgggtatgatggtatacgtttgtaattttagtttaggaggttgaggtaggagaatcgtttgaatttaggggtagaggttgtagtgagttgagattacgttattgtattttagtttgggtgatagagcgagatattattttaaaaaaaaaaaaaaaaaaaaaatgggggtaattagagttttttagattatttatttgtttgttaattgttgtattttttgttattgtattgtatttttttataattttgttgttgttagttattattatttttagggatgggtttattttttaatatagggttttttaatttcggtattattgatatttgggattaggttattttttgttgtgggaggttgttttgcgtatcgtgggatgtttagtagtatttttggtttttatttatcgggtgttagtaatattttttttttgttttgataattaaaaatgtgtttatgttaggcgtagtggattatatttgtaattttagtattttgggaggttgaggtaggcgaattatttgaggttaggagttcgagattagtttgattaatatggtgaaattttgtttttattaaaaagtataaaaattaggttaggtacggtggtttatggttgtaattttagtattttgggaggttaaggtgagcggatagtttgaggttaggagtttaagattagtttgattaatatgataaaaatttatttttattaaaaatataaaaaaaaaaaattagttaggagtggtggtttacgtttgtaattttagttatttaggaggttgaggtaggagaattattttattttgggaggtggaggttgttagtgagtcgagatcgtattattgtattttagtttgagtgatagagtgagatttcgttttaaaataagtaggtaaataaatagaaatataaagattagttaggtgtggtggtataagtttgtagttttaattatttaggaggttgaggtaagagaattatttgaattcgggaggtagaggttgtagtgagtagagagtgtattattgtattttagtttggggaataaagtaagattttatttaaaaaaaaaaaaaagttagggacggtggtttatgtttgtaattttagtttttagtacgttggaggttaaggcgggtagattatttgagattaggagttagagattagttaggcgaaattttatttttataaaaaagtataaaaattagttgggtgtggtggtaagcgtttgtaattttagttatttcggagtttaaggtacgagaatcgtttgaatttgggagatagaggtggtagtgagttaaaatcgcgttattgtattttagtttgggtgatagagtaagatttcgttttaaaaaaaaataaaataaaatagtgtttagatattgttgttaaatgtttgttgggagttaaaattgtttttattgagaattattgtaagataatatatattataatagataataaattagtaaacgttaaagttagggatttttttttattgtgttttttgttgtttttttaaagtttggtatagtatgttgggaatggtagttatatagtattcgttggttgaacgagtgatttattttttttaggatttttatggtatatattttgtttaagttggtgttttgtatttttcgtatttggaatatttgtagggtaggggagataggattaatttttttttttatattttatttttaagaagttttattttgaagttttggttttgggattaggaggtttaggttttgttaagggtggggtagtgaagattttaagttcgattggagaggatttggtttttttttttttatgtttttggttttgaattttattagaggttttgttgatttataagtttaatttgttttgagaattttttgttgtttttagatggaggttgtgaggttaggaggagggtgcgttcgtttttattttgttatagttttttttgtttagtatacgtagtagtttaaagtagtggggttcgatgcgttttgggttaacgtttacgttggttttagttagttttatttttttatagtgttttataggtttacggatataaggagttaatgaggataaggttttagtgttttttagttttttttttttattttattttttttttttttaatacgatttttatttattttaggttagttgtttttaattcggtaaggggatatgcgttttgtgagaaatcgaggggtaagagttaaggaaggtgttaggatattttttcgttttcgtttaggttggattgcgtggtttaggagagaagggtgttagggatggtagttagtaggggatgggtaagaattgggaagaaatcgaaggtaggaaagggagaatcgggagaaaaggttggggttttggaagagaggtcggggtgagggtgggattagaatttaatagagatcgggatttgagaaggatttgggtttgtaaagagtcggagttcgttttgggcgtgcggagtcgtcgtttcggtttcggttgggtgataggatcggttttaggatttagtcgcgttagggtagggtatttatcgcggggttgagttttggttcgttttcgttttcgttgttttttttcgtttttaaatttaaattaaatacggtcgttatggcggcgtcggtttcgcgggttcgtcggttcgtatttggtcgcgtattgattgatagtttcggatttaaatattattttttcgcgacggtagttgcgcgcgtcggtgacgtaagggattttatttttttttcggaaaatcgtttagtttggtggggaataaagatggttttcgtcgtaaggtttttcgggaattgtagttttagagtggcgaggcgtttagtttttagtttgtagaatttttttcgtaggattttcggtttttttagtaaggttttttgggagttcgttttggttttacggtgttttgagtttggatggagtagggtcggaagtgtatgtaggtgtgaatgtaaatgtaatttttagttttgttggagacgggtattgttaggtcggttgcgtgatgaaaggtaggtcgcgttgttttcggtttattttagaaagggaggcggttgtattagggtttttttaaagtgtttttggttcgaggattttgtaaatcggagtatttattgagtggttagtttattgttaggttatgttgttaggttttcgttttaaatagggttttgggggttagtgatagatttgtaaatatgggattttgttggcgtttattttttttttaatttaagtatatttaggtatttggtatagaatagatattttaaaaaacgttgttgaggtcggatacgatgttttacgtttgtaatcgtagtattttgggaagttaagttgggaggattatttgaggttaggagtttaaggttatagtgagttatgatggtgttattgtattttaggttgggtgatatagtgagattttgttttaaaaaaataaataggtcggaggcggtggtttatatttgtaattttaatattttcggaggtcgaggtgggtggattatttgaggttagaagttggagattagtttggttaatatgatgaaattttgtttttattataaatataaaaaattagacgggtgtggtggcgcgtatttgtatttttagatattcgggaggttgaggtaggagaatcgtttgaattcgggcgatagaggttgtagtgagttaagattgtattattgcgttttaggttgggcggtagagtgagattaagttttaaatagataaaattcgaaaatttggttggttacggtggtttatatttgtaattttagtattttgggaggtcgagttaggcggattatttgaggtcgggagtttaggattagtttgattaatatggagaaatttcgtttttattaaaaatataaaattagttgggtatggtggtgtatgtttgtaattttagttattcgggaaggttgaggtaggcgaattatttgaatttgggaagcggaggttgcggtgagttaagattatgttattgtattttagtttgggtaataagagcgagattttattttaaaaaaaaaaaaaaaaaaaaaaaaaaaaaaaaaaaaaattttatggtttttttttttttgttttgtttagttttttagataggattttattttgttatttaggttggagtatagtggtaagatcgtggtttattgtagttttgattttttgggttttagtgatttttttattttaaattttaagtaattggaatgatataattatataatttttttttttttttttttttttttttttttttttttttttagaggggaggttttgttttgttgtttaggaggttggttttgaatttttggatttaagtgatttttttgttttggttttttaaagtgttgtgattataggtatgagttattatatttagtaaaaattaaaaacgttgttgatagaatgaatttaggttaggtagggtcgtttatgtttgcgattttagtaatttgggaggttaaggcgggtggattatttgaggttaggagtttaagattagtttaattaatatagtgaaaatttgtttttattaaaaatataaaaattagtcgggagtggtggtgtatgtttatagttttagttatttgggaggttgaggtaggaaaatcgtttgaatttgggaggtagaggttgtagtgaattaagattacgttattgtattatagtttgggtaatagagtgagatttcgtttttaaaaaaagaaaaaaaaagaaagaaggaatgaatatatttaatatagtaaattttgtttgtgatatgtggtttgtgattttagattgggtatggatttggcggggcgcggtggtttatatttgtaattttagtattttgggaggtcgagtcgggtggatcgtttgaggttaggagttcgatattagtttggttaatatggtgaaatttcgtttttattaaaaatataaaaattagttgggtgtggtggtgggtgtttgtaattttagttatttgagaggttgaggtagaagaattatttaaattcgggaggtagaggttttagtgagtcgtgattgtgttattgtattttagtttgggtagtaagagtgaaattgttttaaaaaaaaaaaaaaagattgggtatggatttttattggatggggatgtgtgggtgtgaatttgggttagattaggttttgggtgtgagttttgattgttggaggttgtttaggtgtgttttttatgtgtataggggaggttgggtatgaattgaggtggatagaatttaggggtttttaggtatgtagagggttatttcgttgaatgtggttttttggttgtaattttattaaaggagatttttaggttcgggttttgatgtgggtgtagggtaggtttttagtaatttagggtaatttagatattaggttagtggggtggtttttttttagttttagatgttataagtattttttattcgttttttgattttttttttttattttttatttagttgattttgggaggagttgtttagttaagagaatttatttagatattttattagtatataagtttttatttggggagggatgtttggggagttgtttttagtttttttgttgtatagaggtaggattttttaaagtattttttttgaatgaggaagagagtgtagatttttttttgttaatgttagttaggtgtgttagaggttaaagtattaaagttcggtggagaaggtttgtgatgtataggagggaggtgtttacgtgttttagggttatttgtgaatgagggtagggaggtgaggggggtttagaagttgaatgggtatgtaagatttgattaaaatagaaatttggattttgtattatgttttgtgattcgttttttattgtggtataattttggagtagttatttttttttttttagtttgtttttttttatcgggggaatataggtagttgtgtttgtttggggtgagtagaaagagga

SEQ ID NO: 310 - DNA, 6239 bp, Artificial Sequence
  chemically treated genomic DNA (Homo sapiens)
tataaaatttagttgagcgtggtggtagttatttgtaattttagttattcgggaggttgaggtaggagaattatttaaatttaggaagtagaggttgtagtgagttgagattatattattgtattttagtttatgggaaaagagcgagatttcgttttaaaataataaaataaaataaaagttttttttattttattatcgttgttaataatgatttttttttttttaatagtaaagttttagaagaatcgtttatatttgttatttttattgtttttttttttttttttgagtttatttttatttggtttttttgtttttattatattgttaggtttatggttgatatttattgttgttaaatttaagggttaattttatttttttcgtatttgtatttttagtagaatttgataaggttgattatattttatatttttttttttattttatttttaggtttatttattatttagtcgttttgtttttttttttttgttgggttagttttatttttgttagattaagggtttggggtgatttaagaacgagtttttggattttttatttttttatttatatttttattagggatttatattatttagtgttttagttttaaatgtttttatgaggattatttaaagtgcgttttttgttttagtttttttttggattgttagatttggatatttaaggatttgtttaggattttttaaaaatgtttgttaggtattttaattttaatatatttaaaattgaatttttttttttttttattttttatttttttgtttatgggtgtgttttgagtttaggtttagaatgatttttttatttttaattattttttagtcgagtatatttagtttttttgtttttagtattatttataggttgaggatttttaaatatttattttttagtttagattttttttttgaatttttgatttatattttttattttttatgtaatatttgtatttgattatttgagcggtatttttattttaatatgttttaaatagaagttttaatttttttttatttttatttttttaaatttagtttttagatatttttattttagtgtatggtaaatttattttgttagttgtttaggttaaaagttttggtataataattttttacgaggttttttttcgtaaattttttatttaatttattagtatattttgtaggttttgtttttaagattattgtttattatttttattattattatttggttaaattattatttttttttttttgagttttttttaatagttttttaatggtttttttatttttatttttattttgttatggtttatttttaatattgaggtcggtaattttattaataaattagatgtgttgatttttagtttagaagatttttatggtttttaatttaattaaaataatgtaaatttttaatttgtatagataggtttattgaagttttatagaatatggattttaattatttttttgattttattttttttttttgttaatcgtgtattagttatataaggttttttttttgtaaataagttttttgttataagtatttgtattttttgttttttttattacgttttttttttaggtgtgtagtttagttttttattttattgaggtttttttttttttttttttgagatagagtttgtttttgttgtttaggttggagtgtaatggcgtaatttcggtttattcgtaatttttattttttgggtttaagtaatttttttgttttagtttttagagtagttgggattatagatatgtattattacgtttagttgattttgtatttttagtagagatagggtttttttatgttggtagggttggtttggaattttcgattttaggtgatttatttatttcggttttcgaaaatgttgggattacgggtatgagttatcgcgttcggtttttattgaagttttttattaaatattttcgtattttggtttgggtaatggagtgagattttgttttaaaaaaaaaaattaagattattattttataattaagtaaataattttatgatgaagttaggtttagattataggttgtagtttttataaaaaaatagtgggtaagtaaaagttgataaatagtaataaggaaatgtatatttgtgttaattaaatatttaattttatatatgttttaatgttttattttttttataattttaagtagtagtttaatgagattatataggtttaataatatttatttaatatttttttgatagaagttataggtatttgttttaatttattttatttttttttttagggaaattgaataataagtagaatggaataagattttaatttagaattttggagataacgttaaggagattgttttttaggtgattttaatttgtaattagattgaagaattagatgatttttataggatttatttagtttaaattagaagttttattattttgaatagaaaagttgttaggttaatagcgtaggaggtttatacggtttattttttttttttttagatttgtgtatgtttgtagagatgaagggaaggacgaattgagtaggttgttgaaaaacgtttaatttaagggataaggaaggttacggaagaggaagagatattacgagagttaaggatagtggttacgtttattttagtcggatggtttttagaaatggagattttgaggtttaattttaggtttaaaaaaatagattttgtattttaacgtttttagacgatttgtatgtatcggtttgtatttttagtttttaatgaaatttaagaattatttggagagtttgttaataattagatatttgggttttattttttagagattttgatttatcgggttttcggtggagttatatgtttaataagtattgtaagttatttcggtataattgttttaaggtttacggtttgagaagtacggatcgggaaggtttttgtaaggaggtttttatttattaatttatttatttatttagttaggataagggtttttttaggttattttatttaaagcggttttcgttaaatcgtatttttgttttttttttgtaatatttattttagttgtaagtttttcgtacgtttatcgtttgtttttttatttattagaacgtgaattttaatatagtagagattttttgtgttttttttatttaggtgatttcggaggataaaatttaatttgaagtttatttatttttttcgcgtatgttaatattatttaataaattttttgtatttttagttgtaataagtaataagtagtattttatagggcgtttcggtgtttaggagcggatgtaaaggcgttgggcgggtataaggtagcgttaaggatatttagggacggaggaatcgataggggatttgacgtttcgttatttcgattagtcgttttttgttttcgtcgttttcgttcgttattgagatattttttacggtttatttattcgtcggtttttatttgcgatttaaggatttaagttttttaagagtttagtcgttagaatttaaaggtttttttttttaaataggagttaaattttttagttagaaagtcgattggtttgcgttcgagcgaggttgttttgtgattggttgataataaattcgacgttttgagtcgcgtttaagggcgtatatcgcgcgtaggcgtatttgttttttaagaattcggaagtggtggagttaacggttagttagatttgtggtagttttagttttagggtgtttttcgcggtcggttatttatcggtgaagtaatagttttttgacgttaagtttgacgtattggagataaagtttaaggaggtgaattaatttttgaacgtgttagtaagtaagatggcgagaaaagtaagagagagtgggatcgatcgatagcgtagcggtcggtttggcgtttttttagcgtgcgtagtgaacgtgcgttcggagcggtagattgggtaggattcgcgtttttatttttttaggagagagcgggatattaagagaatcggattagttggtattgggatacggggagagtagttggtgcggtcggttggggtatttagagaaaattatagaaacgattggggcgagattggaagagtcgagagttagtaaggtggtatgcgtttttattttgcgttttttaagttgttcggtttggtttgtattttttttttttttcgaagggtttcgtttttatttttatttagtttttagttcgtttttgtatttagatggtcgcggcgtatatagtgagggggtatttgtgttttagtttttttaattgcgatgtattcggttttggatcgggtttttgttttcgtgtgtttatttgtaaattggggataattaggtttttgtttatttggcgagtgaacgttttgtgggagttgagaagttaggggtgggttatttaaaatatatatatatatatatatatatatatatatatatatatatatatatatatatgtgtgtgtgtgtgtgtgtatgtatattcgggatgtgtttagtagaagtgaagagatcggatagaatagtggtgtaggggaattaaaaatggtttttttttatttttttaggtattttattaggattaagagttaaatttatataagacgaattaatagattattgtagggtaaataggatgtgtatgtaaagtattgagttagtatacggaaattattcgagttatattaatttaacgttaatagtagaattttttattaatttttttttgttagattatttatttgtgatttttattttttattggtatttaagaattttttatttttttcgggtaattgaatattgtttatgggagaaaaacgatatttaattacgtataggagttttataaaatacgagattaaaagttgaagttagatgattaaagtttatatggtattttgagttattgaaaggaatgaatagagaattgggggcggggggcgggaagtagttttaatataagttatgggacggtgaacggaggaaatgtatggtgaattaagtttgttatgtagatagaataggtgattttttgggtggtgttagtttttaattttttatgtgattcgagttaattttttttggtttataaggattcgtgataattgaggtatttttggagggttagattttaggtaggtaaggaaagtatagggaaagttttttttcgtttgttgttttttaggtgtttttagtttaaggtaattagttcgttaaagtattttgttttgggttggtattttttgaatttttttagtggttaagtttagggatttggagttggtaattttggtgtgttttaattttggataagtaatttagttattttttacgttgagtaggtgttttgatttttttgaatttattttattatttttatttgtgttttaggattttttatttaagtatagatttattatgtttatgtattattttatatatttgaatatattgaatgattttatttagtgaattgatgtttataaagtatttagtatgacggtatttggtatgtaggaagtgtttaatgttattggttattattaatattattagtgttatatagtgtgtaagaaattaggttttgggttaggcgtagtggttcgcgttcgtaattttagtattttgggaggcggaggtaggtagattatttgaggttaggagtttcgagattagtttggttaatatggtgaaatttcgtttttattaaaaatataaaaattagtttggtgtggtggcgggcgtttgtagttttagttattcgggaggttgagataggagaatagtttgaatttaggaggcggaggttgtagtgagtcgagatcgcgttattgtttttaagtttgggcgatagagcgagatttcgttttaaaaagaaaaaagaaattaggttttgaggttatttttattttttattgttgtttttagatatttgtagttttttaattttggtttaaatatatatatatataaaggtattgatttttggtaagtaaattattatgttgaatagttggagtttttttttgaataagttagaaattatttatagttttttgttttttaagattgaaggaaaatttagatatttgtaagttagtgtatgtataatttttttcgattattattgtttttttttttatttttattgttttgattttgattggtaatatttta

SEQ ID NO: 311 - DNA, 6239 bp, Artificial Sequence
  chemically treated genomic DNA (Homo sapiens)
taaaatattgttaattaaggttaaaataataaaaatgaaaaaaaaaatagtaataatcgggaaggattgtgtatgtattgatttataagtgtttaagtttttttttagttttaagagataaaaaattgtaaatggtttttggtttatttaaaaaagaattttaattgtttaatatgataatttgtttattaaaaattaatgtttttatgtatgtgtatgtttggattaagattaaaaggttataggtgtttggggatagtaataaagaataaaagtgattttagagtttgattttttttttttttttgagacggagtttcgttttgtcgtttaggtttgagggtagtggcgcgatttcggtttattgtaattttcgttttttgggtttaagttatttttttgttttagtttttcgagtagttaagattataggcgttcgttattatattaggttaatttttgtatttttagtagagacggggttttattatattggttaggttggtttcgaaatttttgattttaggtgatttgtttgttttcgttttttaaagtgttgggattacgggcgcgagttattgcgtttggtttagagtttgattttttatatattgtatgatattgatggtgttaataataattaataatattaagtattttttgtatgttagatatcgttatgttaagtattttgtaagtattagtttattgaataaaattatttaatgtatttaagtatatgaagtagtatatgaatatagtaggtttatgtttgagtagaaaattttgggatataaataaagatgatgaaatgggtttaaggaggttaggatatttatttaacgtaaaaagtggttgagttatttgtttaaggttaaagtatattagaattgttaattttagatttttgagtttaattattgaaggagtttaggaaatgttagtttaaaataagatgttttggcgggttgattattttgaattgagggtatttggagaatagtaggcgggaagaggttttttttgtgttttttttatttgtttaaagtttgattttttaaaaatattttaattgttacgaatttttataaattagggaagattaattcggattatatgagagattagaggttgatattatttagaagattatttattttgtttgtataataaatttgatttattatatatttttttcgtttatcgttttataatttgtgttagagttgtttttcgtttttcgtttttaattttttatttattttttttagtagtttaggatgttatgtaggttttaattatttgattttaatttttagtttcgtattttgtgggatttttgtacgtaattaaatatcgttttttttttatggataatgtttagttattcgaaaaaaatgggagatttttaagtattaataaagaatgaaaattataagtgggtagtttggtaaagaaaagttgatgagagattttattgttaacgttgggttaatatgattcgaataattttcgtatgttagtttaatgttttatatgtatattttgtttattttgtagtaatttgttaattcgttttatgtgaatttaatttttagttttaataaggtatttggaaggatggagggaagttatttttggtttttttatattattgttttattcggtttttttatttttgttgagtatatttcgggtgtatatatatatatatatatatatatatgtgtgtgtatatatatgtatatgtgtgtgtgtgtgtatatatatatatattttaagtggtttatttttaattttttaatttttatagaacgtttattcgttaggtaaatagaagtttaattatttttaatttgtaggtgagtatacgaggataagaattcgatttaggatcggatatatcgtagttggaaaggttagaatatagatgtttttttattatatgcgtcgcgattatttggatgtagaggcgaattaaggattgggtgggaatggaagcgaggtttttcgagaagaggaaggggtgtaggttaagtcgggtaatttaggaaacgtaaagtagaggcgtatgttattttgttaattttcgatttttttagtttcgttttagtcgtttttgtggttttttttaaatgttttagtcgatcgtattagttatttttttcgtgttttagtattagttggttcggtttttttggtatttcgtttttttttggaaaaatggaggcgcgaattttgtttaatttatcgtttcgagcgtacgtttattgcgtacgttgaaagggcgttaagtcgatcgttgcgttatcgatcggttttatttttttttgtttttttcgttattttatttattggtacgtttaaaggttagtttatttttttggattttatttttaatgcgttaagtttgacgttaaggggttgttgttttatcgataaatggtcgatcgcggagagtattttggggttgggattgttataggtttggttggtcgttggttttattattttcgggtttttagggagtaagtgcgtttgcgcgcggtgtgcgtttttaaacgcgatttaaggcgtcgggtttgttgttaattaattataaggtagtttcgttcgagcgtaggttaatcggttttttagttagagggtttaatttttatttaaaaagaagaatttttgaattttaacggttgagtttttggaagatttgggtttttgggtcgtaggtgggagtcgacgggtgggtagatcgtgggggatattttagtggcggacgaggacggcggggataaggggcggttggtcggagtggcggagcgttaagttttttgtcggttttttcgtttttgagtgtttttggcgttgttttgtgttcgtttagcgtttttgtattcgtttttgggtatcgaggcgttttgtaggatattgtttgttatttattatagttagaggtataaggggtttgttgagtggtgttgatatgcgcgggaggggtgggtgggttttagattggattttgtttttcgagattatttgggtaagaaaagtatagaaggtttttgttgtgttggagtttacgttttagtgggtggggagatagacggtaagcgtacggagaatttgtagttggggtgggtgttatagaggaaaagtaggagtgcggtttaacgggggtcgttttagatagaatagtttaagaaggtttttgttttggttggatgagtgggtgaattgatgaatgagaatttttttgtagaggttttttcggttcgtattttttagatcgtagattttggagtagttgtatcgggataatttgtagtgtttgttaaatatatagttttatcgagagttcggtaaattagaatttttgaggggtaggatttaggtgtttagttattaataaattttttagatgatttttaggttttattgagaattagggatgtagatcggtgtatataaatcgtttggggacgttaaaatgtagaatttgtttttttagatttggggttaggttttagagtttttatttttaagaattattcggttgaggtagacgtagttattgtttttaattttcgtaatgtttttttttttttcgtaattttttttgttttttgaattaaacgttttttagtaatttatttagttcgtttttttttttatttttgtagatatgtataggtttgagggaggaaggaataaatcgtataaattttttgcgttattagtttaatagtttttttatttaaaatagtaggatttttggtttgaattgaatggattttgtgaaagttatttggttttttaatttggttgtagattagagttatttgaagggtagtttttttggcgttgtttttagaattttggattagaattttattttattttgtttgttatttaatttttttagaaagaaaggtagaataaattggagtaaatgtttgtagtttttgttagaagaatgttgaataaatgttgttaggtttatgtgattttattagattgttatttagaattgtaagggaagtaaagtattagagtatgtgtgaaattaaatatttgattaatataagtgtgtatttttttgttgttgtttattaatttttatttatttattgtttttttataagggttgtagtttgtagtttgggtttggttttattatggaattatttgtttaattgtaaaatggtaattttaatttttttttttgagatagggttttattttattgtttaggttagagtgcggggatatttgataagaaattttagtgaaggtcgggcgcggtggtttatgttcgtaattttagtattttcggaggtcgaggtgggtggattatttgaggtcgggagttttagattagttttattaatatagagaaattttgtttttattaaaaatataaaattagttgggcgtggtggtgtatgtttgtaattttagttattttggaggttgaggtaggagaattgtttgaatttaggaggtggaggttgcgggtgagtcgagattgcgttattgtattttagtttgggtaataagagtaaattttattttaaaaaaaaaaaaaaagaaattttagtgaaatgaaagattgaattatatatttgggggaaaagcgtaataaagggagtaagaagtgtaaatgtttatggtaggggatttatttgtagaaagaaagttttgtgtggttggtatacggttgataagaagaggagatgaagttagagaggtagttagggtttatgttttgtgagattttaataggtttgtttatgtaggttaggagtttgtattgttttgattgagttgggagttatgggggttttttgaattgaggattaatatatttgatttgttaatgagattgtcggttttagtgttaagaatggattatgatagggtaagggtggaagtggggaggttattgggaggttgttggaaaaaatttaagggagagagaataatggtttgattaggtggtagtagtagaggtggtgagtagtgattttgaaggtagagtttatagaatatgttggtggattaaatgaagggtttgcgagagagaatttcgtaaagggttattatgttaaggtttttggtttgagtaattgataggatgggtttgttatgtattgagatgaggatgtttagagattagatttggggaggtgagagtggggagagattaggatttttgtttgggatatgttagaatggagatgtcgtttagataattaggtgtagatgttgtatagaaagtagaaaatgtagattaagagtttaggggagaggtttgggttgaagaatgaatatttgggagtttttagtttgtagatggtattgaaagtaaagagattggatgtattcggttagggagtaattggagatggagaagttattttaggtttgagtttagggtatatttatgaatagggaggtgagaagtggagaagggaagaggtttagttttggatatgttaggattgaggtgtttggtagatatttttgggagattttgggtaaatttttggatatttaagtttgatagtttaaggagagattagggtagaagacgtattttgagtggtttttatgaaggtatttagagttgaggtattgggtgatatggatttttggtgaaggtgtagatggagaagtggagggtttagggattcgtttttgagttattttagatttttgatttggtaaaaatgagattgatttagtaaggagggaaagataggacgattaggtggtagataaatttggaagtgaagtgaagaaaaaagtgtaagatgtgattaattttgttagattttgttgaggatgtaagtacggggaaggtggaattgatttttgggtttggtagtagtaggtgttagttatgagtttgataatgtggtggagataaaaaagttaggtggggatgggtttaggggaggggagaggagtagtagaggtggtaagtgtggacggtttttttggagttttgttgttggagaggagggggttattgttagtaacgataatagaataaagaggatttttattttattttattgttttgagacgaagtttcgttttttttttataggttggagtgtaatggtgtgattttagtttattgtaatttttgttttttgggtttaagtgatttttttgttttagtttttcgagtagttgggattataggtgattgttattacgtttagttaagttttgta

SEQ ID NO: 312 - DNA, 6168 bp, Artificial Sequence
  chemically treated genomic DNA (Homo sapiens)
tttgagttttggaggcggaggttgtagtgagttgagattatgttattgtaattgagtttgagcgaaagagtgagattgttttaaaaaaagaaaaaagaaaaagaaaaagaaaaagaaaatatagtagagaaatacgagtttattttggaaaattttattttttgagaaagtaagattaaatggtttaggatttttattgatttagaaaatgtttttaaatagttttagaaaattaaattaaattaatgtatataaagaatatcgataatatataaacgtgtaatttatatttatattaaatgtatttgtattatataatttgtttatggtatattttttttttatatttttaattttatttttgtttttataaaattttttaaagaaagtagtatttaatttgtatatgttagaatggaaattattttgtaaagatgtatttattaaatgttagatgtatttaaggagtatttatatttgtaatagatataagttatttttaatttaaattatatgttattttgtttattttttgaaaagaatgtgatatggaaagggtattattatttaatgaaatttttttattttataaattagaaaaataatgtttagaaagttgtaatttatagatatttcggagttatgaagtggtagagttggaattagggtttatgtttgtttaatgtttatttttatcgtatttttattattttatatatatatatatatatatatatatatatatatataaatattagtgttttatgtattttattgtttatattttttttaaaaagtaaatagaataatatgtgatataatttaggaaggggatttaaaagtaaagtgtgtatgatagaaatagggttatttaatggaaatagcgatgttaataaattacgttttttagtattttgtaagaaatagagttttaaggggatttagagattaaatttaattttttaagttaattatttaatagggcggttgtatatttaggttattttgagtgtataatagtattggattcgagttttgttttttgatttttatttttgttttttgataagttttgtgatagtaaaggggaaagaatgtttatcgatttttaatagttatttttattatgatatttttgttaaaatattattttaatttaggttttaagtagtttatgtttagattatatttacgagataattaggttttttggtttataggcgttttttttttttatattgtattttattgatagatttattatttttaaattattgtttgtattatattatttttagttaagttttgtgatggtgtgtgtttaatagtttattgattttgttttaaatattttaatttggtttttttagttttttataatttgtttgttttttagaaattttattttttttagtaaagtatgtttattcgtatcgttaattttttattaaatgtttttttttttgtttttgtttttttttttttttttattattgtaaattttatttaagttttaaggtacgtattcgtgttttttatttagtttttttttattattttagttttcgttgttgagtttttttttttttttttgatttcgtgaatttttttataggttattttgttgggtttgtatatttaaatttagtgtaagttttagggtaggaattatgttttattttaggaattttatgagttttttttttatttttattgttatatattttagtattttgttgattacgatagatttttagggaatattttgattgttggatagtttagatacggtggaggaagagaatgttagttatttgtaagtaatgttggtaaaagtattagtattatttttagggttaagttttaattttattgtttttttttatgaatgtatatatttattttattattaaattgttattgatttttttttttttagcgtttgttaaataagtttattttttttaattttggttttaagtttgatttatttttaagtaagtttattgtatttttttagttattttttttattttaaggatatagttaaatgaaagtttttatttaggttttttttttttttttttaataagaggaatttttatttttttttatttgtggtgttttttttttaggtttgaaggtaggagtgatatcgtggtgatattttagttgtggagattttttttttattatataaatgttttaaatttagatgtgtttatagtttagttaagattagaaaatgttattggtttttttttttttttttgtttcgtaaaatgattatgatgtagagagtaagttttgaagagttgggatttttttttatttagaagtttttttattattttttttcggtggaggggaaggggaagtttgtttttagttatatttgaagttttagttttgttttgtgagttttgatttttaaggaggtaggagagattttttggagggttttaggtattttgttattttttttttcgttggtatttttttttaacgttaggtgattatatttttagttaaagagttttcgtttttttgttttttgtaggatatgttttttggtttatattattacgtgagtttttttagtgggtttttttgttcgtttttgtttttatttttcgatttttatttgcgagtatagcgttttatttcggtggatagttcgtcggcgtcgttaggttttttgttgtgcgtataagttagtagttggcggtttgttcgtagtattggtagcgaggatttcggaatcgttttcgttttcgggtttttttacgcgtttagggattgtttttagtaggtgtagttttaggtgtttaattgttagatttttaatttcgcgtttttttagtttttaaagttttttaattcgcgtttgttagttttagcgcgtttttttgtttagatgttagttcggtttagggttcgtttttttcgcgattttagttttagattttttttttggtttttagtgtttagtacggttatttatttagggtaagggttaggagtagtggtagggagttggcgtcgttgtatcgggcggttcggtttattaatttcgttttgtcgggtcgggtagtttttagataagttttttttttttttcgtttttttttcgggtttcgggcgtttgagagggtgtttggaaattaatttcggaggtagaaggaaacgaaattattttttaggttggtattttggttataaggtagggaaatatttagggcgggaggtcggtcggtttcgtgaatgtcgtcgggaggagggagttttttatttattttttttttttttgtatatatttcgttaaagaggcgtaggatttggttttgggagtttttacgttgtttttatttaaattgttttatatttatatttatatttagggatatattcgggttgttttcggattagtttattattttttttgttgggttttatttgattgattgtttatttttttattttttagggcgtaaataaggtagggagggagatgtaaagaattcgcgtggaggggtgtcgggggtttcggtcgggtttgtaggttgatttaaatttttggaagttatcgaggaagagttagagatttaaacgtgttttggaattttaattttttttattttagaggattgttagtgttatggagaaattagatttattatttattgtggttgattttaggtatttgataatgtaggtaattttaaaagagttattgttgttttttaaagttttgaagttatagcgaaatttcgtttttataaaaaatataaaagtaaattaatagtcgggtatggtggtgtgtatttgtagttttatttattttttgaggttgaggtggggaggatcgtttaagtttgggagatggagtttttaatgagtttagatcgagttattttattttagttaaggcgtaagagtgagatattgttttaaaataacgataataataataataatattagtaataaaaaaaaaaaaaaaaaaaaagaaaagaaatgaaaaaagtttttaagttagtgttttagtttttgggtgtattgttttttaataatttataaaattggggtttattaggatttattttagaaattttatttgtatttttgtttatgaatttatttatgtatttagtatatttttatttatttgtattaagtaatttttggaatagaaagatatttttatagtttttagagaaagtaagtagtatttaattttattttatgtggttatatattgtttttaagataattaaaagatatagttgtttttgtattggtttgtgttttttatataagatttatgtggataattatgttttttagtatagaaattttatttttatagtatttaaaagttatgtaagttttattttatatatgaaatgtagtttgggtgtttgtttttttttttttattttattgtttaagttaagtaaattgttgtgtatttgttttttacgaataatattttattttaaaattaaattattttattgttttaggtaattgatatattcggtggaataaaaattagtttttaatttttagaattttattttagttttatatgatagtttataaaatattggtagagagggtaggtatgaagtttaaagaaatttaaagttgtaagatggaaggttattgtattttagttaaaaagagtagaaatattggaagttaatggattttgatattattttttttttttttaatatttttattttgtattttttttttttgatattttttttattttttagtattagtgttttaagttaaagtattttttattttaagatggtatttagtttagttaatagttgttttgttagttttaatagaatgttataattttgtttttttttttcgtagatattaataaaaaaaaaaaaaagcgagatttaaataaaaagtattaaatgtttgttgagtattggaaaattttaggatttggtgtaagtatttattatttatgttatttaagtggtaaattaatttttttaggttattagaatatgaagtagtataatttaatatattaaataggatagataaattaataattttttttgagggttttatttattattataaataaaataagtatttttaagaaaatttaaattttttgatattggatatttaatttttttaatgttaagagattttttttgtttttttttgtttgttttttttttttttttttattttttttttttttgtttttttttttttttttttttttttttttttttttttttttttttttttagtttttaattattttttttttttaagttatttgtttatggggtatggtaaagttggaatataattattatatttggaagagtggaaggtaagaattgatttttttgagtttttaaatatgtaattgagttgcgttttagtgtttttatttgtaagttgagttgttattaagagaaaaataaattaaagttatattagagttataaggtgaaatttgtatttttagttaattttaaggtaggaattgtttgagtgttgttttttttgtgttaggtttaggtaggtataattagtttttttaaatttggtatgaggtttaagtagatttttttggagggtttttaagtattagtttttttttttttttatatagaatagtttgtagttgggatcgtttttttcgttttttggataggataaaataaatttgtagttatatatagggtataatatataaatagatatacgttatgatggaaaggaaaattttggaatgtattttttttaggttaatatgtattttttaaatgaaggttttaaggtatttagtagtataggaaaattttttaatgattattaattttatttaataagagtgggtgaatgaaaatgatgaaaggtatttttaaaattgtaatttttatagtaatgataagtattatgtattgtagattattagtggtatagttatatagagagaatttttaaatattttatttaaaattattgaattggtttttaagaatgtattagtgaaaaattattgtttaaaagttgtatttaggtaattgtattttataatttagttgttttgagggaggtagttatttttttttttgtttatttttttgtatttttttttttagtttag

SEQ ID NO: 313 - DNA, 6168 bp, Artificial Sequence
  chemically treated genomic DNA (Homo sapiens)
ttagattgaagaggaagatataagaaagtaggtaggaaaaaaaataattattttttttagaataattagattataaaatataattatttgaatataatttttgagtagtgattttttattgatatatttttagaaattaatttagtagttttaaataaaatatttgaaagttttttttatgtaattgtattattaataatttataatgtatgatgtttattattattataaaaattataattttaaaaatgttttttattatttttatttatttatttttattaaataaagttaatggttattaggaaatttttttatattattgaatgttttaaagtttttatttggagaatatatgttggtttagaaggaatgtattttaaaatttttttttttattatggcgtgtgtttgtttatgtgttgtgttttatatgtaattataagtttattttgttttgtttagaagacggggaggacggttttagttgtaggttgttttgtgtgggaagagaaaaaggttgatgtttaaaggttttttaaaggaatttatttaagttttatattagatttgggaggattggttatatttgtttaaatttggtataggaagaatagtatttaagtaatttttattttggggttaattaggaatataagttttattttgtgattttggtgtaattttggtttattttttttttagtaatagtttagtttgtaaatgaaagtattgagacgtaatttagttatatgtttgaggatttaggaaaattaatttttattttttatttttttaaatgtaatggttgtattttagttttattatgttttataagtaaatgatttgagagagagaggtggttgggggttgggggagaaaaagaagaaggagaaggagagggaagaagaggaggaagaatagagagaaagaaagtgaggggaaaaaaaagaaataaataaaaaaagataggaaaagttttttaatattgaagagattggatatttagtgttagaaaatttggatttttttgggagtatttattttatttatggtggtaaataaagtttttaaggaaggttattaatttatttgttttatttagtatattaaattatattattttatattttagtggtttgaaaaagttaatttattatttgaatggtataaatgatgaatatttatattaagttttggaattttttaatgtttaataaatatttagtattttttgtttaggtttcgtttttttttttttttattagtatttacgaaaaaggaaaataaaattgtagtattttgttggggttaataggatagttgttggttaggttaaatgttattttggagtaagagatattttaatttagggtattggtgttgagagatggagagaatattagaaaagaaaaatgtagggtggaagtgttgagagggagggagatgatgttaaaatttattggtttttagtgtttttgttttttttagttggggtgtagtaattttttattttataattttgggtttttttaaattttatgtttgttttttttattaatgttttatgagttgttatgtgggattagaatgggattttgaaaattaagagttgatttttattttatcggatatattagttgtttggggtagtaaaataatttagttttgaaatgaaatgttattcgtgggagataagtgtataataatttatttaatttaaatagtaggatgaggaggaagaggtagatatttaaattatattttatatgtaaaataaggtttatatgatttttggatgttatagaaataaaatttttgtattgaggggtataattatttatataaattttatatgaggaatatagattagtataaaagtagttgtattttttggttattttggaggtaatatataattatataaggtaaaattggatgttgtttgttttttttaaaagttgtgaggatgtttttttgttttagaaattgtttaatgtaagtaaatgaaaatatattgaatatatgagtaaatttataaatagaaatataaatgaaatttttaaagtaggttttggtgagttttaattttatgaattattagaagataatgtatttagaaattaagatattagtttgaagattttttttattttttttttttttttttttttttttttttgttgttgatgttgttgttgttgttgtcgttgttttgaaatagtgttttatttttgcgttttggttggagtgaagtggttcgatttaggtttattgaaggttttattttttaagtttaagcgattttttttattttagttttagggaatggatgggattgtaggtgtatattattatattcggttattaatttatttttgtattttttgtagagacgaggtttcgttatggttttaagattttaaaaggtaataatgatttttttgaaattgtttgtattattaaatgtttgaagttaattataatgaatggtgagtttggtttttttatgatattagtaattttttgaaataaaggaagttagaattttagaatacgtttgggtttttgattttttttcggtggtttttaggagtttaggttagtttgtaggttcgatcggaattttcgatatttttttacgcggattttttatatttttttttttattttgtttacgttttagggggtagggaaatgaatagttagttaggtgagatttagtagggggagtggtgagttggttcgagggtagttcgaatatgtttttgggtgtgggtatgggtgtggggtaatttgggtgggagtagcgtggaggtttttaggattaagttttgcgtttttttggcggggtgtgtgtaggaggaggggggataaataggaggtttttttttttcggcgatatttacggagtcggtcggtttttcgttttgggtgtttttttgttttgtagttagggtgttagtttgggaagtagtttcgtttttttttgttttcgggattagtttttaggtatttttttaggcgttcgaggttcgggaagggggcgaagaaggagggagatttgtttaggggttgttcggttcggtagagcggggttgatggatcgggtcgttcggtgtagcggcgttagttttttgttattgtttttggtttttgttttgggtaagtggtcgtgttgggtattggaaattaggaggaaagtttggggttggagtcgcggggagggcgaattttgaatcgagttggtatttggataagagggcgcgttggggttggtaggcgcgggttggagaattttgaaggttgggagagcgcgaggttaaagatttggtaattgggtatttggggttgtatttgttggaggtagtttttagacgcgtgagaaggttcgagggcggaagcgatttcgaggttttcgttgttagtgttgcgagtaggtcgttagttgttgatttgtgcgtatagtagagggtttggcggcgtcggcgggttgtttatcggggtgaggcgttgtgttcgtaagtgagggtcggggggtgggggtaggggcgagtagggaaatttattaaagaagtttacgtggtagtatagattaagaagtatattttgtaggaggtagaagaacgggaattttttgattgaaggtgtgattatttggcgttagggaagagtgttagcgggaggaggagtagtaggatgtttagagttttttagagggttttttttgtttttttaggagttagaatttataaagtagagttggaattttagatgtggttggaagtaggttttttttttttttttatcgagggaaggtagtgagaaggtttttaagtaggaaaaaattttaattttttaaagtttgttttttgtattatggttattttgcggggtagagaagggaagggaaattagtaatattttttaattttagttgggttgtagatatatttgggtttggagtatttatgtggtaggaggagagtttttatagttgaagtgttattacgatattatttttatttttaagtttgggaaggggatattataaatgaaaaagaatgggaattttttttattgaggaaagagagggggagtttaaatgaaaatttttatttgattgtgtttttggagtaagagaggtggttaaaaaggtatagtgaatttgtttggaggtggattagatttaggattaaggttagagaaaataaatttatttaataaacgttgaagaggaaggagttagtaataatttagtggtagagtgaatgtgtatatttatgaagaagagtaatggggttgagatttaattttagaaatagtattgatgtttttgttagtattgtttgtaagtagttgatattttttttttttatcgtgtttaaattatttaatagttaaagtattttttgagaatttgtcgtagttagtaaggtgttgaggtatgtagtaatggaggtggggaaagggtttatgagatttttaaaataaaatatgatttttgttttagaatttgtattgaatttggatatgtaagtttagtagggtaatttgtggaaaaatttacggaattagaaaagggagaaagagtttaatagcgggggttggaatagtggggaaaggttgaatggaggatacgaatgcgtgttttgaggtttgggtagagtttgtaatagtagagaggaaagagggaatagagataagggaaaaagtatttagtaaagggttggcgatgcgaatgagtatgttttattggaaagagtagaatttttgagaggtagatagattatgaagaattgaaaaagttagattagaatatttggaatagaattaataagttattaaatatatattattatagggtttgattgggagtgatatgatgtaaataatggtttaaaggtgataaatttgttagtgaggtgtagtataggaagggggggcgtttgtgggttagaggatttgattgtttcgtaggtataatttgggtatgagttatttggggtttaaattagggtgatgttttagtagaggtgttatagtagaaatgattattgaaagtcgatggatatttttttttttttattattataaaatttgttaaaagatagaaatgaaaattaaaaagtaaaattcgaatttagtgttattgtatatttagggtaatttaaatgtataatcgttttgttaaatgattggtttgggaaattgaatttggtttttagatttttttaaagttttattttttgtaaaatgttaaggaacgtaatttgttggtatcgttgtttttattaagtggttttatttttgttatatatattttatttttaagttttttttttaaattatgttatatgttgttttatttattttttgaaaagaatgtgagtaataagatgtatgagatattagtgtttgtgtgtgtgtgtgtgtgtgtgtgtgtgtgtgtgtgtgagatggtggaaatgcgatgagagtgggtattgagtagatatgagttttggttttagttttattattttatgatttcgagatgtttgtaagttataattttttgggtattgtttttttaatttgtaaaatgaagaggttttattagatggtgatgttttttttatgttatattttttttaaaaagtaaataaaataatatgtgatttaaattagaaatggtttatgtttattataaatgtagatgttttttaaatatatttggtatttagtagatgtatttttataggataatttttattttaatatatgtaaattaggtattattttttttgagaaattttataaagatagaagtggggttggagatataaaaagaaggtatattataagtagattatatggtataaatatatttaatataaatataaattatacgtttatgtgttatcgatattttttatatgtattaatttggtttaattttttaaaattgtttaaaggtattttttaagttagtagaaattttgagttatttaattttatttttttaaaaaatgagattttttaaaatgggttcgtatttttttattgtatttttttttttttttttttttttttttttttttttttgagatagttttattttttcgtttaggtttagttatagtggtatgattttagtttattgtaattttcgtttttagggtttaag

SEQ ID NO: 314 - DNA, 6168 bp, Artificial Sequence; identical to SEQ ID NO: 312
  chemically treated genomic DNA (Homo sapiens)

SEQ ID NO: 315 - DNA, 6168 bp, Artificial Sequence; identical to SEQ ID NO: 313
  chemically treated genomic DNA (Homo sapiens)

SEQ ID NO: 316 - DNA, 6205 bp, Artificial Sequence
  chemically treated genomic DNA (Homo sapiens)
tcgttgggaagggtgtttgaggtcgtgggcggtgcggagcgtgtttgtgtgcgcggaggttgagttggttgtgtgaagtggtagcgggtttgttagagagcgtttatttgcgtgaatgtataattatatattacgggttacgttttatatttattttttttttaggcgggttaggttgtttgtacgcggagatttagagaggttagcggaagggtagcgcgggaaggcggtttttttttttcgcgagcgtagatttggcggaggaggcggcgattgttcggtaggttgcgtcggcgagttttttagttttttttatcgacgtgttaggcgtttcgaaggcgataggcgtttttcgtcgaaaatgaaggcgttcgagttaggaaggtgggggcgggtagttagcgggagataaggagttcggagaaaatcgagaggcgggtaggttttgaacgcgtcgcgtcgcgggtcgtgttgcgagttcggtatacgtttttcgttttagttcgcgttggggtttggtttttaggtttttcgcgatgattcgcgaaaatatttttcgtttttttttttttaattcggaattttggagggagaggtcgcgttcggttagtagtcgttgcgagagtagtatttatttgggtttgtgcgcgtcgcgatgcgtcggggtttttgcgttgttttgcgtttcgttttcggtattatttttcgtggttttatcgtttttagttcgtattcgagcgttgaggtggtaagggtaggtttgcgtgcgagttttttgcgggttggtagttaggtgcgcgagggtcgtttttgtcggcgtttttagttcgcgttgtttgtttttaggaatttggtttggcgcgtagtgttagaggtttcgcggcggcggtaggtcgagtttataggggtattaggttaatttttttttttcgttttgcgtacgcggaattttttattattattattaaagaattttttagaatttgtttacgttaaattttgtaaattttttgttagggtttttgttatttttcgggaaatcggaatttgcgttttgaaaacggggtcgcggggttaaataggcgggtttttagtgtgtgttgggggtgggggagggtaattgaattacgtgtgagtttagattcgagcgtggcgtgtgtacgcgtgagtgggagtgagtgcgaatttaagtttttgtgggttttaagttttcgtgttaacgagtgtattagtgggtgcgtatatgtttgagcgttttttgtatatgagtgtgtatatacgtatgggtgtgtttatacgtttgtttgcgtaatttatcgggtttgtatgtgtattaagatatgtatgtgtgtgttaatgtgtggataagagcgcgagggtgtgcgcgtacgggtgagtgattgagtacgtcgtttatttaggggtttgtgcggtttgggtcgtttttgggttagcgggtttttattcgttttcgttaggttcgcggcgttcgagataaagcggtcgcgattcgtgttgcgttttcgtttttcgtttgcgttttgtttcggcggttgttcgttcgttcgtaagttgttgggcgagttcgaaaaatttcgggagcggcgtagtttttttcggggcggggagagtgggtaggcggtttttcgcgggaatttagtcggtcggtcgcgaggatcggagtcgagtcggttgtgtttgcgatggttacgatcgggaggtcgtcgtatttgcgatttgttatagggttgtgcgcgtcggggaaggtttcggtttagggagcgtttttcgtcgcgtcgttcgggcggggaaggcggggtttagcgcgtatcggggttgaatcgcgggcggagggcgtattaatatttgttcgttaggttggtggaggcggggcggattttgttggcggtcgcggggcggcgagagtgggggttttttaagcgtttattaacgcgggggttcgaggggggtagggacggagggagggaatttcgggagggttttaggtcgattcgcgagacgtagtcgagcggagatggagtgaaggttgtttcgttcggaatttcggagtcgagcgtcgcgggcggcggggatttagggttgttttcggttggggcgtacggtcgtaagatttggaggtggtgtttttttttaaaaaatatcggcgggggtagtttttttacggttttcgttcgggttgttttcggttttagttcggtttttttttttgtgggagggcgagaaagaaagagggaggagagaggtgggggaggcgggagttggagagagaggggttttgagttaatcgtcggcggatttagtagtttttcggggagggcgggcgggagcgcgggggcgggcgcgtcgcggttcgttcgggagaagtggtcgtcgatgacggtagaggtgtagttagtttcgcgcgcgtagttttttttttttcgtttttttttttttcgtcgttttttttttttttttttttttttttttttcggttcgttcgcggcgtagagtagcggcggtagcggcggcggcggtagtagttattcgatgttttcggcgttcgagaagtagtagttatcgtacggcggcggcggcggcggcggcgggggaggcggcgcggttatggatttcgcgtcgttcggttcgtttaaggttaagaagattaacgtcggtattcggcgttcggagaagtcgttttatttttatatcgcgtttatcgttatggttatttagagtttatttattaagcgtttgacgttgagcgagatttattagtttttgtagagtcgtttttttttttttcggggtttttattagggttggaagaatttcgtgcgttataatttttcgtttaacgagtgttttattaagttatttaagggttttgggcggttcggtaagggttattattggattatcgattcggttagcgagtttatgttcgaggagggtttttttcggcggcggtcgcgcggttttcgaaggaaatgttaggcgtttaagtttatgtatagtatgatgaacgggttcggttttaattatttttcggatatttacggtttttagggttcggtcggcggtttttcgtgttcgtttaatagtttggcgttggagggcggtttgggtatgatgaacggttatttgtcgggtaacgtggacggtatggttttgtttagttattcggtgttttatttgttttttaacggcggttattcgtatatgggcggttgcggcggcgcggcggtcggcgagtattcgtattacgatagttcggtgttcgttttttcgttgttgtttatcggcgtcggtggggttatggagtcgtacgtcgtttattcgggttcggcggcggtttggtcgttttcggcgttcgcggcgtttaatagcggcgttttttatattaagtagtagtttttgtttttttgtaatttcgcggttaattttttgttcggtagtttttttacgtattttttggagtagtcgtatttgtattagaatagttataacgttttagtcgagttgtaaggtgagtggggaggtcgagggcgttttggttttcgggaagtcgagtttgagtggtagcgggatttagttggggcgagtttttttatttttgtggtcggaattttaaggttgaggggaggtattagttttttaaggtgttttttggttttattttttttttttcgaagagtgattatcgtttttgattttagtttgggttaatttgtttttttttttgttcgaattttagttgttagttgttttaggtttgattaggtaggttggttttgagttagatgttttagattttagtgttttaagtttttttgtgttttttaagtttttttatagtttggaaagattttgggatggatttaaggtttttagcgttggttagatggttgtttttttttggtggtggtttttaggttgtttggagggttgtttttgtttggggttgggcggaacggaaggtgttaggtttaaagtcgttgggttagcgtttagaggtttagtttcggttttttaggggattagatttggtagatttatagttgagtttaggggtattttgtggtgattgaggtaggagggtgtcgtggttaggtttcggagggttagagttgtagatcgggttatgggggttttttgttttttaggatttaagtttttaggtttttatatttttaatatttttgatattttaatatttcgaatatgtagaagtatttgttaagggagatgtagtagtttcgttttttgattttgttttaggtttttcgtagtttgtaggtttagttttggaaaaagttggagtgagtttgttagggttagtttagggttagttgttagtagttttaggaggtaggagttaggtttggaggttttaggtagtttttttgcgggggatttttcggtttcggggtttgttttttggagaagtttttttttatttttgttgttggttcggcgttggttttgtattggttttttttttaatttcgtcggtagtcgtagtttttgaggttgggggtggtggtggttgttttggcggtgacggttatgggcgttaggggttttttatttggttttttttattattttttttatggttttggaagttttgggtttttgtacggtgttcgaggttggataggtacgtagtaggtaggtaggtaggtaggtaggtaggtcgtggtaagtgttttggagttttttttttgggtgcgtagttggaaggtcgggattcggggaggagagcggggaggcggtcgtgttttggagttaggttgataggttttgtgcgttttacgggagtattgtttttttgtttgaattttgagttatcgtggttaatttttttgtttttttaattttttttgtcgtttcgttttgtaggtatttcgcggtattattcgtagtcgtttagtatgtgtgatcgaaaggagtttgtttttttttttaacgttatggcgtttttttttatgtattcggtcggcgggggtttttattattattagtaggttatttattaagatattaagttttgcgtgatgtgaggttgtcgtcgtaggtttttttggtgtaggtaggcgggttatagggattttggatcggtataagaaattgtttttttttcgaggtataatcgtcggtagaagaaaagggttttatttttttttaatcggagtttttggtaaggagtttttaatgtaaagatatagcgttgcggttggtatttttttttttatttttttaaaattgttaagaaatgttagtggtgggtttgatttgattgtagttatcggtaaataaaagtttttgattttgttgaattcgtttgagacggtgttgtgtaggggaaagttttcgtatttatataggaattttgttgaggtttttttttttttcggttaatggtagaagtgggggaaaatttttagaagaaaagtaaatatgtgagattaattattattaaatatttttattttttggttgagtatttatttttttattttttattttttttttgaaagaatgttttggaatgcgtaagtttttttttagagtcgttttttgtagggagcgggaagtgataagagtttagatttttttttcgatttttttttttattttcgaagtttttttcgtggattataggtggatttttgtgcgaataatttgtatttcggaagttattgttcgtttttaaatagaaagttaaaggagttacgaagtaagcggtcgttcgggcgttcgttttcgtttttttttatgtttttttttttttttcgttttagttttttttgttatgttttgttttgaattttatttagatttttttagtgggtatttttttgttttttaatttttattgtaaattttttggttcgagaacgagtcgaatatagcgcgacgtagggattaggacggttcggtgatcgcgcggatttaggattgcggggacgtagaaaggttaaggtatttttaaaaattatagtaaggtttttgtttatttattttattttttttttttaataattaaaatatcgcgtaggttttttcgtttattagtattaatggtgtaattttgttggtaatatttgtcgtgtagaattttttttagatatttattgtaaatttgaaataaagatcgatttgtgtaaaaataaatttttatatgttttatataaatata

SEQ ID NO: 317 - DNA, 6205 bp, Artificial Sequence
  chemically treated genomic DNA (Homo sapiens)
tatatttatataaaatatatggaaatttgtttttatatagatcggtttttgttttaaatttataatggatatttaaaaaaaattttatacggtaaatattgttaataaagttatattattaatattgataaacggaggagtttacgcggtgttttgattattagggaaagaaagtagaataaataaataggagttttgttatagtttttaaaagtgttttaatttttttgcgttttcgtaattttgaattcgcgcggttatcgggtcgttttagtttttgcgtcgcgttgtgttcggttcgttttcggattagaaagtttatagtagaggttgggagatagaaaaatatttattgaaaaagtttaaataaaatttaagataaaatataatagaagaggttgaagcgaaggaagaggaggaatatggaaggggacggaggcggacgttcggacggtcgtttgtttcgtggtttttttgattttttgtttaaagacggatagtggttttcgaaatgtaagttgttcgtataaagatttatttgtggtttacggaggagatttcggaggtggggagggagatcgggagggagatttgagtttttgttatttttcgttttttgtaaaagacggttttaaagggagatttgcgtattttaagatatttttttaaaaaaaaaataaaaaataaaaagataaatatttaattaaaaaataaaagtatttgataatgattggttttatatgtttgttttttttttaaaaatttttttttatttttgttattggtcggaaggaggggggattttagtagaatttttgtgtgggtgcgggggtttttttttgtatagtatcgttttaggcgggtttaataggattaaaaatttttatttatcgatggttgtagttagattagatttattattaatattttttaataattttgaaggagtgaggaaggaggtgttaatcgtagcgttgtgtttttgtattggggattttttgttaaaaatttcggttggggagaggtggaattttttttttttgtcgacggttatatttcgagaagaaagtagttttttgtgtcggtttagggtttttgtgattcgtttgtttgtattaggagggtttgcggcggtagttttatattacgtaaggtttgatgttttggtaggtgatttgttggtggtagtaggagttttcgtcggtcgagtgtatggaagaggacgttatggcgttgaaagagaagataaatttttttcggttatatatgttgggcgattgcgagtgatatcgcgggatgtttgtaaggcgaggcgataggaggggttgggggagtagaagagttagttacggtggtttagagtttaggtagaggagtagtgttttcgtggggcgtatagggtttgttagtttggttttagagtacggtcgttttttcgttttttttttcgagtttcggttttttagttgcgtatttaaggaaaagattttagaatatttgttacggtttgtttgtttgtttgtttgtttgtttgttgcgtgtttgtttagtttcggatatcgtgtaggggtttagggtttttagagttataggggaagtggtgagggagattaagtggagggtttttaacgtttatggtcgttatcgttagggtagttattattatttttaattttagaggttacgattgtcggcggggttgaaggagaggttagtgtagggttagcgtcgggttagtagtaggggtgagaagaagtttttttagagaataggtttcggagtcggggagtttttcgtagagaggttgtttaaggtttttaggtttggtttttgttttttggggttgttgatagttgattttggattggttttggtaagtttattttagttttttttagagttgggtttgtaggttgcggggggtttggggtagaattaggaggcgaggttgttgtattttttttggtagatgtttttgtatgttcggggtattggggtattaggggtgttgggggtgtggggatttgaaaatttggattttaaaaaataaggagtttttatggttcggtttgtagttttgatttttcggggtttggttacggtatttttttgttttagttattataaaatgtttttggatttagttgtgggtttgttaggtttggttttttgaaaggtcggggttgagtttttgagcgttggtttagcggttttgggtttaatatttttcgtttcgtttagttttaggtagaggtagttttttaggtagtttgagggttattattagggagggatagttatttggttagcgttgggagttttgggtttattttaggatttttttaagttgtgaggggatttaagggatataaaaggatttagggtattggggtttgggatatttggtttaggattagtttatttggttaggtttggagtagttggtagttggagttcgaatagaaagagaaatagattggtttaaattagggttaagagcggtagttatttttcgaagggggagaggtggggttaagagatattttggggagttggtgtttttttttagttttggggtttcgattatagaagtggaggggttcgttttagttgggtttcgttgttatttagattcgatttttcggggattagggcgttttcggtttttttatttattttgtagttcggttggggcgttgtggttgttttggtgtagatacggttgttttagggagtgcgtggagaggttgtcggatagggggttggtcgcggggttatagggggataggggttgttgtttgatataagaggcgtcgttgttgagcgtcgcggacgtcgagggcggttaggtcgtcgtcgagttcgagtagacggcgtgcggttttatgattttatcggcgtcggtgggtagtagcggggaggcgggtatcgagttgtcgtggtgcgggtattcgtcggtcgtcgcgtcgtcgtagtcgtttatgtacgagtggtcgtcgttggaaggtaggtggggtatcgagtggttgggtagggttatgtcgtttacgttgttcggtaagtggtcgtttattatgtttaggtcgttttttagcgttaggttgttgggcgggtacgagaggtcgtcggtcgagttttggaagtcgtaggtgttcgggaggtggttgaagtcgagttcgtttattatgttgtatatgggtttgagcgtttggtatttttttcggaagtcgcgcggtcgtcgtcgaaaggagtttttttcgaatatgaattcgttggtcgggtcgatggtttagtagtggtttttgtcgggtcgtttaaggtttttgggtagtttgatgaagtattcgttgagcgagaggttgtggcgtacggagtttttttagttttggtaggagtttcggaagaaggggaagcggttttgtaggaattggtagatttcgtttagcgttaggcgtttggtgggtgaattttggatggttatgacgatgagcgcgatgtaggaatagggcggttttttcgggcgtcggatgtcggcgttggtttttttggttttggacgggtcggacgacgcggggtttatggtcgcgtcgtttttttcgtcgtcgtcgtcgtcgtcgtcgtgcggtggttgttgtttttcgggcgtcgaagatatcgggtggttgttgtcgtcgtcgtcgttgtcgtcgttgttttgcgtcgcggacgggtcgggaggaggaggaggaggaggaggaagaggacgacgggggggaggagggcgaaggggagggggttgcgcgcgcggggttggttgtatttttgtcgttatcggcggttatttttttcgagcgagtcgcggcgcgttcgttttcgcgttttcgttcgtttttttcgaggagttgttggattcgtcggcggttggtttagagtttttttttttttaattttcgttttttttattttttttttttttttttttttttcgtttttttataaggaaaggagtcgagttgaggtcgagggtagttcgggcgaaggtcgtgaggaagttattttcgtcggtattttttggggggaggtattatttttaggttttacggtcgtgcgttttagtcgggagtagttttgagttttcgtcgttcgcggcgttcggtttcgagatttcgggcgaggtagtttttattttattttcgttcggttgcgtttcgcgggtcggtttaagattttttcggagtttttttttttcgtttttgtttttttcgggttttcgcgttggtgggcgtttaaagagtttttattttcgtcgtttcgcggtcgttagtagaattcgtttcgtttttattaatttggcgagtaagtgttaatgcgtttttcgttcgcggtttagtttcggtgcgcgttggatttcgtttttttcgttcgggcggcgcggcgggaaacgttttttgggtcggggtttttttcgacgcgtatagttttgtagtaaatcgtaagtgcggcggtttttcggtcgtgattatcgtaggtatagtcggttcgatttcggttttcgcggtcggtcggttaagttttcgcgagggatcgtttatttatttttttcgtttcgggaagaattgcgtcgttttcgggatttttcggattcgtttagtagtttgcgagcgggcgggtagtcgtcggggtagagcgtaggcggaaaacgaaagcgtagtacgagtcgcggtcgttttgtttcgggcgtcgcgggtttgacgggggcgagtgagaattcgttggtttagaggcgatttagatcgtataggtttttgaataagcggcgtgtttagttatttattcgtgcgcgtatattttcgcgtttttgtttatatattagtatatatatatatgttttgatgtatatgtaaattcggtaaattacgtaaatagacgtgtaaatatatttatgcgtgtgtgtatatttatatgtagagggcgtttaggtatgtgcgtatttattaatgtattcgttgatacggaagtttaaggtttataggagtttaagttcgtatttatttttatttacgcgtatatacgttacgttcggatttgaatttatacgtagtttagttgtttttttttatttttaatatatattgaaaattcgtttatttggtttcgcggtttcgtttttaaagcgtaggtttcgatttttcgagagatggtaaaggttttggtaggaagtttatagggtttaacgtaaataagttttgggggattttttaataataataatagagaatttcgcgtgcgtagggcgggaggggggagttggtttaatgtttttgtgggttcggtttgtcgtcgtcgcggggtttttgatattgcgcgttaggttaggtttttgagagtagatagcgcgggttgggagcgtcggtaagggcggttttcgcgtatttggttgttagttcgtagggggttcgtacgtagatttgtttttgttattttagcgttcgggtgcgggttgggggcggtggagttacgaaaggtggtgtcgagagcggagcgtaggatagcgtaggagtttcggcgtatcgcggcgcgtatagatttaggtgagtgttgttttcgtagcgattgttggtcgggcgcggtttttttttttagggtttcgagttgagaagaggggggcgaggggtgttttcgcgggttatcgcgaagagtttagaggttaagttttagcgcgagttggggcgagaggcgtgtgtcgggttcgtagtacggttcgcggcgcggcgcgtttaaagtttattcgtttttcggtttttttcggattttttgtttttcgttaattattcgtttttatttttttggttcggacgtttttattttcggcgggagacgtttgtcgttttcggggcgtttggtacgtcggtgagaggagttggggggttcgtcggcgtagtttgtcgggtagtcgtcgtttttttcgttagatttgcgttcgcgggagaagagagtcgttttttcgcgttgttttttcgttggtttttttgggttttcgcgtgtagatagtttggttcgtttagggaaagaatgagtgtgggacgtgattcgtagtgtgtggttgtgtatttacgtaggtaaacgttttttggtagattcgttattattttatataattagtttagttttcgcgtatatagatacgtttcgtatcgtttacggttttaaatattttttttagcga

SEQ ID NO: 318 - DNA, 6181 bp, Artificial Sequence
  chemically treated genomic DNA (Homo sapiens)
ttaatcgttattttatatagtaagtttgggttattagtattttttgttatagtagttgtggattggagttagcgaagtggggatgggaagtaagtggttttaatggatgtagagtagggttaagaggaagagtaaagttggtgaaaaaaggggaataaagtttaatttggatgatatattaggaagttattaggtaagaagggaataagaggatatgttggttacggtttgttttttacgtatgttatttattatattaagatcgatggtttatagttaagtattgttttgttttttttttttatagggtttgttaatatagtatattgttaagggtgagaatgaggtaattaggtttttatttttattttaaattattttaatttatatttttttttttatagggttttaagttttattaaagagtatagtattttttatattagggaaggagtttggttggaggaggtggaagaaatagttttttaagagaagtagaaattataggttaggaagggatagagagattagaagatatatttgcgttaataaggataggagaaaaataagtataggagaaaggggtgttaggagaagatgggttgaagttggatatagggaatagttttaaatttatttttgttatttacggttttttgttattgttttttcggagaatgttataggtaaagttggaaagtgattaaaaaaaaaaaaataaagatacgtatttttatcgggcgcggtggtttatatttgtgatattagtattttgggaggttgaggcgggtggattatttgaagttaggagttcgagattagtttggttaatatggtgaaattttgtttttattaaaaatataaaaattagttgggcgtggtggcgggtatttgtaattttagtttaggaggttgaggtaggagaatcgttcgaatttaggaggcggaggttgtagtgagtcgagatcgagttattgtattttagtttaggtgataagagtaaaatttcgttttaaaaaaaaaaaaatacgtattttttttagtttattttggaattatttttagatttattttagagaattaaaatatagatagataattattttgattaataatattaatatttgaagtgtgttagatgttgtgtttaatttttatatttttttttagtgtttattttagaagagttttgttattttgttagttaattttgagaaggaattttattattttatttttagttagttttcgggtatagagagaatgaggaaaggattttattatagttttatatttttaaaatatataaatatatattaggatgttttttatttgtagagatgatgttttgtgggagtttatagtatttagagttagggaaggattaacgggtgtgggcgttcggaagaaaagaaagacgtatgatttttgaaatttatatagggagaaaggagattgtttattggaagtttaggtgattgggtgtaggggaaaagttgtgtgtggtttcgtagtttaattgggaggaggggataggggcgggaagtggtaggaaatggcgaaagttttaggaatgtttttagtagggaaggttgggtaaacggggttaggaggaatgtttagataagaattttggttagggggaggggaagagatagagaagtagcgattgaattgttttttaaaaaaaaaaaaattaaataataaaaagagtattattatttatttttattttaaattatcgtttttttggtagtagaaaatttttgtttatgttatatttatatgttatatattaataaatttatggttttatttatttatgtttaggaaggtttagagttatttttgggatgaggttggttttgggaagggaaagttaggaagtgaggttgggagtttgagggtaagtttttttttttttttcgtgttaaattttacgtttagtttttttaaatagttttatttttggaggaggttaagaaagaggaaaacggggacgggcgtagtggttaacgtttgtaattttaatatttaaggaggttgataagggtggagtatttgaggttaggagttcgaggttagtttagttaatatggggaaatttcgtttttattaaaaatataaaaattagtcgggcgtggtggtgggcgtttgtaattttagttatttaggaggttgaggtaggagaattatttgaatttaggaggcggaggttgtagtgagtcgagatcgtattattgtattttagtttggacgataagagcgaaatttcgttttaaaaaaaaaaaaaaaaaaaaaaaagatagaaaggaaaacggaaaacggttgtttttaattttattttttatagttagagatgggaattttgattttttatttgggggagtacgagagtgttcggaaaattgattttaaggtttaaaaagagaaaggataggaaaatataagtaggtggagttttagggattgacgataaggttttttagttgatgatttaggttttataaagataaagtttttaagggggcgtggttttttaaggacgcgaattttagatttttgggcggggaggttttttggatagttagacgtggattacggagggggcgtggtttcggaggggcggagttttaataaattcgaatcgttttttgaagagtagggttttgtttttttgggagataggttttttgataggagttagtcgaggatcgttgttaggaggcggagtttcggagaatggaaggagtaacgaagggtttttcgtagtagggtttggaacgtgtcggggggtggggatttttagaaaaattgggcgatagggtggggtcggagataaaaaataaaaattaagtcggggttcgggggagttttttgaagttgggaggtgggattttcggggagaggggttttaggggcgggatttataaatgaagatcggaagtggggtttcgggagaggggtttcggggtgaaagagtgagttatttaaggagaaaaaagttaagatttattagggttttatggagttttcgtatcgtatcgcgggtcgatttggtgtcggattacgttattgttagtttaggttatcgttttaatttttttttcgggttttgtttttttggagaaattttattatatttattttcggttttattaatttttgattttttattttagggttttttttttacgttttttattttttcgagttagttaatggtagcgcgagatcgcgtataaaggtagtggtggttaataagacgtttatttttgatttacgttcgtttttgagaagcgtgagaattgttttttaataaggattcgaagagaagtaaatttaagttaatcggaggtttgaaagtagaggtgtttcgtttcgagttaaacggattaataggaagtgcgggcggcgtgtttgaaagcgaggttaaagtgggtgggagcgcgtgttgttgggagttgtttggaggttggcggcgcggggttgaaggttagtaaatcgagcgattatgtcgtataaataaatttattattcggataaatacgacgacgaggagtttgagtatcggttagtgttggcgcgggagtaatagcgagggtcgtgagttttggtcgttgagggtataaggaattagtaataggaattgaggcgatagaattggcgtatgcgtacgaggtgcgaacgggtaatggtgtgatattgtggaaggcgtaaggcgtatgcgcggaggtgggaggcgttcgtaaaataaagtggttgcgaatttggagtcgttttttagtagagaggagagaggggtgggcgtggttagggtattgattatttttatttatgaggttttttggattattttttgaattttatcgggtaaatttaatttgttttgtagagattgttttatagtaattttgtcgaatttagtgggagaacgtagtaaaagcggagttggaagttttttggcgtttttaataggagagtagcgttgagagagttgaatattgtttattaattcgtgaaaaagataaggggcgtggttgtttggtttgtgtaaggaaggggatcgtttgggattgtaatggaataaaattggttaggagtattgagaaaatatttaatatgggtttaatagatgttttttaaatattaaagggaatagttacggaatatttaataggttttaggtgttttgttaaagtgtaaggataatatatggtttttgttgtttataaatttaaaaatttgtgggtggtatcgatagatattagaaaggtgatatacgttatgtaaggagttattatagggtgtgatgggagtatataagatttgttaaggagagggaattggcgattcgaaggttgcggttttttagttgtgagcgggggttgaggtggggttagaaagttagttttttatttttgttaattttaggacgtttttttattttacgtttcgagaacgtttttcgtttcgttatcgttttggaggttgattttttattttcggtcggtttttttttttgggtttggtttgggggcgggggagtgttttaagggttaatttagcgtgatgttttttttattattattgaaaacgaaattagtagtaaattacgcgtgtttttatttatatgtcggagataaaaatatagggatagaaagaggggaataatagatattggggtttgtttgagggaggagggtgggaggaggtagaggtttaggaaaaaaaaaaattgtcgggtattatgtttagtatttgggtgatgaaataatttgtatatcgaattttcgagttaggattttatttatataataaatttgtatatgtatttttgaatatgaaatttaaaatattgagaggaaaaacggaagagggaatgttggggaaagttttttagagggtagagtttgagatgagattttaagaaaaaggtatgtgggaggaagtattttttgattgaaattgtttagaagatattggatagttatttgttaaggatggtgatgatggaattttggtattggatgtggtattcgggtttgataaattttaagtgtataatttagattgggaataagggaagatataggattttataaatgttggtattatgttaatttgtattaattgtaataattaagattattttttggtttgtattttgtttttttagttggagaatataaaatgaaaatttgttttttttgtgtttttttatttagtttagtttagggttttgggttttttagagaattcgatgtgtattgataaatatataattatttttatgttaagacggttttagatttttttttaattaatttttttttttttagttgtttttttttatatttgaattaaattaatttaaaattgtatgtgtttataagagatttgtggagttgggaaggaattattattttattttttggaagatgaaatttttggtagtggtattttggtttaagaggggttttttggtgtatgtattgaagttaaatttcgtgttagggtggtgttagaatgtgagttatttttattatatttggattagaatttttttttttaggagaatggtggggaattattgttattagtatagagggagaatttagtatatttttattgagtatgacgaagattatgtggattagtttgatttatattagggtaataatttttttgttatgaagggagatttatttttggttagaaaagtacggaatttatttagaaagttttaaggtatatttttttagagttaggaaaataagatttaggatagatttaattttttttttaagagataaggttttgttttgttgtttagattggagtgtagtggttatttataggtataattattgtgtattgtagttttttttttttttttattttttttttttttttttgagacggaattttattttatcgtttagattttagtttattgtaattttcgttttttggatttaagggatttttttttgttttaattttttaaatagttgggattataggtgtatgttattatattcggttaatttttgtatttttagtagagacggggttttacgttgttggttaggttggtttttaatttttgattttaagtgatttatttattttagttttttaaagtgttgggattataggtatgagttatcgtttttgg

SEQ ID NO: 319 - DNA, 6181 bp, Artificial Sequence
  chemically treated genomic DNA (Homo sapiens)
ttaggggcggtggtttatgtttgtaattttagtattttgggaggttgaggtgggtggattatttgaggttaggagttggagattagtttgattaataacgtgaaatttcgtttttattaaaaatataaaaattagtcgggtgtggtggtatgtatttgtaattttagttatttgggaggttgaggtaggagagaattttttgaatttaggaggcggaggttgtagtgagttgagatttgggcgatagagtgagatttcgttttaaaaaaagagaaaaaaaataagaaaaaagaaagggttgtaatgtataatggttgtgtttgtgaatagttattgtattttagtttgggtaataaagtaagattttgttttttaaaaaaaaaattaaatttattttgaattttatttttttaattttggagggatgtattttgagattttttgggtaaatttcgtgtttttttaattaaggataagtttttttttatagtaaaaaaattattattttgatgtgaattaaattaatttatatagttttcgttatgtttaatgaaaatgtattaagttttttttttgtgttagtaatagtgattttttattatttttttaaaagaaaaaattttagtttaaatataatgaaaatagtttatattttaatattattttggtacgaaatttggttttaatatatatattaaaaaattttttttaaattaaagtgttattgttaagagttttattttttaggggatgaaatggtgatttttttttagttttataaattttttataagtatatatagttttaagttagtttagtttagatgtagaggaaaatagttgaggaaaagaaagttaattaaaggagggtttggagtcgttttggtataaagatgattatgtatttgttaatgtatatcgagttttttggaagatttaaagttttgaattaggttgggtgaagagatataagaaaagtaagtttttattttatgttttttaattgaggagataagatataaattaggaagtggttttaattattataattaatatagattagtataatgttaatatttgtggaattttgtgtttttttttatttttaatttagattatgtatttaaaatttattaagttcgaatgttatatttagtgttaggattttattattattatttttggtagatggttatttagtgttttttaaataattttagttaagaggtgtttttttttatatattttttttttagagttttattttaggttttgttttttaggaagttttttttaatattttttttttcgtttttttttttagtattttaagttttatgtttaagggtatatgtgtaggtttgttatataggtaaaattttgattcgggggttcggtgtataggttattttattatttaggtattaagtatagtattcgatagttttttttttttttgaatttttatttttttttattttttttttttaagtaggttttaatgtttgttgtttttttttttttgtttttgtgtttttattttcgatatataaatgaaaatacgcgtagtttattattggtttcgtttttaatggtggtgaaagagatattacgttgaattggtttttaggatattttttcgtttttaaattaagtttagggaagaagatcgatcgaaagtaagaggttagtttttaaggcggtggcggggcggggggcgttttcgaagcgtgggatgggggagcgttttggagttagtaaaagtaggggattgattttttagttttattttaattttcgtttatagttaggaagtcgtagttttcgggtcgttagttttttttttttagtaagttttgtgtgtttttattatattttgtaatggttttttgtatagcgtgtgttatttttttggtgtttgtcggtattatttatagatttttaaatttgtgaatagtagagattatgtgttatttttgtattttagtagaatatttgaaatttgttaagtatttcgtaattgttttttttgatatttaaagggtatttattagatttatattaagtatttttttaatgtttttagttagttttattttattgtagttttaagcgatttttttttttatataagttagataattacgttttttgttttttttacgagttaataagtaatatttaatttttttagcgttatttttttgttagggacgttaggaaatttttagtttcgtttttgttacgtttttttattggattcgataagattattgtgaaatagtttttataaggtaagttaagtttgttcgataaagtttagagaatgatttagaaagttttatgggtgagggtggttagtattttaattacgtttattttttttttttttttattgagaggcgattttaaattcgtaattattttgttttacgagcgttttttattttcgcgtatgcgttttacgttttttataatattatattattgttcgttcgtatttcgtacgtatgcgttaattttatcgttttagtttttgttattaattttttgtgtttttagcggttaaagtttacgattttcgttattgttttcgcgttagtattaatcgatatttaaatttttcgtcgtcgtatttgttcgaatagtaaatttgtttgtgcgatatgatcgttcggtttgttagtttttagtttcgcgtcgttaatttttaagtaatttttaatagtacgcgtttttatttattttggtttcgtttttaaatacgtcgttcgtattttttattggttcgtttggttcgaggcgggatatttttatttttaagttttcgattggtttagatttattttttttcggatttttattggagggtagtttttacgttttttaagaacgagcgtgggttaaaagtaggcgttttattggttattattgtttttgtgcgcgatttcgcgttgttattggttaattcgggaaagtgggaagcgtgaaggagggattttgaggtagagggttaggggttagtgaggtcggaagtgagtgtaataaagtttttttagggaggtagggttcggggagaaagttggagcggtaatttaagttggtagtggcgtgattcggtattaaatcggttcgcggtgcggtgcggagattttatgaggttttggtgagttttgatttttttttttttaggtgatttatttttttatttcggaatttttttttcgggattttattttcggtttttatttataagtttcgtttttgagattttttttttcggaagttttattttttaattttagggggttttttcgaatttcgatttgatttttattttttgttttcgattttattttgtcgtttagtttttttggaagtttttatttttcgatacgttttaagttttattacgagaaatttttcgttattttttttatttttcgaaatttcgttttttagtaacgattttcggttaatttttgttaaaaggtttattttttaaaagggtaaaattttgttttttaaagaacgattcgaatttgttgaagtttcgttttttcgaagttacgtttttttcgtaatttacgtttgattgtttagaaagttttttcgtttagaagtttgaagttcgcgtttttaggggattacgtttttttaggagttttatttttgtgggatttgggttattagttgaaaagttttgtcgttaatttttgaaattttatttgtttatatttttttgttttttttttttttgggttttgggattagtttttcgagtattttcgtgtttttttaggtgggaagttaaagtttttatttttggttgtaaggagtgagattaaaggtagtcgtttttcgtttttttttttattttttttttttttttttttttttttaagacggagtttcgtttttatcgtttaggttggagtgtaatggtgcgatttcggtttattgtaattttcgttttttgagtttaagtgatttttttgttttagttttttgagtagttgggattataggcgtttattattacgttcggttaatttttgtatttttagtagagacggggtttttttatgttggttaggttagtttcgaatttttgattttaggtgttttatttttattagtttttttaagtgttaggattataggcgttagttattgcgttcgttttcgttttttttttttttaattttttttaagggtagaattatttgaaagggttgaacgtggggtttggtacgagagggagagagagatttgtttttagatttttagttttattttttggttttttttttttaggattaattttattttagaagtagttttaggtttttttagatataagtggataagattatggatttgttggtgtgtggtatgtgggtgtgatatgagtaaaagttttttattattagaagaacggtagtttggagtgggggtagataatagtgttttttttgttgtttgatttttttttttttaagggatagtttagtcgttatttttttgtttttttttttttttttaattagagtttttgtttgggtattttttttggtttcgtttgtttagttttttttgttggaaatatttttgaggttttcgttattttttgttatttttcgtttttgttttttttttttagttgggttgcgaagttatatatagttttttttttatatttaattatttggatttttagtaggtaattttttttttttttatgtaaattttaagagttatacgttttttttttttttcgaacgtttatattcgttggtttttttttggttttggatattgtaggtttttatagaatattatttttatagatgagggatattttagtgtgtgtttgtgtgttttgggggtgtgaggttatggtggaattttttttttattttttttatgttcgagagttggttggaaatgaagtgataaaatttttttttaggattggttggtagagtgataaagtttttttggaatgagtattaaggggagatgtaagagttaagtatagtatttaatatattttaagtgttaatgttgttaattaggataattatttatttatattttaattttttgaagtaaatttaagggtaattttaaggtgagttggggggaatacgtatttttttttttttgagacggagttttgtttttgttatttaggttggagtgtaatggttcgatttcggtttattgtaattttcgttttttgggttcgagcgatttttttgttttagttttttgagttgggattataggtgttcgttattacgtttagttaatttttgtatttttagtagagatagggttttattatgttgattaggttggtttcgaatttttgattttaggtgatttattcgttttagttttttaaagtgttggtattataggtgtgagttatcgcgttcggtaggaatacgtatttttgtttttttttttttggttattttttagttttgtttgtggtatttttcggaagagtagtggtaggaagtcgtgggtggtaggaatgggtttgggattgttttttgtgtttagttttaatttatttttttttgatattttttttttttgtatttattttttttttgtttttattgacgtagatgtgttttttgatttttttgtttttttttggtttgtagtttttattttttttggagaattgttttttttattttttttagttaggttttttttttggtgtgaaggatgttgtgttttttggtggggtttagggttttgtaagaggagggatgtgaattggggtggtttggagtgggagtggggatttgattgttttatttttatttttgatagtgtgttgtgttaataagttttgtggaaaggggagataggatagtgtttggttatgagttatcggttttggtgtggtagatggtatacgtagagaataagtcgtgattagtatgtttttttgttttttttttgtttggtagttttttgatgtattatttaggttgaattttatttttttttttttattagttttgtttttttttttggttttgttttgtatttattgggattatttattttttatttttatttcgttagttttagtttatagttgttgtagtagaggatgttaatggtttaggtttattgtatggggtagcggttgg

SEQ ID NO: 320 - DNA, 6181 bp, Artificial Sequence; identical to SEQ ID NO: 318
  chemically treated genomic DNA (Homo sapiens)

SEQ ID NO: 321 - DNA, 6181 bp, Artificial Sequence; identical to SEQ ID NO: 319
  chemically treated genomic DNA (Homo sapiens)

SEQ ID NO: 322 - DNA, 6000 bp, Artificial Sequence
  chemically treated genomic DNA (Homo sapiens)
ttaaataagtaatgtttttgtttttgatttttgtgttattttttaataaggaagggaagtattatgtaggggggtggggggtcgggggaggtattttagttttagaatattttaattttttttaaatatttaatttttattggttttattgtttattttttaaggtttgaggtgggaaaggttgtaattttagggaaaagagatatttttttaaatttaaatttttgatggtttttagaggtaggaaaatatataatgttaagtagagaaatgagtaagaaagagggatgggagtagaaaattttatttagttagagagagatgtaatttggaggtttcggattataattttattatgagtaaataagaaaagttggttttgcggtaagtagggttttaaaagtttttttttttgggttataggaaatagaagaatagtaggaagtgggaagtagaggtatataggttattttttttttgaattttttaatttaagtgtaggaagagtagttttttttttttaattttaatttaagagttgttttatattttttttatttgtttatttgttatgaggggtgattagtttgggtgggtttttgaggtattgtttgaagcgtaattcgaaggtttggttaatggtgttgatgatattttgggtaagtttttcgggatattttagaatgtggtaggttgagggtatagtagaggttgttagtgagttgagtttattgggaggaggtatagataggggtttttatttttttttgtaggaatttttattgagatttatttagagtgggtatagatgattaaaggttttatttatttttttaaatagttagatttatttagtgttttttattatgttttatttttttgatttatagggtttttggtaatataggcgatatattcggttgtgttttggggaggaaggttaaaaaattttatagttttattttatttttgatttttaaaatttagttttttttagatatttttataattttagtatttttatttttttaattaatgtttttttaatttttagttttttgttttttttttatcgtttttgttttgttttttaatttatcggattttcgtcggatgtaaatgagatagattgtatgtggtggttggcgatgatttgagaattagggtaggggatgaagaaggaagggaatgttatgtgttaggtagttttagggtttagaattttggtgttttagttttattttttgggttttttattttatatttttattttttttttttttattggttttttgtttttaagttttttttttagattttggttttttaattagatttttttttagtatttttattagtgtttttggttcgtttgtttatttttattaatttgtttgtagtttgcggttatgaggttgaggttgttggtggagacggtgagagtgattggtattttagtaaattttaggttatttttttttaggatagagttgagcgggcggttatagggttaaggtagggtttagggttttagaaggtgagggtttttagtataggtaaattatatttttgttttttggttttttttttatatgttttatatttgtttttttattgtttttttatattttttagtagtatttttatttttaaggattttaagtattttttttttttttgtcgtttttttagtattcggtatagttttatatattagattgatggtttttttggggaaagaggggtatttagatttagcgtttgtttgtttgttttttatttaattggggttgttatagggttgggggaggggaaagttaggttagatttttagggtattttaggttttttgttatggtggattgaattaagggtttttaatatttgatgatattgagaggttattttttggttgattgggttagggttttaatgggtatagttttatttttttttagttattaaatgttttattttttttttaaaggtagtagtaattttttatttattttttttttttattttagttttatttgttagttgtttttgttattttttttataatttttaaggttggataggtaaggaggattcgggttaaaggggtttttttttagtaagaggcggaattattattttagtttttttttaattttttttattacgtaaagattagtttttagtagtagtatttaagtgatttattttttttttttgttttttatggttttattaattttaggatttttataatttattttttttttattaatttggtgatttgagttcgggtgttgaagtttagggtacgtattgattggaggatttttatataatttatgtattaaggggagggagaagaggatagtaggttagcggtttttttattttagtttttttataaagggttttaggattttatttatatggtttttaagggaagtaaagaggaagaagttttgtttatttttcgtggttatattttataattaaggtgaaagataatagggaatgaggagaaaaagaaaaggtaggttagaaggattttatatattggggagagagtttggaggggatcgataggtattggttgggatggagtgataattttagaaagcgggaggagaatggaggaaagattaagaagttatttattttaatatttattaagagtttttgttatgttgggtattgtgttaagtatgttagggtgggggtgggggagtgaaaagaaggaagggggtttaggtaaagttggaagggaaggggttatagaatcggggaagggatgagaaaggtttaggaaataggatattgaaacggggttgttggggaatagtaggaaaaaagagatttcggttaagttggagtgagtattagaattggagggggtttgcgggggaatggagaggaggatgtttatttattcgaattaagtaggaaatttcgggttttatgattttgtcgttgggatgtagttagtttcgcgtgggtttattgataaagttttcgtggcgggtttatttttcgtttttaagttggtttttttttattcgagttttgcgttcgtcgtttttatttagtttgtttatgttttggaggaggggtagggggtttgagtttggtatggttgtttttacgattttttttttattattagttgttttttttggtttttttttagattttgggcgttttttagtcgggttggttagttttaggttgtttattcgggggaagaaggagtatagggtagtgggattatcgtttttaggtagaggaggtaggatgggttttagggatgaagttgatggggaaggtagttttttcgggggggtggatttagaagtttttttttttagcgatgatagagatttatttcggagtggattgtatttgggtttggggggtaggagatttatagttgaggtgaaagaggggttgttgtttagtttggtttttttgttagtttgggtaagggggttaggtagggggtatttttaggtttttagtttggttggatttttgtggtttaggagttatagaagttttggggagggagagggataagtggttttcgttttttagtttagatttagatagttttaggttttattttcgtttaacgtggagttttttttttggttgagaagagaataggttggatttagcgtttttggtttttttttaggggcggggagttaaggggagagattaatcgtgaggatagtgttgatttataggtttagaggggttgagtttttatttcgttttaatttcgaattggagtagggggtagggttatttaagttttttttttttgttttatataaataattagtaatttggggagaagtaaagtgggggtgggagggaaggatggaagagtgggacggaaaggaaggagataggaggtttgggttatttaaaatcggatatacgtaggttaaagggggtaggaagttaggtaggagtataggggaatgagggaggaaatagaggtagttgggggtggaaaagggaggagattttagagtttagtatttttttttttgttttggttggatattcgaatttttttattttttttatgttcgaaagttggttggttttagtttaggttatttttaatcgttattttatatagtaagtttgggttattagtattttttgttatagtagttgtggattggagttagcgaagtggggatgggaagtaagtggttttaatggatgtagagtagggttaagaggaagagtaaagttggtgaaaaaaggggaataaagtttaatttggatgatatattaggaagttattaggtaagaagggaataagaggatatgttggttacggtttgttttttacgtatgttatttattatattaagatcgatggtttatagttaagtattgttttgttttttttttttatagggtttgttaatatagtatattgttaagggtgagaatgaggtaattaggtttttatttttattttaaattattttaatttatatttttttttttatagggttttaagttttattaaagagtatagtattttttatattagggaaggagtttggttggaggaggtggaagaaatagttttttaagagaagtagaaattataggttaggaagggatagagagattagaagatatatttgcgttaataaggataggagaaaaataagtataggagaaaggggtgttaggagaagatgggttgaagttggatatagggaatagttttaaatttatttttgttatttacggttttttgttattgttttttcggagaatgttataggtaaagttggaaagtgattaaaaaaaaaaaaataaagatacgtatttttatcgggcgcggtggtttatatttgtgatattagtattttgggaggttgaggcgggtggattatttgaagttaggagttcgagattagtttggttaatatggtgaaattttgtttttattaaaaatataaaaattagttgggcgtggtggcgggtatttgtaattttagtttaggaggttgaggtaggagaatcgttcgaatttaggaggcggaggttgtagtgagtcgagatcgagttattgtattttagtttaggtgataagagtaaaatttcgttttaaaaaaaaaaaaatacgtattttttttagtttattttggaattatttttagatttattttagagaattaaaatatagatagataattattttgattaataatattaatatttgaagtgtgttagatgttgtgtttaatttttatatttttttttagtgtttattttagaagagttttgttattttgttagttaattttgagaaggaattttattattttatttttagttagttttcgggtatagagagaatgaggaaaggattttattatagttttatatttttaaaatatataaatatatattaggatgttttttatttgtagagatgatgttttgtgggagtttatagtatttagagttagggaaggattaacgggtgtgggcgttcggaagaaaagaaagacgtatgatttttgaaatttatatagggagaaaggagattgtttattggaagtttaggtgattgggtgtaggggaaaagttgtgtgtggtttcgtagtttaattgggaggaggggataggggcgggaagtggtaggaaatggcgaaagttttaggaatgtttttagtagggaaggttgggtaaacggggttaggaggaatgtttagataagaattttggttagggggaggggaagagatagagaagtagcgattgaattgttttttaaaaaaaaaaaaattaaataataaaaagagtattattatttatttttattttaaattatcgtttttttggtagtagaaaatttttgtttatgttatatttatatgttatatattaataaatttatggttttatttatttatgtttaggaaggtttagagttatttttgggatgaggttggttttgggaag

SEQ ID NO: 323 - DNA, 6000 bp, Artificial Sequence
  chemically treated genomic DNA (Homo sapiens)
ttttttaggattaattttattttagaagtagttttaggtttttttagatataagtggataagattatggatttgttggtgtgtggtatgtgggtgtgatatgagtaaaagttttttattattagaagaacggtagtttggagtgggggtagataatagtgttttttttgttgtttgatttttttttttttaagggatagtttagtcgttatttttttgtttttttttttttttttaattagagtttttgtttgggtattttttttggtttcgtttgtttagttttttttgttggaaatatttttgaggttttcgttattttttgttatttttcgtttttgttttttttttttagttgggttgcgaagttatatatagttttttttttatatttaattatttggatttttagtaggtaattttttttttttttatgtaaattttaagagttatacgttttttttttttttcgaacgtttatattcgttggtttttttttggttttggatattgtaggtttttatagaatattatttttatagatgagggatattttagtgtgtgtttgtgtgttttgggggtgtgaggttatggtggaattttttttttattttttttatgttcgagagttggttggaaatgaagtgataaaatttttttttaggattggttggtagagtgataaagtttttttggaatgagtattaaggggagatgtaagagttaagtatagtatttaatatattttaagtgttaatgttgttaattaggataattatttatttatattttaattttttgaagtaaatttaagggtaattttaaggtgagttggggggaatacgtatttttttttttttgagacggagttttgtttttgttatttaggttggagtgtaatggttcgatttcggtttattgtaattttcgttttttgggttcgagcgatttttttgttttagttttttgagttgggattataggtgttcgttattacgtttagttaatttttgtatttttagtagagatagggttttattatgttgattaggttggtttcgaatttttgattttaggtgatttattcgttttagttttttaaagtgttggtattataggtgtgagttatcgcgttcggtaggaatacgtatttttgtttttttttttttggttattttttagttttgtttgtggtatttttcggaagagtagtggtaggaagtcgtgggtggtaggaatgggtttgggattgttttttgtgtttagttttaatttatttttttttgatattttttttttttgtatttattttttttttgtttttattgacgtagatgtgttttttgatttttttgtttttttttggtttgtagtttttattttttttggagaattgttttttttattttttttagttaggttttttttttggtgtgaaggatgttgtgttttttggtggggtttagggttttgtaagaggagggatgtgaattggggtggtttggagtgggagtggggatttgattgttttatttttatttttgatagtgtgttgtgttaataagttttgtggaaaggggagataggatagtgtttggttatgagttatcggttttggtgtggtagatggtatacgtagagaataagtcgtgattagtatgtttttttgttttttttttgtttggtagttttttgatgtattatttaggttgaattttatttttttttttttattagttttgtttttttttttggttttgttttgtatttattgggattatttattttttatttttatttcgttagttttagtttatagttgttgtagtagaggatgttaatggtttaggtttattgtatggggtagcggttgggggtggtttgggttggggttagttagttttcgggtatagagagggtgggggaattcgagtgtttaattaggataggaagggaaatgttgagttttgagatttttttttttttttatttttagttgtttttgtttttttttttatttttttgtatttttgtttggttttttgttttttttggtttgcgtgtgttcggttttgagtgatttagattttttatttttttttttttcgttttatttttttattttttttttttatttttattttatttttttttagattattagttgtttgtatagggtaggggagaggggtttggatagttttattttttgttttagttcgaggttggggcggggtgggggtttagtttttttgagtttgtgagttagtattgtttttacgattggtttttttttttagtttttcgtttttggggaggagttagaagcgttgggtttagtttgttttttttttagttagagaagaggttttacgttgggcggggatggggtttgaaattgtttgggtttgagttggggagcggaagttatttgtttttttttttttttaggatttttgtgatttttgggttatagaggtttaattaggttaagggtttggggatattttttgtttggtttttttgtttaaattggtaggggggttaggttgggtagtagttttttttttattttaattatggattttttgttttttaagtttaagtataatttatttcggaatgagtttttgttatcgttggaggaaggggtttttgggtttattttttcggaggagttgttttttttattagttttatttttggggtttattttgttttttttgtttggggacgatagttttattattttgtgtttttttttttttcggatgagtaatttgaggttggttaattcggttggggggcgtttagggtttaagggggagttaggaagggtagttgatgatggggaggggatcgtaggggtagttatgttagatttaggttttttattttttttttaggatatgaataagttgagtggaggcggcgggcgtaggattcgggtggaagggggttagtttgggggcgaggagtggattcgttacgggagttttgttaataagtttacgcggggttggttgtattttaacgataaagttatgggattcggggttttttatttggttcgggtgagtgaatatttttttttttattttttcgtagattttttttagttttaatgtttattttagtttggtcggaatttttttttttttgttgttttttaataatttcgttttagtgttttattttttaaattttttttatttttttttcgattttgtagtttttttttttttagttttgtttgggtttttttttttttttttatttttttatttttattttggtatgtttagtataatgtttagtatggtagaagtttttaataagtgttggaatgaatgattttttgattttttttttatttttttttcgttttttggagttgttattttattttagttaatgtttgtcggttttttttaaattttttttttagtgtgtgaggtttttttagtttgttttttttttttttttttattttttgttgttttttattttggttgtgggatgtagttacgggaagtgggtagaatttttttttttttattttttttagggattatatgggtaaagttttagggttttttgtgaaggggttggggtgggggagtcgttgatttgttgtttttttttttttttttttagtatatgggttgtgtggaggttttttagttaatgcgtgttttggattttaatattcggatttaggttattaggttagtggggagggagtggattgtgggagttttgggattagtgaggttatgggaaatagaggaggggagtgggttatttgggtgttgttgttgggggttgatttttgcgtagtaaaggggattgagagaaagttgaggtagtgatttcgttttttattgaaaggaggtttttttggttcggattttttttatttatttagttttgggagttgtggggaaggtggtagaagtagttggtaggtggagttggagtagaaaaggggggtagatggaaggttgttgttgtttttgggaagggaatgggatatttggtagttggaagggggtggggttatatttattgaggttttaatttaattagttaggaagtggttttttagtgttattaaatattaaaggtttttaatttaatttattatgataaagagtttggagtgttttgggagtttggtttggttttttttttttttagttttgtggtagttttagttgagtgggaggtaggtaggtaggcgttgggtttgagtatttttttttttttagggaggttattagtttggtgtgtgaggttgtgtcgggtgttaagggggcgataaggaggagaaaggtatttggggtttttggggatagggatgttgttgggaaatgtggaggggtagtggggaggtaagtgtggggtatgtggggagagggttaggaggtaaaagtgtggtttgtttgtgttgggaatttttattttttgagattttgggttttattttagttttgtagtcgttcgtttagttttattttggggaggagtaatttgaaatttgttggaatgttaattatttttatcgtttttattagtagttttaattttatggtcgtagattgtaaataggttggtgaaggtgggtagacggattagaaatattgatgggggtgttaaggggagatttagttaggaggttaaaatttaggaagagggtttgagagtaggagattagtagggaaggaggaaatgaggatatgggataaggaatttagagaatgagattggggtattagggttttgggttttgaggttgtttgatatatggtatttttttttttttttattttttgttttaatttttagattatcgttaattattatatgtaatttattttatttgtattcggcggggattcggtgagttggggaatagagtaaaggcggtgggagaagagtaaggggttagggattgggaagatattgattagagaagtgggggtgttaggattgtggggatatttgaaaaggattgggttttaggggttaggagtaaagtagaattgtaaaattttttgatttttttttttaggatatagtcgagtatgtcgtttatgttgttaaagattttgtgaattagagaggtgaggtatggtggggagtattgggtgggtttggttgtttgaggaggtgagtaggatttttggttatttgtatttattttaagtagattttagtgggggtttttgtagaggaagatgagggtttttgtttgtgtttttttttagtgggtttagtttattgatagtttttgttgtgtttttagtttgttatattttggagtgtttcgaagggtttgtttaggatgttattagtattattggttaggttttcgagttgcgttttaaataatattttaggaatttatttaaattggttattttttatgataggtgagtaggtggggagagtgtggagtagtttttggattaggattaggaaaggagggttgttttttttatatttgagttgagaggtttagggagggaataatttgtgtgtttttgttttttattttttgttatttttttgttttttgtggtttaggaggaaagatttttgaggttttgtttgtcgtaggattagttttttttgtttgtttatggtggagttgtagttcggggtttttaagttatatttttttttggttaggtgggattttttatttttattttttttttttgtttatttttttgtttggtattatgtgtttttttgtttttagaagttattaagaatttgggtttgggaggatattttttttttttgagattataattttttttattttaggttttgagggataagtagtggagttagtagggattgaatatttaggagaggttaaaatattttggagttggagtgtttttttcggttttttatttttttatatggtgttttttttttttgttgggagatagtatagagattaagagtaagagtattatttatttga

SEQ ID NO: 324 - DNA, 6200 bp, Artificial Sequence
  chemically treated genomic DNA (Homo sapiens)
ttttttgtttgtttattgtttttttattttcgtttatttttaggtttggggtatttacgttaagatgtcgggtgttttattgttattttttattattttttggttaggggtagttaaggagagaataggtaggttgaatgcgaatagggatgatttttttatttttaaatttttttatagacggttatttttttagtttagtttttttttttttgcgttagttatttgtgggttggatattggagcggtttatgaggataagtgtagatggggtgataggtttttttcggaggattcgttggggtagggtgtttaggttagatggagtttgagaaggagtagggggtagttttgagggtgtttttgtttgatgatcggggtggaatgtgttgtaagtagtattttagttttttgttaaagagttatttatttatttatttttaatttaaagagaaatattgatgtgatagttttgttttttagtttttgtttatagttttatattaaaatgggttattaataaataatttagggttgggcgtagtggttttcgtagttaggagtttaagattagtttggttaatatggtgaaacgttatttttattaaaaatataaaaaattagttgggtgcggttgggcgtggtggtttatgtttgtaattttagtattttggaaggtcgaggtaggcggattataaggttaggagtttgagattagtttggttaatatagtgaaattttatttttattaaaaatataaaaattagttggtcgtggtggtacgtttttgtaattttagttatttaggaggttgaggtaggagaatcgtttgaatttgggaggtataggttgtagtgagtcgagatcgtattattgtattttagtttgggtaatagagttagattttattttaaaaaaaaaaaaaaaaattagttaggtgtggtggtaggcgtttgtaattttagttattcgggaggttgaggtaggagaatcgtttgaatttgggcggtagaggttgtagtgagttgagatcgtattattgtattttagtttgggtaatatagtgaggtttcgttttaaaaaataaataaataaataaataaataaataaataaataaaaaataaataatttaagtaggtttaagataaggggtaaaggatttatattaatatttaatattttatttttttggttttggtttatattttttaggtatgaagttgtttaatttgtataagttttgtttataataatatagttatttatttagttttttatttatattatagtagagagttgcgttaatgaatatttataatttaaggggtttagtatagaggtatttttaaagttttttaaaaagtttagtttattaaggtttagataagatgtttgaggttttgaatgttatagtaataattaggatttatatttttgtaagaataggttttaaggatattaagagttattttgatggttttggattattttttatttttaatttttttatttttttttttttttgagatggagtttcgttttattatttaggttggagtgtaatggtgttatttcggtttattgtaatttttattttttaggtttaggtaatttttttgtttcggttttttgagtaggtgggattataggtatatgtttggttaatttttgtatttttagtagagacggggttttattatgttggttaggttggtttcgaatttttgattttaggtgatttatttgttttagttttttagtgttgggattataggcgtgagttatttatttggttttatttttaatttttaaaataataggtatatttttttttaggagtgattaaggtaaaagtgataatggttttttatttagattttatttttgatagttttatttagtgttttatgagggagggagttgatgtataagggaatagatagattttttaggaagtaagagttttaaaaatagggagtaaagtttgtgtagggtttttttttttttttgtagttaagagaagaaagtttttaggttttaaatagtgatattggtattaatttataaataagtaagttgaataaaatatagtttagaaatagatttatatatatgtgggaatttatatatataataaaggtggtattttaaattagagaggaggttttttaatgaaatttgtttggattattgggaaataagttaatttagatttatttagatttttattttaatttagttattaattttaaattgtaatttagatttgttttgggttttttaaattgtaattttatatttttttagagtttatttttatttgttgtttagtttttttttttttaggatatggattgggaattatggtttgaaggttaggttttgtttgtttagttttagatattatttgtatgtgacgagttttgtagaggtttttattagttgggagttattggttggttagatttacgttggtagtatttgataggatgtggttataaatgattagagcgggttttgtcgttaaatttgggattcgtattttggagtataacggggaagaaagtgtttaaaggattgtttattgtaggattttaagttttttagtaggaattcgttatgcggggttatgggggcgtagggacggagggaagggttttatcgtttgtcggtcgtagggttaggggtaggagttttttttttgggttatttttagagagaaagggggaggagagttgggcggagaagggaaatagtcgtgagaagtagagaaaaagagagagagagggaggggttggatcgatcgagtcggaagcgttagttcgagttggtaaaagggagtaggttagtatattagttttaatttgggcgttggttttatcgttttcgttttgttatcgtttttatttttttttagttttgcggcgtgcgcgtaggttagtttaacggattttttgatttatttgattatttgtttattttcggcgtaaggtttgcgataggaggttagtttatttggggtttaaggtattgttattttttcggtcgttcgtaaataattgaatttgttacgtcgcgttttggttaaggattttttaaatttttcgtttcggttttattgggtaagttcgtcgtttatgtttagtttttattggttcgatgttttgtgacgtaagttatgggaatttaatggaagaggcggaatgagaagggtttacgtttggtttttagtttaggaaagtttttttaaatttttttagtgaattattttgtttttttttttttttttttttttttttttttgagataggtttttttttgtcgtttaggttggagtataatggtgttatttgggtttgttgtaatttttgtttttcgggtttaagcgattttcgtgttttagttattcgagtagttgggattataagcgttcgttattacgtttggttaatttttgtatttttattagagacgggttttcgttgtgttggttaatttggtttcgaatttttgtttttaggtgatttattcgtttcggttttttaaaatgttgggattataggcgtgagttatcgtgttcggtttttttttttttataaaaaaaattaaatttttaatgtaattggagtttatttttatgtatgtatgagttggggtttaatttttttgttcgatggagcgttagttatgttaatattatttgttaaataaattgttttaatagaatttaaatgttgtttttgatatataatgttagtatatttatttgtgtttatttttagattttgtatttcgttgtttgtttatttgtttgtgtgtttatttttgtgttattattatgtcgtttttaaaagttttgatatttttgggaggagtttttttattaatagatttttcgttgtaagatttttgttagttgtcgtgttgtttgggtttatttttatttttttttttttttgttatattttttttttttttgttttttttaatttttagattttattattgggttaaataaatatatttttgggttttttatgaaataattagtggatatttattaagtatgtattgtttagtatttttttttttttttttaatattttattttttttttaggggattatttgtttttttagtttatgtagtcggtttttgtagtagtttttgttgttgataattttaaatttttaggttgatgaagatttatttaaattttatttttttttttttttttgagatgaagattcgttgtgttgtttaggttggagtgtaatggtataattttagtttattataatttttttttttagggtgtaattgatttttttgttttagtttttcgagtatttaggattataggtgtatgtgattacgttcggttaatttttgtatttttagtagagacggggttttattatattgtttaggttggttttaggtgattcgttcgttttggttttttaaagtgtttggattataggcgtgagttattgcgtttagttttatttttatttttgaaagtatttagagttttgaggatttgagaaggaaattgattttattgtaggtttagaaatgagttttaattaatttatattaattaatattttttattttagattatggttattggattaggtataagtttgtgatttaagtgggttagttagtgggaattagttttttgtttagaatgttgggtagtttaaggaaatatttaacgtttattggtttattataaagtgtattataaatgatatagatgaaaagatgtatagggtaaggtatggaggaagagatttttggaagtgagtagggaagtatgtagtttttattgttgtttttagtgttattgaaggaagtagtttgatattgaagtttaatattgtagaaggtagaagagaggtttggaaagaattttaggatttgatgatattgttgagtttttatatgtttacgttagtattttttttatatgaataatagagaagattattatttagttaatattttttttgaatgtattttaaatgttatttgttgtttaagtatattgtgtagaaaaaataaattatggttaggtttggcggtttacgtttgtaattttagtattttgggaggttaaggcggttgtattatttgagtttaggagtttaagattagtttgggtaatttgtgaaatttcgtttttataaataaaaaaaaaaaaaattagttagtatggtagtgtgtgtttttagtttaagttatttgataggttgaggtaggaggattagtagaggtcggaggttaaggttgtggtgagttatgattgtattattgtattttagtttcgatattagagtgatattttgttttaataaaaataaaaaatgggtagggcgtagtggtttatgtttgtaattttagtattttaggagtttaaggagggtggattgtttgagtttaggagtttaagattattttgggtaatatggtgaaatttcgttattattaaaatataaaaaattagttagttttggttaggcgcggtggtttatgtttgtaattttagtattttggtaggttgaagtgggtggattacgaggttaggagttcgagattagtttggttaatatagtgaaattcgtttttattaaaaatataaaaattagttggatgtggtggtaggcgtttgtaattttaattatttgggaggttgaggaaagagaatcgtttgaatttgggaggcggaggttgtagggagttgagatcgtattattgtattttagtttgggtgatagagttagatttcgtttcgaaaaaaaaaaaaaaattagttagttgcggtggcgggtgtttatagttttagttatttaggaggttgagtgaggtataagaattgtttgaatttgggagtgttgtagtgagtcgagattacgttattgtattttagtttgagtaatatagtaagagtttgtttaaaaaaaataaaaataaaaaaagatttaattttttttttgtttttatattatagtaattaatataggagatttttgcgattatatgtgtggagattttattgtattattaagtaattagttttgtaattaagtaatttgttttgtagtagatattagttgggtgtttttcgattagattttgatattatttatttagagagagtattagattttataggttgagggtttagtt

SEQ ID NO: 325 - DNA, 6200 bp, Artificial Sequence
  chemically treated genomic DNA (Homo sapiens)
gattgagtttttaatttatgggatttgatgttttttttgggtagatagtgttagaatttaatcggaagatatttagttgatgtttgttgtagaatagattgtttgattgtagaattgattgtttggtggtgtagtaaaatttttatatatgtggtcgtagaagttttttgtgttgattgttgtggtgtgagggtagaggaaaaattgggtttttttttgtttttgttttttttagatagatttttgttgtgttgtttaggttggagtgtagtggcgtgatttcggtttattgtaatatttttaggtttaagtaatttttgtgttttatttagttttttgagtagttgggattataggtattcgttatcgtaattggttaatttttttttttttttcgagacggagtttagttttgttatttaggttagagtgtagtgatgcgattttagttttttgtaattttcgttttttaggtttaagcgattttttttttttagttttttaagtagttgggattataggcgtttgttattatatttagttaatttttgtatttttagtagagacgggttttattgtgttggttaggttggtttcgaatttttgatttcgtgatttatttattttagtttgttaaagtgttgggattataagtatgagttatcgcgtttggttagaattggttaattttttgtattttagtagtaacggggttttattatgttgtttagggtggttttgaatttttgagtttaggtaatttattttttttgggtttttgaagtgttaggattatagatatgagttattgcgttttgtttattttttgtttttattgagatagggtgttattttaatgtcggggttggagtgtagtggtgtaattatggtttattatagttttgattttcggtttttgttgatttttttgttttagtttattaagtagtttggattagaggtatatattattatattggttaattttttttttttttatttgtagagacggggttttataggttgtttaggttgattttaaatttttgggtttaagtgatatagtcgttttagttttttaaagtgttgggattataggcgtgagtcgttaagtttagttatggtttgttttttttatataatatgtttaaatagtaaatagtatttagaatgtatttagaaaggatattagttgaataataattttttttattgtttatgtaagaaaagtgttaacgtaggtatgtagaggtttaataatgttattaagttttgaagttttttttaggttttttttttgttttttgtaatgttaggttttaatgttaagttgttttttttagtagtattagaagtagtaatgagggttgtatgtttttttgtttatttttagaaatttttttttttatattttgttttatatatttttttatttatattatttgtaatatattttatgataaattagtaaacgttaagtgtttttttgagttgtttagtattttgagtaagaaattgatttttattagttggtttatttaaattataggtttatgtttgatttaataattataatttggaataaaaggtattgattagtataagttaattggggtttatttttggatttgtaatgaagttagttttttttttaaatttttaaaattttaagtgtttttagaagtgggaataaagttgggcgtagtggtttacgtttgtaatttaagtattttgggagattaaggcgggcggattatttgaggttagtttgagtaatgtgatgaaatttcgtttttattaaaaatataaaaattagtcgggcgtggttatatgtatttataattttaggtattcgggaggttgagataggagaattagttgtattttggaggaggaggttgtggtgagttgagattgtgttattgtattttagtttgggtaatatagcgaatttttattttaaaaaaaaaaaaaaaagtgagatttaaataggtttttattaatttagggatttggggttgttagtaatagaaattattatagaaatcgattgtatagattggagagataggtggttttttaaaggaaaaatagagtgttagaagaaaggagaagagtgttggatagtatatatttaataaatatttattggttattttatagaaggtttaaaaatgtatttatttaatttagtaatgaaatttgagggttaggaagagtagaaaagaaggaagtgtggtaggaaggaggaaaaatgaaagtgggtttaaataatacggtagttaatagagattttgtaacgaaaggtttattggtggaaaaattttttttaggaatgttagaatttttaagaacgatatagtaatgatataagaataaatatataggtaaatgagtaaataacggaatataaagtttagaaatagatataagtaaatatgttaatattatatattaagggtagtatttaaattttgttggggtagtttgtttaataaatggtgttgatataattggcgttttatcgggtagagaagttagattttagtttatatatgtataaggataaattttagttatattaaagatttaattttttttataaaaagaagaaggtcgggtacggtggtttacgtttgtaattttagtattttgggaagtcgaggcgggtggattatttgaggataggagttcgagattagattggttaatatagcgaaaattcgtttttaataaaaatataaaaattagttaggcgtggtggcgggcgtttgtaattttagttattcgggtggttgaggtacgagaatcgtttgaattcgggaggtagaggttgtagtaagtttagatagtattattatattttagtttgagcgatagagagagatttgttttaaaaaaggaaaaaaaaaaagaaaagaaaaagtaagataatttattgggggaatttggggaaatttttttaaattggaagttaagcgtgagttttttttatttcgttttttttattgggtttttatgatttacgttataggatatcgagttaatgggaattaggtatgggcgacgagtttgtttaatggggtcggggcgggagatttgaaaagtttttggttagggcgcggcgtggtagatttagttgtttgcgggcggtcgggagagtagtagtgttttggattttaggtgagttggttttttgtcgtaggttttgcgtcgggagtgggtagatgattaggtagattagagggttcgttgggttggtttgcgcgtacgtcgtagggttggaaggaggtagggacgatagtagggcgggggcggtgagattagcgtttagattggggttagtgtgttgatttgtttttttttattagttcgggttagcgttttcggttcgatcggtttaatttttttttttttttttttttttttttgttttttacggttgtttttttttttcgtttagtttttttttttttttttttttaaggatggtttagaaggagaatttttatttttggttttacggtcgatagacggtaaggttttttttttcgtttttgcgtttttatgatttcgtatggcgagtttttgttgggaaatttgagattttgtaatgagtaattttttaagtattttttttttcgttatgttttaaagtacgggttttaagtttgacgatagaattcgttttggttatttgtagttatattttgttaggtgttgttaacgtgaatttgattagttagtgatttttagttggtgaggatttttgtagggttcgttatatataaatgatatttgggattgagtaggtagggtttggtttttaggttatgatttttaatttatattttgaaaaaaaaaaaattagatagtaaatagaaatagattttaaaaggatataaagttatagtttaaaaggtttagggtaagtttaaattataatttggaattaatgattaaattgaggtaagaatttaaatggatttaaattgatttattttttaatggtttagatagattttattgaagggttttttttttgatttgaaatgttatttttattatatatataaatttttatatatatgtgggtttatttttggattgtattttatttaatttgtttatttgtagattggtattaatattattatttggggtttaggggttttttttttttggttgtagaagaaggaaggggttttgtataggttttgttttttgtttttggagtttttgttttttggagagtttgtttgtttttttgtatattagtttttttttttatggagtattgagtgaggttgttaggaatggagtttgaatgagaaattattgttatttttattttagttatttttaaaagaaaatgtatttattattttgagagttgaaagtgaggttaggtaggtggtttacgtttgtaattttagtattgggaggttgaggtaggtggattatttgaggttaggagttcgagattagtttggttaatatggtaaaatttcgtttttattaaaaatataaaaattagttaggtatgtgtttgtaattttatttatttaggaggtcgaggtaggagaattgtttgaatttgggaggtggaggttgtagtgagtcgagatggtattattgtattttagtttgggtaatagagcgagattttattttaaaaaaaaaaaaaaatgaagaagttgaaagtgagaagtggtttagggttattagggtagtttttagtgtttttaaagtttgtttttgtaaaagtgtaaattttggttattgttataatatttaaggttttaagtattttatttaagttttaataaattaagttttttaggagattttgagaatatttttgtgttaaattttttgaattgtgggtgtttattgacgtagttttttattgtggtgtaagtgaggggttggatgaatgattgtgttgttatggataggatttatataggttgaatagttttatgtttgaaaagtgtgggttagggttaaagaagtgaaatgttaggtgttggtgtgagttttttgttttttattttaggtttatttaggttatttattttttatttatttatttatttatttatttatttatttattttttgagacggagttttattgtgttgtttaggttggagtgtaatggtgcgattttagtttattgtaatttttgtcgtttaggtttaagcgatttttttgttttagtttttcgagtagttgggattataggcgtttgttattatatttggttaatttttttttttttttttgagatggagtttagttttgttgtttaggttggagtgtaatggtacgatttcggtttattgtaatttgtgttttttaggtttaagcgatttttttgttttagttttttgagtagttgggattataggagcgtgttattacggttagttaatttttgtatttttagtagagatggggttttattgtgttggttaggttggttttaaatttttgattttgtgattcgtttgtttcggttttttaaagtgttgggattataagtatgagttattacgtttagtcgtatttagttaattttttatatttttagtagagatggcgttttattatgttggttaggttggttttgaatttttgattgcgggagttattgcgtttagttttaggttgtttattaataatttattttaatatgggattatgagtagaggttgggaagtaaaattgttatattagtgtttttttttgaattgggggtaggtgggtgggtggttttttagtaaggggttgaaatattgtttgtagtatattttatttcggttattagataaaggtatttttagagttattttttgtttttttttaggttttatttggtttgagtattttgttttagcgagtttttcggaaagagtttgttattttatttgtatttgtttttatgagtcgttttaatgtttagtttataggtaattggcgtaagggggagaggattgagttggggagatgatcgtttgtgggagggtttagggatgagaaggttatttttgttcgtatttaatttatttgttttttttttagttgtttttggttagaaggtgatggagaatagtagtgggatattcgatattttaacgtaagtgttttaagtttgggggtggacgggggtgaggggataatgaataggtaggaag

SEQ ID NO: 326 - DNA, 6222 bp, Artificial Sequence
  chemically treated genomic DNA (Homo sapiens)
ttttttgttttgcgttgcggaggaggttttcgttaaagagattgtacgttgcggagtagggtgggttcgggttagggttgtgttttggattgtgtttgggaggtagggattcgggtttagattcggggttaggtttaggtttcgtgtgttttttcgagttatttatcgaaggtttcgatgtattcgcggagtagtttttttatcgtgtagtttttgtttaggtttagggtgtttgttatggtcgtcggcgcggggtgggttgggtttaggttgcgtttcgggagttttttatcgggttcggatcgaatttttgtttcgggagaggtagagcgggagtttgcggagtcgcgggcgggggagcggtttcgcgggtagaaacggggcggggcgggtacgttttttgttggataggggcggagttgtttttcgcggttattttcggggttaaacggtttggttcgggatggtgtaattcgttagttgggaaacggattcgtagagaggttttcggtttattttcggagtcgcgggaaggtcgaggggttttacgaggatggggacgaattaagattttaggattggttggcgtttagtttttcgtagggcgtttttttttcgcgttttttttttagaggtatttgtagtatttcgtagttcggttttgcgtttttttcgtttttttttttttatagttttttttttttcgtagggttattttgggaatttagagtttgaggggatttcggaggaatttttttttggtatgggaggtggggggagagaatttaggcgttttgttcgtttcgttttttttcgggagtttaggaaggcgaggcggggttgcggtagtttttagggggtttgttttaggggaggcggattggatgggagaggaatatttttggggcggggggagttcgttgcggttaggaggcgttagcgggaagttttagtttgggaattgagcgtttttaggttattttcgtaaaggttttaggggtttcggtttagtttgtttataggttttttttttttttattttcggtttttgattttggtttcggtttcgtataggcgaattgtgagcgcgtacggagtagggtgtttagaggggggcgttcgcgttaagggtggtcggtgggtgtatgatattattagtaatttcggttattggcggggttatacgtattttggtaggggtaaatattttatatttaagttagtcgtcggaggtcggggatttaagtggaggtgtaggcgttcgtatttatacgtatcgggttataggtatcggttttttatttttcgttttttatatataatggtatttatattttgtgtatatttgtacgaagaaatttttaggtatatatatttagttcgtttattttagaatgtaaattcgcggacgaggtcgttttttggacgtgttgtttatttgagttaggttagttttgagtttcgcggttatataggcgttgatatttttatacgtgtgtatatacgtaaggtagtgtttttttacgtatgtatatttttatatatatgtatatatttttatgggtgcgtacgtttatttcgtcgttttttttttatttgcggtgtagggttcgttttgcggttttagttttttgattttttttatttttagattttggtagagttttgttttacggaaaggtatttcggttttatatatatttatttttttaggttggaggataggggagtttttgtacggagtttttaggcggattttttttaagagttatttagagtcgttttcgtttggttttatcgttttttcgtgtgattttgagaattatttggtttttgggagttttaatttttttatttgttaaatgggggtacgcgggggagggtttcgttggaaggtggttgggaaaagttgggtgtatcgtggaggtttttcgtttttcggggatttagcgcgttttagttttcgtggtcgttgtttttttttttagattcgggtcgtagattttttattcgttcgtcgtttttagttcgttcgcgtcgttttgggcggggggggagtcgttgggggtcgcgttttttttcgtttggcgtttcgttcgcgttcgtttatttatttttgggatttgtcgtaaggagttcgtatcggtttggtcgattttattttcgtgcgttttcgttcgtcggtttcgttgcggttgcggttttcgttcgttttttacgtcgcggtttcgtttttcgtcgtttcgttttcgttttcgcgttaggttgttttttttttttttcgtttttgcgcggagtttcgtatcgtcggttgcgttatttttatcgggggttttttttcgtttcgtacgcggcggtttttgcggtagtttaattttttttttgtcgcgtcgttcgggaggttagggtcgcgggcggggggttgcgttattagttgtttcgagggcgggcgatcggaggtttcgtcgttcgggacgcggaggggggatcgaaacgaagagttttttttttaatcgcggacgttttagtgtttttcgttttgtttgggtgtcgggcggaggaagtcgggaggggtaggaagcggattgcggtggggaaggggcgtttcgtttagtttttagttcgggtttttgttttcgagataaatcgtttttatggggttaattcggttcgggatcgggcgtttttttgtaggtagcgggtggtataggtttagtggaggtcgggggcgtggggatagttggtttttgagatagtttgggggatgggttaggataagatgggaatattttggggagagggatttgtggggagcgaggaatgaaatcgtggttatttggagacgcggttttgatgtttgggaatgggggcggggggtttagtttatataggaggaacggggtttcggaagtttggttttttatagggtcgaatggaaaggggtagtcgtatgtggcggtgggtttttcgtagttcggagattggagatttggatgtttggttaatagggaggaatttgggaggggtagtcgtaggcggttggggtttttattagtcgggtttaggagagcgggtaacggttttcgattatttggttttagatatatttattgtgaaattatcgattttaaatttttttttcgaggcgtgttttttttagttttggggcgggggatttaggatcgttttcgtattttagttttggtaatgtaagatttagaaataggatttttttgttttttagtttttttataatgagggtttagattaggcggtttgcgagtgttttttgtcgtaatattttttcgattttggatttagtgtagttatttgttaagagatttttaaacgtcgtagtagggcggggttaagggcggagttaagaaggcgtcgagtattttttgtttttttttttttttgggttttgttttcgatagcgcggatttttcgtggttcgggaagttttagtttaagtttcggtttttagtttcggtgggttttatttaggtagacgtttcgttttcggttagcgaggttggtcgttgatttagtatggatacggtattgggaagagaggcgtggagggtgacgttaggaaaggggttggagaggtttaggtttcgtttttacgggtcgttttttttattttttattatcgtttcgtcgtgggacgtatttgtcgagggtggaggataagggggtgattgcgcggttgttgttgagttcgttaagagttaaaaatattttttaataaagaggagtaaggaggtttttaaggagaatgaatttattagggagtgggtgtagttggttagattttataaataggaggggatcgggagttcgaggacggaagggggttcgtgtttttagttacgttggatattgggatattgagagtggggaaaatgagggttttaggaggggtttagagatttaattttagtattttattttttgtatgaggtgttggggttggtttaagagagtgtgatagatttaagggttggtttggggtttggtttggaggtttagatggttttattcggggttggtaggcgttggcgggaaggttttatattttagatttttcgggtatattgggtaatggtgcggttattggagaatttgttagaggtggttatgtttcggattattattcgcgtttatttttttgggttttgtaggttaaagggaagttttggtttattttgttggtaggatttttattttttgttttattttaattagggttattaaagttttgttaatttttggtttaggattttttattttgtataaggcgttgatttttttttggtatttaatgtagtttttataatttgcgaagattttaaatttggaggggaaaggataggtatgtgttatttttttagggggttaggataagttttatgaggttaagggttaagtttgttttgttttagtggatagtcggggatttagagggttatgttgtttttaaaggcgtttggttttaattattaggattcgcgttcggtttttttattatatatttgagtttcgatttgttttgcggttttatttgagtgattttcgggttaattagtttatcggttatggtgtatgagtatattgataatgtttttgaataggtcgggttgtttgggggagaagaagttattgtttagttgtttaatgatttgtcgaagtttaggaatgcgatcgtagtatttttgggtattgtatttgttaggatagagttgtggttagtttttcggaaaggggtttttggttttttttttagagaaaagttgagaagttttatgttttagggttaaaatttaggtttagtttgttgttttttagggttgttatatcgtttttgtagggtttttttgtaattttttttttttgtttagttttttattttttttttgtgaatgaagaaattgaggttcggaggatatagaaagttaagtgttagagttaaggtttttaaataagttttttttttttatacgttattgttgttttttaattagtttgtttgttttaaaatggttttttttttttagtagtttaagtttatattcggttttgttttggggtagtaagagtagttaataggtataattttttaattgggttaggtatggtggtttacgtttgtaattttagtattttgggaggtcgaggtgggcggattatttgaggaggttaggagtttaagattaatttggttaatatggtgaaatttagtttttataaaaatataaaaagtagtcgggtatggtgtcgtgtgtttgtaattttagtttttcgggaggttgaggtggaagaattatttgaattcgggaggcggaggttgtagtgaatcgagattatgttattgtattttagtttgggtaatagagtaagattttattttaaaaaaaaaaaaaaagataattttttagttgatttttagcgtttttattacggtttaaagcgttttataggttagttttaaaatttaatcgttttaattagaaattagtattttttataaaatttttaatttttcgtgcgattttttagttttttgtgcgatttttaggtaattttttttgtattatggtgttagtttttatagtggttttttatttgttttttttagtattgtttttattttgtagttagagggtttttttaggtttcgttttgagtatgcgggattatgtttataatattttatagtttttttttgtttatgggatagttagttttttagtgaagttttataggagatattttttttagtgtttaatgttaattttgggaagttgttgtgggagtgtaaattgggagaaattttttggaaagtagtttggtaatttgtattaagagttttaagaatttatattttttaatttagaaatattatttttttgataattattttaaggaaattattagatgtggacgtagatattaaaaggttgtttattatagtaatatttaataaatcggaaattaattttagtgtttagttatatggaattgattaaataagttgtgatatgtttataggatggaatgttatataaatatttaaaatatttttgaagattaataatatggaaaatttttttttaatgttaagatattaggatttaagtagggcgcggtggtttacgtttgtaaatttagtattttgggaggtcgaggcgggtggattatttgaggttaggagtttaa

SEQ ID NO: 327 - DNA, 6222 bp, Artificial Sequence
  chemically treated genomic DNA (Homo sapiens)
ttgaatttttgattttaagtaatttattcgtttcggttttttaaagtgttgggtttataggcgtgagttatcgcgttttgtttgaattttgatattttagtattggagagagattttttatgttattagtttttaaaaatattttaaatgtttgtataatattttattttatgagtatgttataatttatttaattaattttatgtggttggatattaaggttaattttcggtttgttaaatattattgtgatgagtaattttttaatgtttacgtttatatttgatgatttttttaagataattattagaagggtgatatttttgagttaaaaagtatgagtttttaaggtttttgatatagattgttaaattgttttttagaaagttttttttagtttatatttttataatagttttttagagttggtattaaatattgaaagaagtgttttttgtgaggttttattagaaagttggttgttttatgggtaggagggagttgtgagatgttgtgagtatggtttcgtatgtttagaacgaggtttggaagaattttttggttgtaggatggagatagtgttggagggggtaggtgggggattattgtgggggttgatattataatgtagggagagttgtttgagagtcgtataagggattagagagtcgtacgagggattagagattttgtggggagtgttggtttttggttggaacggttaggttttgagattggtttgtggagcgttttgagtcgtggtgggggcgttgagggttagttgaagggttatttttttttttttttttgagatggagttttgttttgttgtttaggttggagtgtaatggtatgatttcggtttattgtaattttcgtttttcgggtttaagtgatttttttattttagtttttcgaggagttgggattataggtatacgatattatgttcggttattttttgtatttttgtagagattgggttttattatgttggttaggttggttttgaatttttgatttttttagatgattcgtttatttcggttttttaaagtgttgggattataggcgtgagttattatgtttggtttagttgaagggttgtatttgttagttgtttttgttgttttagggtaaggtcggatatggatttgggttattggaggagaaaagttattttggagtaaataaattggttaagagatagtagtggcgtgtgggagaaaagagtttgtttgggggttttggttttaatatttagttttttgtatttttcgggttttagtttttttatttataaaggagggatgaaaagttgagtagagaaggggagttgtagggaggttttgtaggggcgatgtggtagttttggggagtagtaggttggatttgggttttgattttggggtatgggattttttagtttttttttggaagaggagttaggaattttttttcggggagttgattatagttttgttttggtaggtataatgtttaggagtattacgatcgtatttttgagtttcggtaggttattgagtagttgagtagtggtttttttttttttaaatagttcgatttgtttaaggatattgttaatatgtttatgtattatgatcggtgagttggttggttcgggaattatttaggtggggtcgtagggtagatcgaggtttaggtgtgtggtggggaagtcggacgcgggttttggtagttggagttaggcgtttttggaagtagtatgattttttaggttttcggttgtttattgggatagggtaggtttggtttttgattttatagaatttattttagttttttaaaggaatagtatatgtttatttttttttttttaggtttaaagttttcgtagattatgaagattatattaaatgttaggagaaagttagcgttttgtataaggtgaggggttttgggttaggggttggtagggttttggtggttttggttgggatgaggtagaaggtggagattttgttagtagagtgaattagagtttttttttgatttgtagaatttaagagagtggacgcggatggtgattcggaatatagttatttttggtaagttttttagtgatcgtattattgtttagtatgttcgggagatttggggtgtggagttttttcgttagcgtttgttagtttcggatgaggttatttgagtttttagattagattttaaattagtttttgagtttgttatatttttttgggttagttttagtattttatgtagagggtggggtattggagttagatttttaagttttttttggaatttttattttttttatttttaatgttttagtgtttagcgtgattaaggatacgggttttttttcgttttcgggttttcggtttttttttatttatggggtttgattaattgtatttattttttaataaatttattttttttgggagtttttttatttttttttgttgggaaatatttttagtttttggcgggtttaatagtagtcgcgtagttatttttttattttttattttcggtaggtgcgttttacggcgggacggtgatgggaggtggagggggcgattcgtgggggcggggtttaggtttttttagttttttttttggcgttattttttacgtttttttttttagtgtcgtgtttatattaggttagcggttagtttcgttggtcgggggcggggcgtttgtttgggtggggtttatcggggttgggagtcgggatttgggttgaggtttttcggattacggaggattcgcgttgtcgagggtaggatttaggagggggaggaagtagaggatgttcggcgtttttttggtttcgtttttagtttcgttttattgcggcgtttaagggttttttagtaggtggttatattggatttaaagtcgggggagtgttacggtagggaatattcgtagatcgtttagtttaggtttttattatggggaaattgaggaatagaaaggttttgtttttaagttttatattattaagattgaggtgcgggggcggttttggatttttcgttttaaggttgggaggggtacgtttcggaagggaggtttggggtcggtggttttatagtgagtgtgtttgaagttaaatggtcggaaatcgttattcgtttttttaggttcggttagtggggattttaatcgtttgcggttgttttttttaagtttttttttgttggttaggtatttaggtttttagttttcgagttgcggagaatttatcgttatatgcggttgtttttttttattcgattttgtggggagttaggttttcggggtttcgttttttttgtgtgaattgggtttttcgtttttatttttagatattaaggtcgcgtttttagatagttacgattttatttttcgttttttataggtttttttttttaaaatatttttattttgttttagtttattttttagattattttaaggattagttgtttttacgttttcgatttttattaggtttgtgttattcgttgtttgtaggaagacgttcggtttcgggtcgggttagttttatgggaacggtttgtttcgaaaataggaattcgagttgggggttgggcggggcgttttttttttatcgtagttcgttttttgtttttttcggtttttttcgttcgatatttaggtagggcggggggtattggggcgttcgcggttgggggaggggtttttcgtttcggtttttttttcgcgtttcgggcggcggggttttcggtcgttcgttttcggggtagttagtggcgtagtttttcgttcgcggttttggtttttcgggcggcgcggtaggggaggggttaagttgtcgtagggatcgtcgcgtgcggggcgagagggagttttcggtgggggtggcgtagtcggcggtgcggagtttcgcgtaggggcggaggggggagggggtagtttggcgcgggggcgggggcggggcggcggggagcggggtcgcggcgtggagagcgggcgggagtcgtagtcgtagcgaggtcggcgggcgggagcgtacggaggtggggtcggttaggtcggtgcgggttttttgcggtaggttttaagagtgagtgggcgagcgcgggcggggcgttaggcgaaggagggcgcggtttttagcgatttttttttcgtttagggcggcgcgggcgggttgggggcggcgagcgggtggggagtttgcggttcgggtttgggagagggggtagcggttacgagagttaaggcgcgttggattttcggagggcggaggatttttacggtgtatttagttttttttagttattttttagcggggttttttttcgcgtatttttatttggtagatgagaaaattgaggtttttagaggttaagtgatttttaaggttatacgaggaagcggtagagttaggcggggacggttttgggtggtttttaggaaaagttcgtttgagaatttcgtataggagtttttttgttttttagtttgggggagtgagtatgtgtagggtcggggtattttttcgtggggtaaggttttgttaaaatttgggagtgaggggagttagggagttggggtcgtagggcgggttttgtatcgtaaatgggaggggggcgacggaatgggcgtgcgtatttatgggggtgtgtgtatgtgtgtgggagtgtatatgcgtggagaggtattgttttgcgtgtgtgtatacgtgtgaggatgttagcgtttgtgtggtcgcgggatttaaggttggtttggtttaagtgaatagtacgtttaggaggcgatttcgttcgcgggtttgtattttggggtggacgagttgggtatgtgtgtttgagggttttttcgtgtaggtgtgtatagggtgtgggtgttattgtgtgtgagagacggaggatgggaggtcggtgtttgtggttcggtgcgtgtaagtgcggacgtttgtatttttatttaggttttcggttttcgacgattaatttgggtgtggagtgtttgtttttgttagggtgcgtatgatttcgttagtgatcggagttgttaatggtgttatgtatttatcggttatttttggcgcgagcgtttttttttggatattttgtttcgtgcgcgtttatagttcgtttgtgcggggtcggggttagggttaggagtcggggatagggaggaagagggtttgtggataagttgagtcgggatttttgggatttttgcggaggtggtttgggagcgtttagtttttaggttgaggtttttcgttgacgttttttggtcgtagcgggtttttttcgttttaggaatgttttttttttatttagttcgttttttttagggtaggttttttgggggttgtcgtagtttcgtttcgtttttttgggttttcgggagggggcgaggcgagtaggacgtttgggttttttttttttattttttatattagggagaaattttttcgaggtttttttaggttttgggtttttaaaataattttgcgggggaagggaggttgtggagggagggaagcgggaggggcgtagagtcgagttgcggggtgttgtaggtgtttttggggagagggcgcgaggagaaggcgttttgcggggggttgggcgttagttagttttgggattttggttcgtttttattttcgtgaagtttttcggttttttcgcgatttcgagggtgggtcggaagtttttttgcgggttcgttttttaattggcgggttgtattatttcgggttagatcgtttaatttcgggagtggtcgcgggggataatttcgtttttgtttagtagggggcgtgttcgtttcgtttcgtttttgttcgcggggtcgttttttcgttcgcgatttcgtagattttcgttttgtttttttcgggataggggttcggttcgagttcggtgggaggttttcggagcgtagtttgggtttagtttatttcgcgtcggcggttatggtaggtattttggatttggataagggttgtacggtggaggagttgtttcgcgggtgtatcgaagttttcggtgagtggttcgggagggtatacggagtttgagtttagtttcgagtttgagttcgggtttttgttttttaggtatagtttagggtatagttttgattcggatttattttgtttcgtagcgtgtagtttttttaacgaaagtttttttcgtaacgtagggtagagag

SEQ ID NO: 328 - DNA, 6143 bp, Artificial Sequence
  chemically treated genomic DNA (Homo sapiens)
taggtagttattttttggatgggtttattttagttttttattggtagtgggaagggtatataaatattgatttaaaagtaggaggttaaggtataaaatataatttaagaatttattatagatttagtgtggtggtttatgtttgtaattttagtattttgggaggtcgaggtaggtagatcgttggagtttaaatttttgagttgtggattatagtgtttttggggtattgttaggttaatttgtagttatgtggtaatatgaagtattttcgagtgataagtaaatagtttaagggggtgggaattacgaggtgattgttgtgttattttaatgtttttttgggtttgataatttaaaaggatttcgtattttttagatgatgattattattatttttttattatgaggttttagattttaaaattttttaaattggtttaggtatagtggtttatgtttgtaattttagtatttttggaggttaaggcgggtagattatttgaggttaggagtttaagattagtttggttaatatggtgtaattttatttttattaaaaatataaaaattagttgggtgtgagggtgtacgtttatagttttagttatttgagagattggggtaggagaattatttgaatttaggaggtagaggttgtagtgagtagagattgtattattgtattttagtttgggtgatagagttgagtaatagagaaagatttcgttttaaaaaaaagaaataaagaaattttaataattaaaaataaagaaaagtataatattgtaataatattttaatgaaaggagtagttggaagtagtaagcgttttaaattaggattatttggagtatttgaaattttattatttttatttatatatttagtgtttttagttttattgaattagtttagagtggatgttggagaatttgtattttttagaattttttaagtgatgtcgatgttgttgttttgagtgttatgttttgagaatagttgttttaaagtatattaatagttgttatatatgtattatttttaattgtaggtattttaagaattttttttgagaaattttagttttttagaatagggagcgttttttttatgtattttcgatagtatttgaattggaagtagtttagtatagtagttttaaagaggttggggagttagtttgtttagttttggagtttgttttgatatttgattgttgtgtgagtttaggtaatttaattatttttagtttaagtgttttcggagtaaaatagaggtttattagtttttttttttttattagggaaatcggaaatgaatatttatttaagttattaatgggagcgtattattttttatttttttgttatttatattttgaaaatgtagggggagaaaaatataaggaggtaggagttatatttgtaattttagattttgggtggtcgaagcgggaggaatatttgagtttaggagtttaagattagtttgagtaataatatagagagttttatttttataaaaaaaatttttttttattattcgggtatggtgatatatatttggagttttagttattcgggaggttgaggtaggaggattgtttcggtttaggagttggaggttgtagtaagttatgaatgtgttattgttttttagtttgggttatagtttgtataaagtaagattttgttttaaaaaaaaaaaaaaaaagttttttgttttgtttgaagttgaggagattatttgtttattttaagttattatttgtagaaattatatttatattttttttttttttacgtgtttttttttttaagagaaaggtcgttaaataattaagagaagtttttatatttattgagtgtattataatcgaaataagagtaagcgatttatttttttggaattttttaggttaagtttgtttaatttgaggtttatgggttgttaaattcgtaagtttttttaaaatattagatttttttttgcgatttttttttagtttattagttattattagtgttagtgtatgattagtgttagtgtattttatgtatggtttaagataatttttttagtgtggtttagggaatttaaaaaattggagatttttattttaggttgttttataataaaaggtaatattaatatgtgggaaagatgaggcggtagaggttaagaaatagaagatttaataattatttaagtgagattgaagttttttaaaggtttaggtttatgtagttagtagacggaatttttttatatatattcgttatttttttaagacggagttttattttgttatttaggttggagtatagtggggcgattttagtttattgtaattttcgtttattgggtttaagtaatttttttgttttagttttttgagtagttgggattataggcgtgttttattatattcggttaatttttgtatttttagtagagacggggttttattatgttagttaggttggtttcgaatttttgatttcgtgatttatttatttttgttttttaaagtgtagggatataggcgtgagttatcgcgttaggttaagatggaaattttagttattattgttattcgagttttttttcgtttgtttttttgtataaaatgggtagggttgtgggtttttttagtttaggagttttggggtggttttaagaaggtagaatttttggtaggaattatttgtattaagattatggattatttttttgaaggttagcgattttagggattttattttcgagttgtttttttacgtggaagtgaaagtattggaaataggggaaagaagttggttaaagatagattttagtcgtggcggtgtatgttttagttaaaagtaaattttggaaaattttgtttaagaatagggtttttatttataaatgaaaaataataatagtgttattttatttatatgaaatttgttataattaggtattacgatttatatggatatatagtgagatttttataaagaggtaaaaggagagttttggttattgagataaaagatatagagatatcgggatatagagaggtataacgggacgtggagttggatcgagttgtttcgtaaggaatatcggaaggggtggggatattattgggagatggtataggtttaggatattaattaggttttggttgagattagataaaggaaattgttcgtaagttgtttatttaaaaagaaaggaaaaggtgcgtttgagtttaggagattgcgagttttagagtaggaggcgggagttagcgaagggtgggcgtgtaaggggtgtagtcgtttttttcgttgggtaagagattttttttttcggtagtttgggtttttcgtttttttattttttgttttttttttttcgagttttaagggttcgtagggtttttagtagtaaagttattggtttcgcgttttcgcgtttttttgcgtcgcgtttcggggcgtaggtagggattacgcggtcggcgtgggggcggcgttattcgtagtagaaagtttcggcgtggatcgcgtggcgtaggaaagcgtttttttcgtttttagtcgtagagggtttgggtagtatcgggcgcggtttcgggagagtgcgttcgcggcgttagcggttgtagggtgatttgtttcgggcggggatatttattagaagaatacgcgtgagtagaggttcgcgttttgtagcgggttgggttttattttttggtatacgggtagtattttgtcgggcggggcgggcgcgggtcggggtcgcgttgattaggcggcggtggtcgcgggtttcgtttttggattttaagtagggatgttggggtttcggtcgttacgtttgttcgttcggttggagtttgtgaagtagtcgttttcgggagtcgggcgtcggcggtacgtttcgttttcgttttttaggttcgtcgtttcgggggcgttcgttacgcgtcgtcgtttggagttcgggagttgcgtatcgcgtgcgagcgcggtcgggatcgacgggtgacgcggcgggaggagacgcggcgggaggaggcgaagttggcgacgttaaagggagtttagagttacgtttaggggtgaggcgagggtcgtttgcgtcgttggatggagagggtagtagagcgcgcggtaaggaggtcgggttcggaggtgtttacgtgtacgaattcgagtgaaatttttcgaaatttattattcgagtttaggcgtcgatatagaaggtggagtagggaggcgtcggttgtgttcgtttttgcgtcgtagaaacgttttttcggttacgggtttgggaagattgggagatagttgtttcgtgttttagtagttcgttttttgggcgtttttttttttttaggattaaacgacggtgttatgggaggttttttaatttgtgagttaaatatttgattttggacgatagtaaagtttagttatagattatttttgtagagttgtaagattttaagaaagtcgggtaattcgagagtatgatttagatgaattcgggagatggatgaatgttgtcgtcgatgggggcgggttttaggtattttatatgttgtatgttacggtggatttttgagttttttgttgtttttttagattgggaaaggaatataagaggaaagagagattgtttgatgatttttgtcgttaagttttaaagtttaatagataatagtggtaaacgatacgtgggttttagaatattagtgatgtttatgtgtatttttgagtgcgtagttttattagtgtgtgtgtgtgtgtgtgtgtgtggtagttttatatatagtgttacgattatggtttattgtattttcgattttttagggtttaagtaatttttttaatttagtttaagtagttaggattataggtattcgttattatattcggtttatattttgtaatttttgtagagatgtaaaaattaaaattaaaggttttaagtttaaatattgataatttttgaagttaaatgattgttatggaggtttattttttttatattttatgtatgtttgagaatttggttttttttgtaataagattattttattgttttttgataattttttattttgttgtttaggttggttttaaatttttaggtttaagtgatttttttatcgtggttttttaaagtgttaggattataggtatgtattattacgttcgattaattattttatttttaattttattagtgttttatttaaggttatttttattttatagatgaggaaggtgaagttgaaaggtagaatttgtttagttttagagttaagaaaggataaaatatgatttgtaataagtttatgtttaagtatggtttgtttttttggtggatggttagtgtgtatgagaagtgtttagaatatgttggttgaatggttgtaggaatgaatgaataaaattttgttttaagtttgtgtatttttatttttaagtttttagttatttttgtggttattttaataaggttagtagttgttttttatatttattttgaatgaaaaaaaatgaaaggttttaagtttatggtgtttggaataagattattttattgttttttgataattttttatgtatatttgttaaaatagtatagttaatagtttttaaagaaagttttatataaatatatatttaaaagttaagtataggttagttagtatagtgaggttttgtttttattaaaagttttaaaaattagtttaggtgtggtggcgtatttttgtagttttagttattcgagaggttgagataggaggatggttttagtttaggagttttaggttataaggagttaagaaggtgtttattgggttgggtataatggtttacgtttataattttagtattttgggaggttgaggtaggtgaattatttgacgttaggagttcgagattagtttggttaatatggtgaaattttatttttattaaaaatataaaaaattatttgggtgtggtggtggatgtttgtaattttagttatttaggaattttaggtagaagaattatttgaatttaggaggcggaggttgtagtgagtcgagattattttattgtattttagtttggtaataagagtgaaatttcgttttaaaaaaaaaa

SEQ ID NO: 329 - DNA, 6143 bp, Artificial Sequence
  chemically treated genomic DNA (Homo sapiens)
ttttttttttgagacggagttttatttttgttgttaagttggagtgtagtgggatgatttcggtttattgtaattttcgttttttgggtttaagtgatttttttgtttgaggtttttgagtagttgggattataggtatttattattatatttagataattttttgtatttttagtagagatggggttttattatgttggttaggttggtttcgaatttttgacgttaggtgatttatttgttttagttttttagagtgttaggattataggcgtgagttattgtgtttagtttagtgggtatttttttaattttttgtagtttggaatttttgggttaaagttatttttttgttttagtttttcgagtagttgggattataagggtacgttattatatttgggttaatttttaaaatttttggtagagatagagttttattatgttggttagtttgtgtttgatttttaaatatgtgtttgtgtaaggttttttttaaaagttattaattatattattttagtaaatatatatgggaaattattaaggaataataaaatgattttgttttaagtattatgaatttggagttttttatttttttttatttagggtggatatgaagagtagttgttgattttgttaaggtagttatagaaatgattgaagatttagaggtgggagtatataagtttggaataagattttgtttatttatttttatagttatttaattagtatattttgggtattttttatgtatattggttatttattagggagataggttatgtttagatataggtttattgtaaattatgttttatttttttttggttttaagattggataagttttgttttttagttttattttttttatttataaagtaaggataattttgaatggggtattgatagaattaaaagtgagataattggtcgggcgtggtggtatatgtttgtaattttagtattttgggaggttacggtgggaggattatttgagtttaggagtttgagattagtttgggtaataaagtgagaaattattaaggaataataaaatgattttattataaagaaaattaaatttttaaatatgtatgaaatatgaagaaaataaatttttatgataattatttggttttaaaaattattagtatttgaatttggagtttttgattttgatttttgtatttttataaaaattataaaatatgagtcgggtgtggtggcgggtgtttgtagttttagttatttaaattgagttgggaggattgtttgagttttgggaggtcgagggtgtaatgagttataatcgtgatattgtgtgtgagattgttatatatatatatatatatatatattagtgaggttacgtatttagaaatgtatatgaatattattggtattttggaatttacgtgtcgtttgttattgttatttgttaggttttagggtttgacgatagaaattattaggtagtttttttttttttttatattttttttttaatttaagggggtagtaaaaagtttagaggtttatcgtagtatgtaatatgtgagatgtttaaagttcgtttttatcgacgatagtatttatttatttttcgaatttatttgggttatattttcgagttattcggtttttttgaggttttgtagttttataaggataatttgtggttaaattttgttgtcgtttaaggttaaatgtttggtttataggttgaagagttttttatggtatcgtcgtttggttttgagaagggaaaggcgtttagggggcgggttgttagagtacgaggtagttgttttttagtttttttaaattcgtagtcgagggggcgtttttgcggcgtaggggcgggtatagtcgacgtttttttgttttattttttgtgtcggcgtttagattcggatagtgaatttcggaaagttttattcgggttcgtgtacgtgggtattttcggattcggtttttttgtcgcgcgttttgttattttttttatttagcggcgtaggcggttttcgttttatttttgggcgtagttttgggttttttttggcgtcgttagtttcgttttttttcgtcgcgttttttttcgtcgcgttattcgtcggtttcggtcgcgttcgtacgcggtgcgtagttttcgggttttaggcggcggcgcgtagcgggcgttttcgaggcggcgggtttgagaggcggggacggggcgtgtcgtcggcgttcggttttcggaagcggttgttttataggttttagtcgagcggataggcgtggcggtcggagttttagtatttttgtttgaggtttaggagcggagttcgcggttatcgtcgtttgattagcgcgatttcggttcgcgttcgtttcgttcggtaagatgttgttcgtgtattaggaggtgaagtttaattcgttgtaggacgcgaatttttgtttacgcgtgtttttttggtgagtgttttcgttcgaaataggttattttgtagtcgttggcgtcgcggacgtattttttcggggtcgcgttcgatgttgtttaagttttttgcggttgggggcgaggggagcgtttttttacgttacgcggtttacgtcggggttttttgttgcgggtggcgtcgtttttacgtcggtcgcgtggtttttgtttgcgtttcggggcgcggcgtagggggacgcggggacgcggggttagtggttttgttattggaggttttgcgggtttttagggttcgggggaggaggagtaggaggtggggaggcggggaatttaggttgtcgaaagggggagttttttgtttagcgggagaagcgattgtattttttatacgtttatttttcgttggttttcgttttttgttttgggattcgtagttttttgaatttaaacgtatttttttttttttttttaagtaagtagtttacgaatagttttttttatttgattttagttaaagtttaattagtgttttggatttatgttattttttagtagtgtttttatttttttcgatattttttacgagatagttcgatttaattttacgtttcgttgtatttttttgtgtttcggtgtttttgtattttttgttttagtgattagggttttttttttgtttttttgtgggaattttattgtgtgtttatgtgggtcgtggtatttagttatggtaagttttatgtgggtaaaataatattattattattttttatttatgaatggggattttgtttttgaataagattttttaggatttgtttttaattgggatatgtatcgttacgattggagtttgtttttgattagttttttttttttgtttttaatatttttatttttacgtaggaggatagttcggaggtggggtttttggaatcgttaatttttagagaggtgatttatggttttgatgtaggtggtttttattaggagttttatttttttaaaattattttagggtttttgagttgggagggtttatagttttatttattttgtgtaaggaaataaacggagaaagattcgggtgatagtagtaattaaaatttttattttggtttggcgcggtggtttacgtttgtatttttgtattttgggaggtagaggtgggtggattacgaggttaggagttcgagattagtttggttgatatggtgaaatttcgtttttattaaaaatataaaaattagtcgggtgtggtggagtacgtttgtaattttagttatttaggaggttgaggtaggggaattgtttgaatttagtaggcggaggttgtagtgagttgagatcgttttattgtattttagtttgggtgatagagtgagatttcgttttgggggagtggcgggtgtgtgtgggggaatttcgtttgttaattatataagtttgaatttttgaagggttttaattttatttggatgattattagattttttgttttttgatttttgtcgttttattttttttatatgttgatattgttttttattatgggataatttagggtgggggtttttaattttttgggttttttgggttatattggaagaattgttttgggttatatataaaatatattaatattaattatatattaatattaatgatagttgatgagttaaaaaaaaatcgtaaaaaaaaatttgatgttttaagaaagtttacgaatttggtagtttatgggttttaggttggataagtttgatttaggggattttaagaggatgagtcgtttatttttgtttcgattgtggtatatttagtgggtgtaggaattttttttggttgtttggcggttttttttttaaggagaggggtacgtggaggaggaaggaatatgggtgtggtttttgtaaataataatttgaggtagataaatggtttttttaattttaggtagggtaaggaattttttttttttttttttgagataggattttgttttgtgtaagttgtgatttaggttggagggtagtgatatatttatagtttgttgtagtttttaatttttgggtcgaagtaatttttttgttttagtttttcgagtagttggggttttaggtgtgtgttattatgttcggataataaaaaaaaattttttttgtagagatagggttttttatgttgttgtttaggttggttttgaatttttgggtttaagtgtttttttcgtttcggttatttaaagtttgggattatagatgtgatttttgtttttttatatttttttttttttgtatttttaaaatgtaggtggtagggaaataggaagtgatgcgtttttattgatgatttgagtaggtgtttattttcggtttttttgatggaagggaaggagttagtagatttttgttttatttcgaggatatttaagttgagagtggttaagttgtttggatttatataataattaagtgttagagtaggttttaaagttgggtagattggttttttagtttttttggagttgttgtattgagttgtttttagtttaggtgttgtcggaaatgtatggagaaggcgttttttgttttggaaggttagagttttttaagggaaatttttaaagtatttgtagttggagatgatgtatgtgtaataattattagtgtgttttagggtagttgtttttaaagtatagtatttagagtagtagtatcggtattatttgggagattttaagagatgtagattttttagtatttattttggattgatttagtaaaattggaaatattgggtgtgtgggtgggggtggtgaggttttaagtgttttaggtgattttgatttgaggcgtttattgtttttagttattttttttattggagtattattatagtattatgtttttttttatttttaattgttaaaatttttttattttttttttttgagacggagtttttttttgttgtttagttttgttatttaggttggagtgtagtggtgtaatttttgtttattgtaatttttgttttttgggtttaagtgatttttttgttttagttttttaagtagttgggattataggcgtgtatttttatatttagttaatttttgtatttttggtagagatggggttgtattatgttggttaggttggttttgaatttttgattttaggtgatttgttcgttttggtttttaaaaatgttgggattataggtatgagttattgtgtttgggttagtttgagggattttaaagtttgaggttttatagtgagaaaataataataattattatttgaggaatgcggagtttttttaaattattaggtttagagagatattaaaatgatatagtagttatttcgtagtttttatttttttgagttatttatttattattcgaaagtattttatattgttatatagttatagattaatttaatagtgttttaaggatattgtaatttatagtttaggagtttgagttttagcgatttgtttgtttcggttttttaaagtgttgggattataggtatgaattattatattgggtttgtagtaaatttttgagttatattttgtgttttagttttttgtttttaggttagtatttgtgtattttttttattgttagtggaaagttgaaatgagtttatttaggaagtggttgtttg

SEQ ID NO: 330 - DNA, 6104 bp, Artificial Sequence
  chemically treated genomic DNA (Homo sapiens)
aaattttttaaaagtataattggtaatgtaaaggttgaattttagtttatattttttttgtaggtttttagaattgtttttaggtttttagagttggatagattttttatggttattttttaaagtttttttttatagtgtggaggtttagaattagaagagtaacgtgtttggttattattgtagagataggttagaagttagttttttgtggtttatgtagtgcgttttaggtgggcgtttttttttttttggaagtattaataattttttatatttggggttatatagttattgttgggattatttagttttttgttttagttgttgtttttgttattattaagatttttattaaaggtagagtaggggaaaggttttaaaaaaataaagttatttattgtagaagttttttttttttaggttttttataatatttttttttagattttggagaagaggtaattgtaattagaggttttatttattgatagagttttttttgttaggggtggaggggaggtggttatagatttaaggaaaattttatttttttttttggttggtgatattgattatttaagatttttaattttgttttgttttttaattttggtaaagttttttagtgttattagtaagagaaatcgttttgttttataagtggatttttgaaggttgatgtttttattagaattagaagggattagggtaaagtatagggtagtaaaagggaagaaagggtgataaaagtaatttgggaagtatggagtttagagagatttagaggattaggttatgagagaatagggagaagagaaagtattaaaagttaaagtgtagttttagagttttaagaagatggggattatttgtattatagattaggaaatttggtttttttgttgtatagttttttaattggttgttttgtgaaaaatttttaaatcgttttgttttttttggtgaaatgggagtagataaggatttataaaatgttttattataggtaggtcgaaggtgttttaataatttatagaatgaatggtttttgagtttgtaaaggtatattttttaaaaaaatatagtagttaaatgtttttttgtaaatgaaaaaattaaaatttcgagagaaataaattaatttgaaggtgttttttaagtttaaaagtaattaaagttttataggtttgttgaaggagatcgttaaaattttaaattggtttaggtgaaattttttttaggtataggtattttagtggaggttagttttaggttgagttttttatgaaattcgtttagaaaagtaagagatgaaatggagtaagggaattggaatttttataattttttttgtagtggaaggtgatttttttgatttttagtatggattttttttagtttcgtttttttttttttataatatttaatttaatgtattgaatttttttttttgaatttagtgtaaagtatagtggtggatttttaggggatatttggatggggagaggtagggcgtgtatatagggttaagaatttttcgtttttgggattataagtacgggaagtttagtatcgtaagttttttgtcgttattgggtatggtggtgtaaggtatagttttattagtgtcgatgtgaatggagttgtgaagtgtataatttgtttagtttttacgtcgaggttaggtttttgtttatgtagttgtttagttttggttttttggttataaatttaaagttgtttggttaagagtttttttatttattgtttttttttttttaatttttgttatttaagattttttatagaattatagtgagggggagaggagtgtagttttttatacggaaggcgatatgtttttttgatttacggatttggaaattttcgtggggtaggggtaatcgaggggtgttatttttgcgggttttttgtaagtttttcggtcgttttgggtagggtcgggaggggttattaggtggcgtagtcggagtttagcgttttagtaggtgcgggtagcgcggaaagttcgcgagtgggagtttcgatgtcgggcgtggagatgtgggggaggaagtcggcgggcgggcgtcggtttcgcgaagagtttcggttttagtagattttatcggacgagttttggtttcgcggtcgtttttttattattttttagttttagtttttttttcgaaatttcgggcgtagcgcgtcgggcgttttggatacgttcgttcgtcgcgttggtgtttcgggatttcggtcgatttcggttttttttcgtttttaatttttttcggggtgttggggcgacgggtaggggttttttttttaagaaaggatataggcgttttcgagggttacggtcgtttttatttatcgcggagtttttttcgttttgtttagggtgtttatggtcgcggttcgcgttttcggtgtcggtttatttagcgcggtcgggcgcggcgtatcgttttcgttattatcgtcgtcgtttgtcggttttttttttttcgggtttcgtagtttcggcgttcgttagttttcgagttcggcgagttcgatcgaggtgtatcgtaggtataaattttgtgcgagcgcgttttttttgtttcgcgcgcgcgtttatattcgtttggtaattatttgatacgttgatgttggcggttgtaggaaacgtgcggcgtttcgtcgttttttttcgaaatttgtttttttttcgcgggtgtttcggtttgcgtttcgcgcggtttttttatttttgttcgttttcgattttttttggttaaagggttaagttttaggggagttggagaggagcgggttttcggttattacgttcgcgttttgtagggtatttgtgttcgtcgatttttattttagttcgggaaacgggttgcgtttagcggtttttatgggattttttttttcgtagtcgattcgtagtttttacgtttttttttgcggtcgttgttcggagtattgtagtgaggacgtttttttttttttagggttttttttgtatatattagagcgcggagttcggtaggggaaaggaacggaaagatagttgtgaagttgttttaatttgtgttttggggtttttaggtagtcgtttgtaggattgggtcgtagatatgtgttttgtgttttgcgttttgtattttggacgagggttgtttgtgtggaggtgcgttttataggcgtgatttatatttggtttagacgcggtcgtttggcgtcggtgggtgtaggagatgtggggataatttttatataacgttagtgcgtatagaagatttggttaagaggggcggtttattcgttgtttgtttaggtgatagtgttgataattttaatagttaatgattgagtgcggttgtgttaagtgttttttatatattattttatttaatttattttttttgatataaagagattattgttgtaaagatgagaaaatgaaggtttagagaatgttatgttttagattatataattaataaatagtagagagatttttgatttggattgaggtttgtttgattttttgtaattattgttggattgttttaataatatatttattattacggttatagattataattttagttatagttatagttgtttttttggttatagtgttttggattttaaagtttttttttgttttatttatatatttttttatatttatatgttattttgtttttaaaatagaattcgagatagtttataagagtatataatttataaaaagaagtgtgtgaaatgaaaaatgaggtatataagatggagttaaaaatgaatattatttgaaataaatgtattttatagagttaaatatttttgttataggtgggattaaaatttgttttttgtatttttagtagttaagtttaaagagaggttttgtttaaagtttaatttttattatatgtaagattaaaaataaaattgtttaagagaagattttttttttttgatattgagattagtaagaaatttttttagagaatttttatgaatattgggtgatataaagaattaagtttttagttatagttatagatgtagaaggggtaggtgaatgttaggagaatattaaatgatgatatttttttttatttattgggtttaaggtttaaatatttttagagttatttattatatatttttttttatgtaagttttataatttaaataattaagttggcggatgtttgaggatggtaaagatttgtatttatatatgaatttatttgattattttttaatagttttaagtttgtagttttagattttgtttatagagatttttttttattattaggtgaataattattttttattgatttttttattatagaatgagttttttattttatttaaatttataatatttatatttttaattgttatataatattttgtgtttttgttttatttttatagttaaattgtaaattgttcgaggttaagaattaggttttatgtttttttagtttttatagttgttaatttgaggtagtatttgtgggatattattaatgaattgttgtggatttgattttgaaaagtaaaatgtgttgattttaaagaagaaaataagattttttttgattattttcggagaaagggttttagtttttttttgaagttcgttgtttatggtaggagtgataagtttattggtattgttttcggtggttttcgtgggatttttattataggttattcgaggttttcggtatttttttattgttttatttttgaaaatagagttttttttatgttatttattgtattgagtttttggatagtaaaatttttgtgtgtggtaggggaataatttagttttatattgtatatgtataggtatgtatgttaaatggatgtttttatgtaaatgtattattatatttatatgtaaatatatatatatgtataatattaagtgtatatgtaggtagttatatatatttgtatatttatagtttatatatatataaatggttgaaattaaggttattaatttatttaatatatgagttttgttgagttttttaaagaaagaggtttatatatgtttagcgagtgttttttttttggattttttgagtattttgtattttatttgtatttgattttgtttttgggttttttcgagtttttttttgaggttttttggttatttttatttgagtaataagttttttttaaatatttaaaaaatgagaagtttgtttatgttttttttaattatcggttatgtgattagtttgtttggtgttatatgaggtatttttgattttaagaataaatttttttttttttttataaaatatattatttaatataatatttttataaggtagttaatgaggataatattcgtgtttttaaaaaaattattatattttaagttttgggatatatgtgtagaacgtgtaggtttgtaatataggtatataagtgttacggtggtttgttgtatttattaattcgttatttatattaggtattttttttaatgttattttttttttagtttttatttttagataggttttagtgtgtgatgtttttttttttgtatttatgtgtttttatcgtttaatttttatttatgagtgagaatatgcggtgtttggttttttatttttgtgttagttggttgagaatgatggtttttagttttatttatatttttgtaaaggatatgaatttatttttttttatggttgtatagtatttcgtggtgtatatgtgttacgttttttttatttagtttattattgatgggtattcgggttggttttaagtttttattattgtgaatagtgttgtagtaaatatatatgtgtatgtgtttttatagtagaatgatttataattcgttgggtatatatttagtaatgggattgttgcgttaaatggtatttttggttttagatttttgaggagttgttatattgttttttataatggttgaattaatttatttttttattaatagtgtaaaagtgtttttatttttttatattttttttagtatttgttgttttttgattttttaatgattgttattttaattggta

SEQ ID NO: 331 - DNA, 6104 bp, Artificial Sequence
  chemically treated genomic DNA (Homo sapiens)
tgttagttagaatggtaattattaaaaagttaggaaataatagatgttggagagaatgtggagaaatgggaatatttttatattgttggtgggagggtaaattagtttaattattgtggaagatagtgtggtaattttttaaggatttagaattagaaatattatttggcgtagtaattttattattgggtatatatttaacggattataaattattttattataaagatatatgtatatgtatgtttattgtagtattgtttataatagtaaagatttggaattaattcgaatgtttattaatgatagattggataaagaaaacgtggtatatatatattacggaatattatgtagttataaaaaaggatgagtttatgttttttgtagggatatggatgaagttggaaattattatttttagttaattaatataggaatggaaaattaaatatcgtatgtttttatttataagtgggagttgaacgatgagaatatatggatatagggaggggaatattatatattggggtttgtttgggggtgggagttaggggagggatagtattaggagaaatatttaatgtagatgacgggttgatgggtgtagtaaattatcgtggtatttgtatatttatattataaatttgtacgttttgtatatgtattttagaatttaaagtataatgatttttttaaaagtacgaatattatttttattagttattttataagaatgttatattaaatgatgtattttgtgaaaaaaaaaaaaagtttgtttttgaggttagaggtgttttatataatattaggtagattaattatatggtcgatgattaaaagagatatagataaattttttattttttagatgtttggaaaagatttattgtttaggtaggagtagttagaaaattttaaaaaagagttcgagggggtttagaagtagaattagatgtaagtgaagtgtagagtatttagaaagtttaagagaaaaatattcgttgggtatatgtaggtttttttttttagaaaatttagtaagatttatgtattgaatgaattaataattttggttttaattatttgtatatatgtggattgtaggtgtgtagatgtgtgtaattgtttatatgtgtatttagtattatgtatatatgtatatttatatataaatataatgatgtatttatataaaggtatttatttggtatatatatttatgtatatgtagtataaggttggattatttttttgttatatataaagattttgttgtttaaagatttagtgtaatgaatggtatggaaggggttttatttttaagggtgaagtaatagagaaatatcgaaggtttcggataatttgtgatggggattttacgaaagttatcggggatagtgttagtaagtttattatttttgttatagatagcggattttaaagaaaaattgaaatttttttttcggaaataattaggaaggattttatttttttttttgaggttagtatattttgttttttaaaattaaatttatagtagtttattagtaatgttttataggtattgttttaagttggtagttgtggaagttaaagaagtataagatttgatttttgatttcggataatttatagtttagttgtggaggtaagatagggatatagaatattatgtggtaattgaaagtgtaaatattatagatttaagtagggtaaagagtttattttgtagtagaggggttagtgaaaagtaattgtttatttggtaataagagaagatttttgtgaataaagtttaagattgtaaatttaggattgttgggagatagttagatagatttatatatagatataaatttttattatttttagatattcgttaatttggttgtttaggttgtagggtttatatgaggaagggtgtataatagataattttaaaaatgtttgagttttagatttagtgagtgagaaagagtgttattatttaatatttttttgatatttatttgttttttttgtatttgtggttgtgattgaggatttggttttttatattatttagtgtttatgaggattttttggagaaattttttgttggttttagtattaagaaagggggatttttttttgagtaattttgtttttggttttgtatgtgataggaattgaattttagataaggtttttttttaaatttgattgttagaaatgtaggagataaattttggttttatttgtagtaagggtatttgattttatgagatgtatttattttaaatgatgtttatttttggttttattttgtgtgttttattttttattttatatatttttttttgtaggttatgtgtttttgtaagttatttcgaattttgttttaaggataaggtagtatataaatataaggaaatatataaatgaaatagaggaaggttttaaagtttagaatattatggttaggaagataattatgattgtggttagagttatggtttgtggtcgtgataatgagtgtgttattagggtagtttagtagtgattatagggagttagatagattttagtttaagttagaggtttttttgttgtttattagttgtatgatttaaggtatagtattttttaaatttttatttttttatttttataatagtgatttttttgtattagggagagtggattaaatgaggtaatgtatagaaagtatttagtataatcgtatttaattattagttattgagattattagtattattatttggataagtagcggatgggtcgttttttttggttaggttttttgtgcgtattgacgttgtatgaaagttgtttttatattttttatatttatcgacgttaggcggtcgcgtttgggttagatatggattacgtttgtggagcgtatttttatataggtagttttcgtttaaggtgtagggcgtagggtatagggtatatgtttacggtttagttttgtagacggttatttagagattttagggtataggttaaggtaattttataattgttttttcgttttttttttttgtcggatttcgcgttttgatatatataggagaggttttggaggggagaaggcgtttttattgtagtgtttcgagtagcggtcgtaggaagaggcgtggaagttgcgggtcggttgcgggaaagggggttttatgggagtcgttaggcgtagttcgtttttcgagttgaggtggaggtcgacgggtataggtgttttgtaaggcgcgggcgtggtagtcgggagttcgtttttttttaatttttttgagatttaattttttggttaagagaggtcgaaggcgggtaggggtgagagaatcgcgcgaggcgtaggtcggggtattcgcggaaagggggtaggtttcggggaagagcggcggggcgtcgtacgttttttgtagtcgttagtattagcgtgttaggtggttgttaggcgggtgtgagcgcgcgcgcgaggtagagggggcgcgttcgtataaagtttgtgtttgcggtgtatttcggtcgggttcgtcgggttcgagggttggcgggcgtcggggttacgaggttcgggggggagagagtcggtaggcggcggcggtggtggcgggggcgatgcgtcgcgttcggtcgcgttaggtgagtcggtatcgggagcgcgggtcgcggttatgggtattttgggtaaggcgagagaggtttcgcggtgagtagaggcggtcgtggttttcgggagcgtttgtgtttttttttgggaaagaggtttttgttcgtcgttttaatatttcgagggaagttgagggcggaggggggtcggggtcggtcggagtttcgggatattagcgcgacgggcggacgtgtttagaacgttcggcgcgttgcgttcggggtttcggggagggagttggggttgaggggtggtagaggggcggtcgcgaggttagagttcgttcggtgagatttgttagggtcgaagtttttcgcggagtcggcgttcgttcgtcgatttttttttttatatttttacgttcggtatcgggatttttattcgcggatttttcgcgttgttcgtatttgttggggcgttgggtttcggttgcgttatttggtggtttttttcggttttgtttagaacggtcgaggagtttgtagggagttcgtagaggtggtatttttcggttgtttttgttttacggaagtttttagattcgtgggttagggaaatatatcgtttttcgtatgggaagttgtattttttttttttttattatgattttatagagggttttggataatagaagttgaagaaagagggatagtgagtgaaagggtttttggttaggtagttttgagtttgtagttaaaggattagaattaggtaattgtatgaataaaggtttggtttcggcgtaggggttggataagttgtgtattttataattttatttatatcgatattgatgggattgtgttttgtattattatatttagtagcggtaggaagtttgcgatgttggatttttcgtgtttataattttaggaacgaaggatttttggttttgtatgtacgttttgtttttttttatttaggtattttttgagggtttattattgtattttgtattagatttagaaggaggagtttagtatattaaattgagtattgtaaggggaagaggacgggattggaaggaatttatattagaagttaagagagttattttttattgtaaagaaagttgtggaagttttagtttttttgttttattttattttttatttttttaggcggattttataaaaagtttagtttgaaattgatttttattgagatatttatgtttggagaggattttatttaaattagtttagagttttgacggttttttttagtaaatttatggggttttggttatttttaggtttggaaaatatttttaagttaatttgtttttttcggggttttggtttttttatttataggaaaatatttggttattgtatttttttaaaaaatatgtttttatagatttagaggttatttattttatggattgttaaaatattttcgatttgtttataatagagtattttataaatttttgtttatttttattttattagaaaaggtagaacgatttgaggattttttataaggtaattagttaagagattgtatagtaagaaagttaggttttttagtttatggtgtagataatttttatttttttagaattttgaggttgtattttggtttttagtatttttttttttttttgtttttttatggtttagttttttgagtttttttgggttttatattttttagattgtttttgttattttttttttttttttattattttatattttattttgattttttttagttttggtaaaagtattaatttttaagaatttatttatgaaataaagcggttttttttattggtgatattaggaaattttattagaattagaaaatagggtaggattaggagttttgaatggttagtgttattaattaagaaagaaaatggaattttttttggatttgtagttattttttttttatttttagtaggaagagttttgttagtagatagagtttttagttgtagttgttttttttttaaggtttagggagaagtattgtggaaggtttgagagaaggagatttttataatgaatgattttatttttttaaaattttttttttattttgtttttggtggaggttttaatggtgataaaggtagtagttggggtagaaagttgagtaattttagtagtggttatgtagttttaggtgtagagagttgttagtgtttttaggaagggaagggcgtttatttggggcgtattgtatgggttataaggggttggtttttagtttgtttttgtagtggtggttaggtacgttgtttttttgattttggatttttatattgtagaagggggttttggaaaatgattataaagagtttgtttagttttagggatttgaggatagttttgagggtttgtaagaggaatatgggttgagatttagtttttatattattagttatgtttttgaaggattt

SEQ ID NO: 332 - DNA, 6104 bp, Artificial Sequence; identical to SEQ ID NO: 330
  chemically treated genomic DNA (Homo sapiens)

SEQ ID NO: 333 - DNA, 6104 bp, Artificial Sequence; identical to SEQ ID NO: 331
  chemically treated genomic DNA (Homo sapiens)

SEQ ID NO: 334 - DNA, 6167 bp, Artificial Sequence
  chemically treated genomic DNA (Homo sapiens)
ttttggttgttaggatttgtttgagttttttttgttttaagagaattaggaagagtttggtgtttatattttgattttttttggttgggaagagtgaaaggagtgttggagttggtttggttgggtattttattgagaagttggggttggatattttattttagggagtttggaatgagagtgggaaaagtcggggttgggggattttatgttaaagaagggtatggaatattaagggttagtttttagggaagatgaatttaagttttaagttaatagtatttgggtttttagtgtgtgggttatagggttgggagtagaagaggttaggattgagtaaagggtttaggttagggaggtggtttgtagttgttagatggaatagggggtatggttgtgttagtttgattttatgaggttttaggattttaggttagagttttttggatattgaggttgtagtagaggtagttagattggtttggatatagttagatgagattgtataatgttaggatgggtttggtgtttggtgttagagcgttttgtatatttcgttattagagtatttttacggggtgaggagtttatttttatttatgtttgttttttttaggggtttatagtttgtgatagttagtttttaggttgaggatataaaatatggaattaatatatgataggttaataagtttagtttagtgtgtattttttgtgtatttattatgtgtacggtttttgattttgttttagttatttaggggtttttagttaagagttggtttttatttttttaaaaattatttttggttttttagggaggaagttgtttgtttggatattggtaaaatggttttttgttgaaattaattttttattagatattagttagtttagttaaatagatggtttcgtagacgttttttaatttaggtattttgtatatgtttagtagattgagttaaagtttttcgtaggtttaagtttggttatagaatggtttggagttagatttattatgttaggttttgtggtttatgttatggggtatttaagttaaagagaaatatggagtagttgttggtattatcgattttatttaaagattgagaaaagaaatagcgatgaatttttgtatatatgtgtagtcggaaggagtaggatttagttttttataggagttaaagttggtttagaggtaaatggaatttatataaatatatgtgatttaagtatgagtttttaatagaaatttgcgttagattattatttgttatttttaattcggttttgtttttttgtgttaggagggttgttttcgtgaataaatttgaggatttttgattagtagtgttttggggaaatagttttgaatatgagtgtattttattaattagttttgtattgatgttttttttatgatttattgttaggatgatttaatatttgggttaagagttggatgatttgaaattaatgtagggttttatttttaggaatttttaggtattggatgaattttaggtttgattttgttattgatttatttcgttgttgggtaattttttttttttgttttttagttttttggtttgtaaaatgggaaggttgtatttttgaggttttgttcgattttaatatttggtgatttaaatagttttgtttaggtgggtataatttagatttaattgtgattcgtttagatttaattaaaatgtattgggcgtttatttttatatatattatttaatgtagggtttttaaaattttagaaaggtaggtgttattatttttattttgtagattataaaatggaaatttagagaagtttagtaagttaattgaagttatatagttaggaagttatatagttgagatttagttttaggtttgtttgtttttacgtttagggggttgagaatagataatatgagtttatgttaatttggttttttttattttttattttttgtttatttaggagtttagttttgtgatttagtgtagtgggttgagggatggaggggggatttggttggggttggggtttgggttgtaggtttcgggtaggtatgggtatatgggtagatattggttggagaggggtaagttttgaagggttgagagtaaattttttagtttggtttgggattggtttttttatatgagttttttaggttttatttgagttgaagtttaaggagttgtttgttttttgtttttttttttatttgggagtttttgtttattatatggtttgttatttttagggatttatttttaaaaatttttgtttatattttttagtttttagaaattattttttaatatttattggttgaaggtagggaaggaagagatgtgttagagagattgagttcggatttttgttttgataattgggaggaagattttaagcgatgtttttattttaattaatttaattattattagtttgtgtttttatgtagtagtggtttttgagatttcggttgtttttttagaatattgggacggttttaataatttgtatgacgttgggtaagtgaatttttttttttgggttttagtgtttttatttaggtaattattagtcgttaggttttatggatggaaggtttttgtttgtagtggtattttaggatttattattatttgttttatttttttagtggtaagggattggattagatgtttttggaaagcgtattaagtttaaaggtggttttttttgtaggtgttttttttttttttacgttagaggtttatttttatttcgttcgggttttttgttagagttaggtttggttttttagttttgtagtttaggaaattagagcgtagcgttatagtcgcgattgcggcggcggcggcggcgtagggggcgggggaggagagaagcgtttatttcgtttcgttgttttcgtagtagttttggttttagtttcggcgtattagagcggtttttgggaatttttgggtttgttgtttcggcggtcgttagttgggagtttattatcgttcgatggtatcgaatcgattcgtgtagttttataattttagtttaatttcgaggagttagcgtagatcgtttttcgtttttagttgcggcgaggtaagggttggtagcgttcggacgttttcgttttgttttttttatgtttaagcgcggggaattatacgttttcggtgtagaatagacgatcggggttattagggttgggcggtgggagtgggggttgggagtattatttttggttggacgtgtgtttagatttatcgtttttggtttttaggattttatttttttttgtatttttaggtgtcggtttttttgtattcgttttttacggggttcgttcggcgaagggtagtcgtagtttatatttatttttcgtttttaatttttgttttttttgttcgtcgtagttattcgtttggttgggagtaagttttttttttcgttgagggtgtagagagcgtttagggcgttaagagtagaggggttaaagtttaagcgttattagttagtcgaaggttttgagtttttagggtcgcggtcgggacgtagggaggttaggacgcgacgttcgttttatttgtttttttagcggttttttggtcgatagcgtcggtttgggggagggcgcgcggtcgtagacgtagttttttagtaggtaaagtttcgagggtcgcgagttcgagtcgttttcgaagtagaagagtaggttttgtagtagcgcgaattatttggtttgttattttgtgttgttcgaatttcgtttgtttaggtagtttttgcgcgtgtcgtttttgcgcgttagtagttttagggacgcgacgtggttattatttagtcggatttttttttgtatggtgtttagaggttagcgagattttacgcgtttatatttttttcgcgtagtagtttttcgttcgtgcgcgttgcgcgttgtttttttttggcgttcgttcgttcgttttttttagtttttttttttttttaaatatttatattttaggatttggcgtcgagtcgcggttttttgaatttagatatattatttttcgttggaatttttttttcgtttcgtagagttttagtattcggaagatgtcgttcgattttttttcggtgtcgggtaaattgagggattggcgatttgcgcgttggcgaggggtaggcggagttatgtgacgtcgatttttcgaagagttcgttttagtagcgcggatagggatatacgtacgtagtttcgtcgaggcgtagagtcgcgcgtaggttgtaatttggtgttttttttttttttttagatatatatatacgtatacgtatacgtatatatttaaattttgttttttttttttttatttttttttttttttttcggatgttaaaaagtaaattagattaattttcgtttaatttaatgaaatttcgaaggttcgttatttcgggagtttgcgtttttgcgttttatcgcggcgtattgtagatttggggttaagtgttagttgttatttttttttttaaaggttcgttttttttttttattttatttttaatacgaggtggaaggaggaaggtgggtggcgaaatagagttgtaaaagcgtttagttttagtttttgtatagttagtcgggttatattgaattttagtattcggttgtattttcggcggtttttttagttatttgaggatagtatagggggtgagatggggtggtggttggtgaacgttggttattttattttatattattttattttgagagttgttataattatcggcgttatttttcgtgtattttgaggtttggttggcgagtcgttgttgggagttttttgtaaatattttttaaagtttgaaggcgggttttaaacgtaggcgtcggggattatgggagtttttaaatagttgcgttggcgtaatgatattttaatgatagatttttcgtttttatttttagtttttattcgtttatatagttatacggtatttattcgagaacgttatagcgttcgtatgttgtatcgggagggcgcgcgggtcgtcgggcgagtcgggagttggggcggggagcgcgtatcgttgtttgtcgtagagggtagcgagttcgtttcgattcggagtaagtcgcgtttggttcgggcgttttgtagcggggatgggtgttcgcgtagttttgtgaaggaaagatattattttttcgtacggaaattgcgtatatttttttttcgatatatatatatatatatatatatatatatatatatatatatattttatatttatatatagtatatattatatacgtatagatatatattatatattatatatttatatattatatatattatatatatatattatatatattatatatatatatcgtatatattatatataaattatatattatatatattatatacgtatatatatacgttatatatatcgtatatataaatattatatattatatatatatattatatattatatattaatatattatatatatattatatatttaaatattatatatattaaatatatattatatattttatatatatattattttttatatttttttatattttattatatatacgttatatatattatatatagatattatatatatgttatatattatatatatattatatatatattatatattatatatatattatatatatgttatatattatatatatattatatgttatatatatattttttatatttttttatatttttcgttatatatatatataatttatattatataaatattatatattatatataatatttttatattttttatattatatattatatattatatatattatatatattatatttatatattatatatatttttatatatttttatatattatatatatttatatttatatatatattatatattagattatatattatatatattatatatattatgtatattatattatatatattatattatatatatattatataatatattttttttatagattaaatttgggttgtatatatatacgtattatattttatataatatatgtagtatattatatatatatatatatatatatatatatatatattttagtttggagttttagggaagggt

SEQ ID NO: 335 - DNA, 6167 bp, Artificial Sequence
  chemically treated genomic DNA (Homo sapiens)
gtttttttttagggttttaaattagggtgtgtgtgtgtatgtgtgtgtgtatgtgtgtgtggtgtgttgtatgtgttgtgtgaggtgtgatgcgtgtgtgtgtgtagtttaggtttggtttgtgggaggggtgtgttatgtggtgtgtgtgtggtgtggtgtgtgtggtgtggtgtgtatggtgtgtgtggtatgtgtggtgtgtggtttggtgtgtggtgtatgtgtgggtgtgggtgtgtgtggtgtgtaggggtgtgtaggggtgtgtgtggtatgtgggtgtggtgtgtgtagtgtgtgtggtgtgtggtgtgtggtgtggggagtgtgggggtgttgtgtgtagtgtgtggtgtttgtatggtgtgggttgtgtgtgtgtgtggcggggggtgtgggggagtgtggggggtgtgtatgtggtatgtggtatgtgtgtggtgtgtggtatgtgtgtggtgtgtgtgtggtgtgtggtgtgtgtgtggtgtgtgtgtggtgtgtggtatgtgtgtggtgtttgtgtgtggtgtgtgtggcgtgtgtgtggtggggtgtgggggggtgtggggagtggtgtgtgtgtagggtgtgtggtgtgtgtttggtgtgtgtggtgtttgggtgtgtggtgtgtgtgtggtgtgttggtgtgtggtgtatggtgtgtgtgtgtggtgtgtggtgtttgtgtatgcggtgtgtgtggcgtgtgtgtgtgcgtgtgtggtgtgtgtggtgtatggtttgtgtgtggtgtgtgcggtgtgtgtgtgtggtgtgtgtggtgtgtgtgtgtggtgtgtgtggtgtgtgggtgtgtggtgtgtggtgtgtatttgtgcgtgtgtggtgtgtgttgtgtgtgagtgtggggtgtgtgtgtgtgtgtgtgtgtgtgtgtgtgtgtgtgtgtgtgtcgggggaggggtatacgtagttttcgtgcggaaagatggtgttttttttttatagggttgcgcgggtatttattttcgttgtaaagcgttcgggttaggcgcggtttgtttcgggtcggggcgagttcgttgttttttgcggtagatagcgatgcgcgtttttcgttttagttttcggttcgttcggcggttcgcgcgttttttcggtgtagtatgcgggcgttgtgacgttttcggataaatgtcgtgtaattgtgtaggcgaatgagagttaaaaataagaacggaaaatttattattaaggtattattgcgttagcgtagttatttgaaggtttttatggttttcggcgtttgcgtttgaagttcgtttttaggttttggggggtatttgtagaaaatttttagtagcggttcgttaattagattttagggtgtacggggggtggcgtcggtaattatggtaatttttaaaataaaataatataaaataaagtaattaacgtttattaattattattttattttattttttgtattgtttttaggtagttggggaagtcgtcgggagtgtagtcggatgttggaatttaatgtgattcggttgattatgtaaagattaggattggacgtttttgtagttttatttcgttatttatttttttttttttatttcgtattagaaataaagtggggggggggggcgagtttttggaggagaaaatgataattggtatttaattttaggtttatagtgcgtcgcggtggggcgtaaagacgtaaattttcgggatggcgagttttcggggttttattgggttaaacgaaaattgatttgatttgttttttaatattcgagggagagaaggggagatgaggggagggagggtagggtttgagtgtgtgcgtgtgcgtgtgcgtgtgtgtgtgtttggggagggggaggaggtattaagttgtagtttgcgcgcggttttgcgtttcggcggggttgcgtgcgtgtgtttttgttcgcgttgttgaaacgggtttttcgagggatcggcgttatatgatttcgtttgtttttcgttagcgcgtagatcgttagttttttagtttgttcggtatcggaggagggtcgggcggtatttttcgggtattggggttttgcggagcggagaagaggttttagcggggaatggtatatttggatttaagaagtcgcggttcggcgttagattttggagtgtagatatttggggggaggggagagttagagggagcgagcgagcgagcgttagagagaggtagcgcgtagcgcgtacggacggggggttgttgcgcggagaagatgtaagcgcgtggggtttcgttggtttttgagtattatgtagaaggggattcggttgaatgatggttacgtcgcgtttttgggattgttggcgcgtaaggacggtacgcgtaaaggttatttgagtaagcggagttcggataatataaaatggtaaattaagtggttcgcgttgttgtagaatttgtttttttatttcgagagcgattcgagttcgcggttttcggggttttatttgttggagggttgcgtttgcgatcgcgcgtttttttttaagtcggcgttgtcggttaaggagtcgttggagaaataggtgaggcgagcgtcgcgttttgatttttttgcgtttcggtcgcggttttgggggtttagggttttcggttggttgatggcgtttgaattttggtttttttatttttggcgttttaggcgttttttgtatttttagcgagaggggaggtttgtttttagttaggcgagtgattgcggcgggtagagggggtagggattgagggcggggagtagatgtgggttgcggttgtttttcgtcggacgagtttcgtgggaggcgggtatagaggggtcgatatttggagatgtagaggaagatggggttttaaggattagagacgatgagtttggatatacgtttagttaaaaatggtgtttttaatttttatttttatcgtttagttttaatagtttcgatcgtttgttttatatcgggaacgtgtaatttttcgcgtttaggtatgggaagggtaagacggaggcgttcgagcgttgttagtttttgtttcgtcgtagttgagggcggagagcggtttgcgttagtttttcggagttgggttggggttatggggttatacgggtcggttcggtattatcgagcggtggtgggtttttagttggcggtcgtcggagtaataagtttaaagatttttaaggatcgttttgatgcgtcggggttagggttagggttgttgcggaggtagcgggacgaagtgggcgttttttttttttttcgttttttgcgtcgtcgtcgtcgtcgtagtcgcggttatagcgttgcgttttggttttttgagttgtaaggttgaagagttaggtttggttttaatagggagttcgggcggggtgggggtgagtttttggcgtgaagggaggaggggtatttgtagagagagttatttttaagtttggtgcgttttttaaaagtatttggtttagttttttgttattaggaagataaagtagatgatagtggattttaaaatgttattgtaggtaggaattttttatttatagggtttaacggttggtgattgtttagatggggatattgaggtttagagagagaaatttatttgtttagcgttatgtaagttgttgaggtcgttttaatgttttgaaaagataatcgagattttaaaagttattgttgtatgaagatatagattggtggtgattgaattggttgaaataaaagtatcgtttgaagttttttttttaattgttaggatagagattcgagtttagtttttttagtatattttttttttttttatttttagttaatgggtgttaggagatagtttttgaggattgggaagtgtggataggaatttttgagggtgggtttttggggatgataagttatgtggtgagtaggggtttttagatggaaagaagagtaaagagtaggtagttttttaagttttagtttaaatggagtttggggaatttatgtggaagagttagttttaggttagattagagaatttgtttttagttttttagaatttgtttttttttagttagtgtttatttatatatttatatttattcggggtttgtagtttaagttttagttttagttagattttttttttattttttaatttattatattagattatagagttgagtttttgggtaggtaggaagtgaggggtgggggaagttaagttggtatgggtttatattatttgtttttagttttttggacgtgaaggtagataggtttgagattgaattttagttgtatgattttttggttgtgtgattttagttaatttgttgaatttttttgagtttttattttgtaatttataaaatgaagataataatatttatttttttggggttttgagagttttatattaaataatgtatatgaaagtaagcgtttaatatattttagttagatttagacgaattatagttgaatttgaattatatttatttggatagagttatttaggttattagatgttaaagtcgaatagaattttagagatatagtttttttattttatagattaagaaattgagaggtaaagaaagggagttatttaataacggggtaaattagtggtagaattagatttagaatttatttaatgtttaagaatttttgaaaatgagattttatattgattttaaattatttaatttttggtttaggtattgaattattttagtagtagattatgggaggaatattagtgtaaaattaattgatgagatgtatttatgtttagagttgtttttttagaatattattagttagagatttttaggtttgtttacgagagtagtttttttggtataagagaatagaatcgggttaaaagtagtagatgatggtttggcgtaaatttttgttaaagatttatatttaaattatatatgtttatataggttttatttgtttttagattaattttgatttttgtggaaaattagattttgtttttttcggttatatatgtgtataaaaatttatcgttgtttttttttttaatttttgagtaaaatcgatggtgttagtagttgttttatgtttttttttgatttgggtgttttatggtataagttatagagtttagtatgataggtttaattttaggttattttgtgattaggtttgagtttacgagaagttttggtttaatttgttgggtatgtatagagtgtttgagttgagaggcgtttacgaagttatttgtttaattagattagttggtgtttgatgaagaattggttttagtaggaagttattttattaatgtttaagtagatagttttttttttgaagggttagggatggtttttgaaggaatagaaattaatttttggttgggaatttttaagtggttggggtagaattagggatcgtgtatatagtagatgtataggaaatgtatattaagttggatttgttagtttattatatgttaattttatattttatgtttttaatttagaagttgattgttataggttgtgagtttttgaggaagatagatatagataagggtgagttttttatttcgtgaagatgttttaatagcgggatatgtaaggcgttttggtattaaatattaagtttattttaatattgtgtagttttatttggttgtatttagattagtttgattgtttttgttgtagttttagtgtttagggagttttagtttaggattttaaggttttatgaagttagattggtatagttatgttttttattttatttggtagttgtaagttatttttttggtttgggttttttgtttagttttgattttttttgtttttagttttgtagtttatatattgaaagtttaagtgttgttgatttagagtttgggtttattttttttagaggttggtttttggtgttttatatttttttttggtatggagttttttaatttcgattttttttatttttattttaagttttttgaaataaaatgtttagttttagttttttagtagggtatttagttaaattaattttagtattttttttattttttttaattaggaagggttaaaatgtgggtattaggttttttttgatttttttaggatagaagagatttagataaattttggtagttagaa

SEQ ID NO: 336 - DNA, 6236 bp, Artificial Sequence
  chemically treated genomic DNA (Homo sapiens)
ggttttcgtttggttgattttcgttttattttaatttattttttaataggttttattacggtagtatatttgcgtatttacgcggtgaaggattacgggttttaggtttcgcgggttgatcgtattttgtgtaagttgtgtagcgtgtattgtaagatttttgtttagttggtcggttatatgtagatttatttggggggggtcgttttttttgtttcgggagacgttttttagttatagtttatttgttgagggggattttcgtatttattaggtaaggcgtggggtatggttggggggcgggatggggggtgtgggggataacggggtttaaagggtttaataggggattttaggaaggcgagggatgtttatgtattatttaggttagggagatttttgggtatagggaggatttttgagaattgttttgtttgggtgaggatgtaggttgaggtttttggggtttagataggaagtgagtaacggttgtgttttaggggaagtaggttgggaaggtgtggggtgagggtaaggtttttgttatttagatcgcgttgtgattcgtggtgttttttttgtgtaggtattggtgaggtttgtttaatggcggcggtagcggtagcggcggtagcggtagtagcggtagtagtagtagttttttttatagttgtgggttttttttcgggggcggagggggtgtttgtgagtttttagttattttttttttaattttggtgagttttaagttggttgcgggggagaggggagaatggagtagagttttttggtataagttttttttttttttttttttttattaatttttatttttttattaattaaggagtttttagaaggaaaggaggaagaaatgtttttttaggggaattcgttaggttttaacgatttgttttttttgttttttttttgttagatttgattttatataaatttgttttttcggttgtgttgaagttttttggatagtgggtaggggtggtagaggatacgagtagttattgttcgtatttttttttttttttgtaagtttatgttttgtttttttagggatttgtgagttttttttttcgacggtttttttttttttttttagttttttttttttgttgtttgtagttttttttcggggagttggtgtttttttttttttttttttttttttttagggggagggaggagaggaaggagggggattagagttgttttaaagagggaaagcggtgaggtttgaggaggggtagaagtagggtcggtaaaggttgtatttttataaggtggtatggggggttggggttaggttttgaatatcgttttatttgagaatttgttaggggaaaaagttaaggggagtaggaggaagagttaggagggttagaggtagagaagagatggagttttaggggttagggtgagcgaggggtttagggtttagaggtgttttttgggggcgggggaatgtagttagtgtttttttttttttttttattttagttttagttttggttttgtttttttattttttttttttacgatagaagaagttgtggttttggttatgttatcgtgtttttgtgttttttgtatgtattttattttttattttttttttttgcgcggattttattataataaattttaaataaaattttgtttttggttttggattgaatgaattgtttttattaagaattgtcgttaattttaagggttttttttcggtttggtgttcgttaatttagttttgttttgttttgtgaggttgtgaggttttggtttcgttttttttaggggtagttttattggcggtagtatagatatagggcggggttaaggttgtggttgtggagagtaagttttaggtttttggggaatttttaattcggataggtttagaatagtttttggaggtttgaagaggtttcgttagaaatttaaatagagttgttagacgggaatgtcgttttttttcgtttatatttatggtcgttgtttagtttttagtcgtatttttttttacgcgcgttacggttttgaggttatggtgggtggatgcggttgcggaaaggttggggagttcgagttttaggattgggagtagcgaggtagagaatgaaagttgtatttgttttttattttgggtatgggttattttgtgtttatacgggtttttttgtttagttttttttgttttttggaatttttttttttgttttcgtttcgttttttttagggttttttttttgagttttttagcgttagtttttgtcgtttttttttgtaggttttattttttttaaattttattttgttttttttttgtagttttttcgcgttttgttttattttttttgtttttttgttcgtagagacgtttttattcggttttgtttgttttattggtttcgttttttcgtagaatttttttcgttttttttaaattttcgttttttttaggaatttcggtgatcgttggcgggaggggtcggggatttaagaaggaggcgttttttttggaggcgcgcgtgagaaggggtagggagggggcgcgagtggttttcgggtcggttgtttgggtaacgcgtggtttttttgggttggcgggaggggtcggaggttcgcgaggggcgggggcggcgacggcggcggagcgtaggggaggggatcggagaggaggggatgagtatacgggagaggagaagagggagattcgtcgtttttttttttttttagttgatttgttttttttcgggttgcggttgttgtaaaagttagtagcggtagcgggagttgttcggaggtcggcgtcgaggtgagattcgggtagattgaggttgcgggtaggagtggatcgatcgacggttgacgtcgggcggattgtacgggaatgcgggtgtttggagggttggtggtggtgttgggcgggttgaattatcgggaggaggcgttagtttatcgaaggcgagggaagtttcgggagaggggttgataggggatcgaaggagataattaggttttttagaaaggggcgggagcgttttcgttttaaacgcgtagtaagaaaattcgtatcgtttgggagtttagggaggaggggaggatgtagagggagtggaatgcgaatgtcgggttttttgtttagtcggtttgtcggagtgttatttgtatagttcgttgattttggggtgttgggatttgagagtttggattttgttggatggatttagggagagattttggagaaggttttgtttataaaagggttaattttttttagggttttttaagtagaagattttgagtagagtatttttttcgtagggatgttttattttaaggtaaaggaaattttaatttttttttttttttttagaggtagtgtaaggttggttttgagataggaatgtggtttaattgggtttgtagtgttgagcgtttttttttttttttattttaagtttattttttttttttttagggtttgtcgttgtttttgttattttattttttttataggggttttttttttttttttattttaagatggtagttagtagttttgagatttttgagatgaagggggttgaggagagttttaaggttttaggcgaagggtttggttattttgaagttgaaattggttttttttaggttttagtaggggtattagattagttagaggtttcgtagttaggtttaaatattattgcggtttttgtggatttagggtttaaggttgggttggttttagaaattatagagatttcggttggggttttagaaatagtttaggttatagattttagtttaagtttaggaggggaattaaaggttaattgtagtttcgaagatttatgttaagaaatagtgtttaaattagaagtgagtaaagaggttattgtagattaggggtttaggttggagtttgtagttttatttgaattagttttagagtttgttttttaattagattttcggttagatttttagtttatttttaagttagttttttaattagagttttttatttaggaggattttatttttgagattttgtttgagagtgtaggggaaaagtaagagaatggggtagtggtgtttttgtaggttggtgatggggaagagggtttagtttttgagttttatttattatttttaaaaaaattttttttagttaatggggttttttttcgagtgttgtagtagttggttgaggaggatcgaatgagaagggtatatagtgggtatttaggattttttcgaggtagtttgagtcgttattttagtttttagttggtaggttttggggtggaggggggtgaaggtatttagaaatttcgggattatattatttttgttattttgttttgtttttgttttatgtggtttgttaatatcgtggttttcgtttatgttgttatggtgagttttatgggattttagtttaggtttgttgtggtttttagtttttcgttagcgttgtaatagagtttttggagtaattatgttttttttttttttttttttttgtatggattttatttttttaattttagggtttttgtttgtttttttttaggatttaattttttgagttattattgttttgtttttttgggtgggagggatatggaaatacgtgttatatagtttcgttgatttgtgtttttttttttttgtttttttatttttttttttttttttattcgttatttatggggttggttttttttttttttggatgatttttttatttgattttttttgggttggttttttttgatttcggttatgtgtttttatttttcgttttaattttagtttcggaatagtttgtagtagggggacgtggacggggtttagcgtttgggtcgggtagttaagtttttaagtatcgtggcgttggtggggggagtttttattattatcgttttttgcgttattaatttaggcggtgagtgggggtttgggataggtaggggaggaatggaagggttggtaagggtagttttattaatttttgtttttgtttttttttgtttgttttttttattttttttttgtttttttttgttttttttttttttcgtttgtttttttttttttttttttatagtgtataagtgaggggttttgtttcgtattttaagatttttttttttgttgggagttgttttgggtttattttttttttggggggagtttaattgatggttttggtttttatttttaaggattaagggagtttgagcggttttgtttatagtttttgttttgtttttgtattttgttaggtttttttgttaattgtaggtttgttttatttttgtattggttttaatttttttgtattaatgtttgtatttttttcggttttttggttttttatttttgtatttttggaaatttttttgtattttggaaatttttttgaatatttttttaattttgcgtttttagtttttttgtattttttttggtttttttgtattttttttagttttttaaattttttggatttttattttggtcgtttttttttaatttttattgttttggtattttttaatttttagttttttttttttttttttttttattatttttttttttttttttacgtttcgttttttttttttttttgtttttttattttttttaagtatttttttttttaatttttcgttatcgtttattttgtaaaattgatagtatttagacgaggtttgggggtagggagtagtgttgggagagggttttttaattttaggttcggattgttttttgttgggattatttagggtcggatatttaagggtgtttggtaggtcgtagagttggtaagtcgggtttcgtatggggattcgggtgagggtggcgagtattggtttcgaacgtacgtaggggagaagggagggacgcggcgttgatttttttaggttagttggagttgattcgtttatttgggttttttaattttagttcgcgagttttttttttgaaggtgtgggggttagatttatttacgtgtttcgtaatgaaataatttaaaaaataggattaaagcgtttattggtaggagcgagggcggggcgtcgcgttttataattattttttaagatgatgggggaggtttgttgtacgcgatagttcgttgaggaggcggggatcgagttataacgcggttcggatttggcgggggtttttttttttaa

SEQ ID NO: 337 - DNA, 6236 bp, Artificial Sequence
  chemically treated genomic DNA (Homo sapiens)
ttaaggaaaaaaattttcgttaaattcgaatcgcgttgtagttcggttttcgtttttttagcgggttgtcgcgtgtaataaattttttttattattttagaaaataattatagagcgcggcgtttcgttttcgtttttgttagtgggcgttttggttttattttttggattattttattacgaagtacgtgaatgaatttagtttttatatttttaagaaagaaattcgcggattggggttgaaaagtttaggtgggcgggttaattttagttgatttggaagggttagcgtcgcgtttttttttttttttttgcgtgcgttcggaattagtattcgttatttttattcgagtttttatacgaggttcggtttgttaattttgcgatttgttaggtatttttgggtgttcgattttgggtggttttagtagagaatagttcgagtttggggttggggagtttttttttaatattgttttttgtttttaagtttcgtttaagtgttgttaattttgtagagtaaacggtgacgggaggttggagaagaggatgtttaagggagatgaggaggtaggaagaggaagggggcgggacgtggagaggaaaggggagatgataaagaagggaaggaagagaggattgagggttgagagatgttaagataatgaaagttgggaggaggcggttagggtggaggtttagagaatttggggggttggaagaagtgtagggaggttaggagagatgtagggaggttgagagcgtagagttggggaggtgtttagggaggtttttagagtgtagggaggtttttagaagtgtagggatagggggttaagaggtcggaggggatgtaggtattagtgtagggaggttggaattagtgtagggatgaggtaggtttatagttggtagaggagtttggtaagatgtaggagtaggatagaagttgtaaataaggtcgtttaggtttttttggtttttaggggtgggggttagggttattagttgggttttttttaggggagggatgggtttaaggtagtttttaataggaagaaaagttttgggatgcggggtagagttttttatttatatattgtgggagaggagagggaaggatagacggggggagggggagataaggagagataaaggagaggtaaggaggatagataggagagagtaggggtaggggttagtaaagttgtttttgttaatttttttattttttttttgtttgttttaagtttttatttatcgtttaagttgatgacgtaggaggcgatgatgatgaggattttttttattagcgttacgatgtttaagagtttggttattcggtttagacgttgggtttcgtttacgtttttttgttgtaggttgtttcgggattggggttagggcgaggggtggaggtatatagtcggggttaggagaagttagtttagaagggattaggtggaaaagttatttagaagagagagaggttagttttatagatggcgggtaagggaggaaggaggagtgaaggggtagggggaggagggtataggttagcgaggttgtgtgatacgtgtttttatattttttttatttaaaggggtagggtagtggtggtttagagggttaggttttagggagaggtaaataaaggttttggaattggggaggtgggatttatgtagagaggagaggggaaggaaggtatgattattttagaggttttattgtagcgttggcgggaagttgggagttatagtaggtttgggttagggttttatggggtttattatgatagtataagcgaaggttacgatgttgataggttatatggggtagaagtaggataggatggtaaggatgatgtagtttcgaggtttttgggtgtttttatttttttttattttaggatttgttaattgggagttggggtggcggtttaggttatttcggggagattttggatgtttattgtgtgttttttttattcgattttttttaattagttgttgtagtattcgggggggggttttattggttgggggggatttttttgagggtggtgagtgaggtttaggggttgggtttttttttttattattagtttgtaggggtattattgttttatttttttgttttttttttatatttttagatagaattttaggggtggggtttttttgggtagggagttttggttgaagggttggtttgggggtaggttgggaatttggtcgggggtttggttggggagtaggttttggggttggtttaggtggggttgtagattttagtttggatttttggtttgtagtggtttttttgtttatttttggtttggatattgttttttggtatgggttttcggggttgtagttggtttttgattttttttttgggtttaagttgaggtttgtggtttgggttgtttttgaggttttagtcggggtttttgtggtttttggagttagtttagttttgggttttgagtttataggggtcgtagtggtgtttggatttggttgcggggtttttggttggtttggtatttttgttaggatttggggagggttagttttagttttagaatggttaggtttttcgtttggaattttgggattttttttaattttttttattttagagattttagagttgttggttgttattttgagatgggagaggggagagagtttttatggggaggatggaatagtagagatagcggtaaattttggaagaggaggagataggtttggggtgaggagggaagagggcgtttagtattgtaggtttaattgggttatatttttgttttagggttagttttgtattgtttttagggagaggaagaaaagttggggttttttttgttttagggtgggatatttttgcgggaggagtgttttatttaaagttttttgtttggagagttttggggaagattaatttttttgtaaataggattttttttagggtttttttttgggtttatttaataagatttagatttttagattttagtattttaaaattaacgagttgtgtaaatagtatttcgataggtcgattgggtagaggattcgatattcgtattttattttttttgtattttttttttttttttgggtttttaggcggtgcgggtttttttgttgcgcgtttagggcgaggacgttttcgtttttttttgggggatttggttatttttttcgattttttgttagtttttttttcggggtttttttcgttttcggtgggttggcgttttttttcgatggtttagttcgtttagtattattattagttttttagatattcgtattttcgtgtagttcgttcggcgttagtcgtcggtcggtttatttttattcgtagttttagtttgttcgggttttatttcgacgtcggttttcggatagttttcgttgtcgttgttggtttttgtagtagtcgtagttcgggagggagtaagttagttagggagggagggaggcggcgggtttttttttttttttttttcgtgtgtttattttttttttttcggtttttttttttacgtttcgtcgtcgtcgtcgttttcgtttttcgcgagttttcggtttttttcgttagtttaagggagttacgcgttatttaggtaatcggttcggggattattcgcgttttttttttgtttttttttacgcgcgtttttaggagagacgttttttttttaagttttcggtttttttcgttaacggttatcgggatttttggaagagacggggatttgggggaaacggagagggttttgcgaggagacgggattagtgagataggtaggatcgggtggaggcgtttttacgagtaggagggtaaggaagatggggtaagacgcggggaggttgtagaggaggagtagggtggggtttggagagaatggagtttgtagaaaggagcggtagaaattggcgttggaaggtttaaaaaaggggttttggaaaggacggagcggggataggaaagggaattttaaggggtaggaggagttgggtagaggagttcgtgtaaatatagagtggtttatgtttaggatgagggataggtgtagtttttattttttatttcgttgtttttagttttagggttcggattttttagttttttcgtagtcgtatttatttattatggttttagggtcgtgacgcgcgtggggagggatgcggttgggggttgagtagcggttatgagtgtggacgggggagggcggtattttcgtttggtagttttgtttgggtttttgacggggtttttttaaatttttaggggttattttgggtttgttcgagttgggaattttttagagatttggaatttgttttttatagttatagttttggtttcgttttgtatttgtgttgtcgttagtaaggttgtttttggggagggcggagttagaattttatagttttatagggtagagtaaggttggattgacggatattaggtcgagaagaaatttttggggttggcggtagtttttagtgagggtaatttatttaatttagagttagaaataggattttatttaaaatttattgtaatggggttcgcgtaaaaggaaggggtggagggtggggtatatgtaggggatataggaatacgatgatatggttagggttataattttttttgtcgtggggaagagggatgaaaagataagattagggttggagttggggtggaagaggggagggggatattggttgtattttttcgtttttaggaagtatttttaggttttggatttttcgtttattttggtttttaagattttattttttttttgtttttggtttttttggtttttttttttgttttttttgatttttttttttgatagatttttaagtaggacgatgtttagggtttgattttaattttttatattattttatgaaggtataatttttgtcggttttgtttttgtttttttttaaattttatcgttttttttttttgggatagttttgatttttttttttttttttttttttttttttggaaaaaaaaaaaaaaggaaaagaaagtattaatttttcggggaggggttgtagatagtagggggagaggattggaaggagagaagaggatcgtcgagggaagaggtttataagtttttgggaagatagggtatgggtttatagagaggagagggggtacgggtagtggttgttcgtgttttttgttatttttgtttattgtttaggggattttaatataatcgaggggataggtttgtgtggggttaggtttgatagaagaggagtaggagaaataaatcgttaaaatttagcgaatttttttaagaaaatattttttttttttttttttttggaggttttttggttggtagggaaataggagttggtgggaaaagaggggggagaggagtttgtattaagggattttattttatttttttttttttttcgtaattaatttggagtttattagggttgggagggaagtggttgagagtttataggtatttttttcgttttcgagagggagtttatagttgtgggaggggttgttattgttgtcgttgttgtcgttgtcgtcgttgtcgttgtcgtcgttattggataaattttattagtatttgtataggagaaatattacggattatagcgcgatttgaatggtaagagttttgtttttattttatatttttttagtttgttttttttgggatatagtcgttgtttattttttatttggattttagaggttttagtttgtatttttatttagatagagtagtttttaaggattttttttgtgtttagaagtttttttagtttgagtggtatatgggtatttttcgtttttttgagattttttattgggttttttgagtttcgttgttttttatattttttatttcgttttttagttatgttttacgttttgtttggtgggtgcgggggttttttttagtaggtgggttgtggttggggggcgtttttcgggatagggggggcggttttttttagatgggtttgtatgtggtcggttagttgggtaggggttttgtagtgtacgttgtatagtttgtataggatgcggttagttcgcggggtttggagttcgtggttttttatcgcgtggatgcgtaggtatgttgtcgtggtgaagtttattggggggtggattgggatggggcgggggttagttaggcggagatt

SEQ ID NO: 338 - DNA, 6250 bp, Artificial Sequence
  chemically treated genomic DNA (Homo sapiens)
agaaagttagatgttaaaatattgagtaaaatggtgttgttaataatgaaattagtattgtaatatggagaatttttatgttaataattttaaggtaaatttgaaaatatatgttttagatataaatttttttattttttatttgtgatttatattttttttttttatttattatatttttttttattaaaagtaatataaagggaaaacgattttgaaattaaagtgagatttatatattttagttgtaattttaataagatattattatgattaagtttatatgatttataatttttttaaattatgtaatttataatagtttaattgaaattatttttggtgatttatagaggattttaaaaattaggttttattttattaggtattttttgttttttagaaaaatgttgttatatgtttaatcgatattgagtattgtaatatagtagtatttgtaggataataaatataaaaaataaataataaagtatgttttttaattatgaaattatttgttagttttgattaatttaatttaatggtaaggttaagtaataaattatattgtaagttgttaaataaattgaaaaaaaaagttattttttaaaagaaaaatatttataaggtttatgtttattattgataattgatagtatttttttgagatttatttttttttttttttatttgaaaattagatttgatttttaagatttatttggtgataatatttgttataacgtattttagtatttttttttatgttgttttagaagtgttttaaatgaatgtttatttttttatgttataattatttgaagatggatatcgtttgatttttgtatttttaatgttacgtataatatttgtgtgttttttaaatatttcgtttaaaaaaaaaaaaagaggtcgggtttggtggtttaagtttttaattttagtattttgggaggtcgaggtgtgttgattatttgaggttaggagttcgagattagtttgaataatatggagaaattttatttttattaaaaatataaaaaattagtcggacgtggtggtatatgtttgtaattttagttatttgggaggttgaggtaggagaattgtttgaattcgggaggcggaggttgtggtgagttgagatgacgttattgtattttagtttgggtaataagagtaaaatattgttttaaaaaaaaaaaaaaagaaagaaaaagaaaagaaaagaaaaaagaaaagtttatgtatttttttggtataggtggtttgtattttgtaaataaaaaataaatatatgggttaggagcggtggtttatgtttgtaattttagtatttagggaggtttaggtgggcggattacgaggttaagagttttagattagtttggttaatatggtgaaatttcgtttttattaggaatataaaaattagttgggcgtggtggtatatgtttgtaattttagttatttaggaggttaaggtaggtgaattgtttgaatttcgggaggcggaggttgtagtgagttgagatcgcgttattgtattttagtttgggtaatagagtaagattttgttttggaaaaaaaaaatggtttaaaaaattttacgatttgtaaatgttatgaattgatttagaaagtaatgtttttttttaaattgtatgtttttttgggatttatgtttatttttatttacgaataatagattaataatataagtgaaatagttgtgttagggtggtgtaaatataattttaatattttaaaatatatatttattttttttattaatatttatttttaaaatgaagatttttattttatttttttattttaattataattttattttaaaatgttttttaatttgtattgatttattattttttagtattttttaataagattttttgttttttattagttatttgtaatttattttaatcggaaagaattataagatagttgtttaagtgataatatttttaatatttttagtatttatattaatttattataatttttgtttattaaatataaagaaaaaaaatattatatatggtattatggtgaaatttgggaattagtataattatgtaagtttataattttatatattgggaaaatattattttatattttattattaattaaagtattttatacgttaatttttgaaagataaaaggattttaaaatatattaaaagtttacgtaaatttatttttattaaagtttagattttttaatgtatttttatttttaaaatttaatttttttggaaaatttaatgaaataggaattttttattttttagtttttaaatttattaaattcgttatttttgataatttttttgtttaaaagtgtaaggaaagtatttatagtggtagtattacgagttggtttattaggttttcgtttttttttattttttaagtatttttaataagttataattgaaataattaagaacgtgtttaggatgttcgtaaaaatataatttttaagattttaattttagttttcgttttttaacgagattattgtataagtattttttatagtagaaattttagttttttttttcgaggattaggaagaattttggagttttgggttttttttttttggttttggtaggaatatataatattagatttgttttttattaaggtaagaattttgattatatttttttttttaaataagatttagttattttattttttatcgtttttttaatatttttttcgaatataaagttagggagtaaattttttttaggcgtttagttattatatggagttcgtttagtagtttttttttatttagagataggtttattttttttattttttttttaaatttcgagagttatatttttttttatattgaaaatttagggacgcgttattatcgttaatatttcgtttttaaatatttgatagatttagtttttttgttttttttttaaacgagcgttttaggcgtcggtttaagttaatttttttgggtttttatcgagtttttggtgggggtcgaagttcgggttattcggaggtcgcggcgttagtacgaaaggaattacgttggttaggaataggagagattgttttatgttttcggtttcgttatcgattttatttttttgggtagttttcgtttgacggggtttcggaaaattgtttatatcgggggaggacgggattcgttcggtttagttttttaatttttttttttttttcgcgtcgtttattgggaagattttatcgttaggttcgacgtttttagaagtgtaggtggcgttattaaaggtcggtttagttagttttcggtcgtcgttgtttttcgtattatttatagtcggaagtcggttgtcgcgcggtatttcgggaggtttcgtttgtttcgttttacgtcggtgcgtcgcgggtttttggttcgttgtcgtgttcggtttcgttcgttacgtttagttggggttcgttcggcgtttttttggacgtagacgtatgagttttaattttatttagttcggtttggtttttgttttcgggtgatcgcggaatgggggggcgggagttagcgagtaggtttttaagcgcgtttggtcgttttttttgttttgatgtttacgtttggttaggatttttgttgtttattttattaaaggagttgtagaaagcggtttggggtttagcgatttgtttagggcggacgaggaggcgcgattggttcgatgtcgtaggttttttgtttagtgtgtttaggtgggagggcggggatatgaatcgagttatagagtgttttgggtacggatttttcgtttttttcggtttcgggtttcgagtttcgagtttcgagttcggttatcgaagttcgtgttattcgttagtttttgcgagacgagtttttcgagcgtagtttaggtatttggtttagggttttattgtcggagtcgtttgaggtttttattcgtttgtcgttacgaaaaaggttttggggggattaataagtattttttgaatgtatatttgttttacgtttttgttgtagggagagggtttgtagatattttaataaatagaattttaggattttatttgtgagtataagagttggaatttttttattaattttttaaaatttaattttatatttggtttatttagtttagattggaaattttttaaggtagtttgttttgtaattttttgtatgattttagttttgtatagtttagtgaatgtttatggtattgaataaaatagtttaaaaacgttgggtatatgttgttgttttatttagtttaattaaagtttataaaagtaggatataatacgttttttatttaagagtgagatagtttttattatgaaacggtaaattgttaggaatattagttttatttaagttttaaggtttatttttaataaaatatttaaattgtggttaaaatttatgttaatggtggtttgtcgtagtaaaatattagcgttttttttaataatatattgttggttaaaattaatcggatttggtttgtatatttgaagtataaaatatttttattaaatatatttattagtggtatatttagttaaaaagtaagtagaattttatatgtaaattgtatataatttgtaaaaattgtattttataagaatgtgatagttgagtacggtttttggggggtttttttggtgtattataataatgttatttggttttttttttgaatatttagttattataatgttcggtttgtaattttagtagatcgtagattgtattattttggtatttttaatagtttttgtatagtgttttgtttatagaaggtatttagttgtttagtaaatgtcgtttaaaaaaaaaatttcgatttattttttttttttttttttgggggggggtggtgggggaaagagtttcgtttttattgtttaggttggagtgtaatggcgtgattttggtttattataatcgattgaatattttttaggtttaagcgatttttttgttttagttttttaagtaattgggattataggcgttcgttattacgtttagttaatttttgtatttttagtagagatggtattttattacgttggttaggttggttttaaatttttgattttaggtgatttattcgtttcggttttttaaagtgttaggattataagcgtgagttatcgcgtttggtttgaataattagaagttttagatttttagggatattttaaattttaagtaatttttttaatttataaattaggatttaaattattttaatttgtagtttattttttatttattaattgtgtatatttttaagataaaagagtattacgtgggggagataaagagttaaaggaatatggtaagaggggtattggatagattaattagtttatttttttttttttttttttttttttttgagacggagttttgttttgttgttaggttggagtgtagtggtatgattttggtttattgtagtttttgttttttaggtttaagggatttttttgttttagttttttaagtaggtgggattatagttgtgcgttattatgtttagttaatttttgtatttttagtagagatagggttttattatgttggttagattggtttggattttttgatttcgtgatttgttcgttttggtttttaaagtgttgggattataggtatgagttatcgcgttcggtttttttattttttgagacggtttggttttgtagttaaggatggagtatcgtgatataattatagtttattgtagtttcgattttttgggtttaagtaattttttagttttattttttttagtagttgggattataggtatgtattattatatttggttaatttttatattttttttatagaagtggagtttcgttatgttttttaggttgattttaaatttttggttttttagagtgttgggattataggtatgagttattgtatttagtattaaaataattttttaaaattatatattttttggttagacgtggtggtttatatttgtaattttagtattttgggaggtcgaggtaggcggattacgaggttaggagattaagattattttggttaatacggtgaaatttcgtttttattaaaaatataaaaaattagttagcgtagtggtacgtgtttgtagtttaagttatttgggaggttgaggtaggagaattatttgaattttggaggtgggggt

SEQ ID NO: 339 - DNA, 6250 bp, Artificial Sequence
  chemically treated genomic DNA (Homo sapiens)
atttttatttttagggtttaagtgatttttttgttttagttttttaagtagtttggattataggtacgtgttattgcgttggttaattttttgtatttttagtagagacggggttttatcgtgttagttaggatggttttgattttttgatttcgtgattcgtttgtttcggttttttaaagtgttgggattataggtgtgagttattacgtttggttagggggtatatagttttaaaaaattattttggtgttgagtgtagtggtttatatttgtaattttagtattttgggaggttaggagtttgagattagtttgaggaatatagcgagattttatttttataaaaaaaatgtaaagattagttaggtgtggtggtgtatgtttgtggttttagttattgaggagggtgaggttggaggattgtttgagtttaggaggtcgagattgtagtgagttgtgattgtgttacggtattttatttttggttgtagagttagatcgttttaaaagataaaagagtcgggcgcggtggtttatgtttgtaattttagtattttggaggttaaggcgggtagattacgaggttaggagatttagattagtttggttaatatggtgaaattttgtttttattgaaaatataaaaattagttgggtatggtggcgtataattgtagttttatttatttgggaggttgaggtaggagaattttttgaatttgggaggtagaagttgtagtgagttaagattatgttattgtattttagtttggtaatagagtaagatttcgttttaaaaaaaaaaaaaaaaaaaaaaaaagataaattaattaatttatttagtgttttttttattatatttttttggttttttattttttttacgtggtgtttttttattttaaaagtatgtataattgataaatgaaagatgaattgtaaattggaataatttgggttttgatttgtgaattgaaaagattatttgaaatttggaatgtttttggaaatttaggatttttggttatttaggttaggcgcggtggtttacgtttataattttggtattttgggaggtcgaggcgggtggattatttaaggttaggagtttgagattagtttggttaacgtggtgaaatgttatttttattaaaaatataaaaattagttgggcgtggtggcgggcgtttgtaattttagttatttgggaggttgagataggagaatcgtttaaatttaggaggtgtttagtcggttgtagtgggttaagattacgttattgtattttagtttgggtaataagagcgaaatttttttttttattatttttttttaaaaaaaagaaaagaaaatggatcgggattttttttttaaacggtatttattaaatagttaagtattttttatgagtaaggtattgtataagagttgttggggatattaaaataatataatttacgatttattaaagttataagtcggatattatggtgattggatgtttagaaaagaaattagatgatattattatggtatattaaaaaagttttttaaaaatcgtatttaattgttatatttttatggaatataatttttatagattgtatataatttgtatgtgaaattttgtttattttttgattaggtatgttattaatgggtatgtttaataaagatattttatattttagatgtatagattaggttcggttaattttagttaataatgtattgttgaaaaagacgttgatattttattgcggtaaattattattaatataaattttaattatagtttgagtattttattaggaataagttttgaaatttgaataggattagtatttttaataatttatcgttttataataaaggttgttttatttttaagtggaaaacgtattatgttttatttttataaattttggttgaattaaataaaatagtaatatgtatttaacgtttttagattgttttatttagtattataaatatttattaaattatatagagttaaaattatgtaaaagattgtaaaataaattgttttgggaaatttttagtttaagttaaatggattaagtataggattgaattttaagaagttggtgggaagattttagtttttgtatttataggtaaggttttaggattttatttgttgaagtgtttgtagattttttttttatagtaggggcgtggagtaaatgtgtatttaggaagtgtttattagtttttttaaaatttttttcgtgacgatagacggatggaggttttagacgatttcggtagtaggattttgaattaaatgtttgagttgcgttcgaaaggttcgtttcgtaggagttggcgagtggtacgggtttcggtggtcgggttcggggttcggggttcggggttcggggtcggggggggcggggggttcgtgtttagggtattttgtggttcgatttatgttttcgtttttttatttgagtatattgggtagagagtttgcggtatcgggttagtcgcgttttttcgttcgttttgggtaggtcgttgggttttaggtcgttttttatagtttttttaataaaatggatagtaggggttttaattagacgtgggtattaagataaaggaggcggttagacgcgtttgagggtttgttcgttagttttcgtttttttatttcgcggttattcggggatagaggttaggtcggattgggtggagttgggatttatacgtttgcgtttaggaaggcgtcgggcgagttttagttagacgtgacgggcggggtcgaatacggtagcggattagaggttcgcggcgtatcggcgtggggcggggtaagcggagtttttcgggatgtcgcgcggtagtcggttttcggttgtgggtggtgcgggggatagcggcggtcggaagttggttgagtcggtttttggtaacgttatttgtatttttgggggcgtcgagtttggcggtagaatttttttagtaggcggcgcgggagggaaaagaggattgaggggttaggtcgggcggatttcgttttttttcgatgtgagtagtttttcgaaatttcgttaggcgaaggttgtttagagaggtggagtcggtagcggggtcgggaatatgaggtagttttttttatttttgattagcgtggtttttttcgtgttggcgtcgcgattttcggatgattcgggtttcggtttttattagagattcggtaaagatttaggggagttggtttaggtcggcgtttggagcgttcgtttgagggaagagtaggggagttgggtttattaggtgtttgggggcggggtattggcgatggtggcgcgtttttaagtttttagtgtagaagggggtgtggttttcggagtttggggaaagaataaaggagatgggtttgtttttgagtgggaaagggttattggacgggttttatgtagtgattgagcgtttgagaggggtttgttttttagttttgtgttcggggagggtgttgggaaagcggtaaggagtagggtggttggattttgtttggagagggagatgtggttagggtttttgttttagtagggaataaatttagtgttgtgtgtttttattagagttagaaaggaagggtttaaagttttagaattttttttggttttcgaaggagggaattagaatttttgttgtaggaggtatttatgtagtaatttcgttgggaggcggagattggagttggagttttaagagttgtgtttttgcgaatattttaagtacgtttttggttattttaattgtagtttattggaggtgtttgggagatggggggaggcggaaatttggtaagttaattcgtgatgttgttattatgaatgttttttttgtatttttaaataaagaaattattaagagtgacgagtttgatgaatttagaggttagaaagtagagggtttttattttattagattttttagagagattggattttaaggatggagatgtattaagggatttgaattttggtggaagtaagtttgcgtgaatttttagtgtattttaaaatttttttattttttaaaaattgacgtgtaagatattttaattagtaataaagtgtgaaataatgtttttttagtgtgtgaaattgtaggtttgtatggttgtattggtttttaaattttattatgatattatgtgtagtattttttttttttatatttagtggatagaaattgtaatggattggtatggatattaaaggtgttgagagtgttattatttgaatagttgttttatgatttttttcgattgaaatggattataagtgattaatgaaaggtaagggattttgttaggaagtgttgagaagtggtaagttagtataaattgaaggatattttgaggtaggattgtggttaggatggagggatagggtaagggtttttattttaaggataaatgttagtaaaaagaataaatatgtattttgagatattaaaattatatttgtattattttgatataattgttttatttatgttattaatttgttgttcgtaggtaaaaataagtatgagttttaaggaagtatatagtttaaagagaaatattattttttagattaatttataatatttgtagatcgtaaggttttttagattattttttttttttaagatagagttttgttttgttgtttaggttggagtgtagtggcgcgattttagtttattgtaattttcgtttttcggggtttaagtagtttatttgttttagttttttgagtagttgggattataggtatgtgttattacgtttagttaatttttgtatttttagtagagacggggttttattatgttggttaggttggtttagaatttttgatttcgtgattcgtttatttgggtttttttaagtgttgggattataggtatgaattatcgtttttggtttatgtgtttgttttttatttgtaaaatgtagattatttgtgttagaagaatgtatagattttttttttttttttttttttttttttttttttttttttttttttttgaggtagtgttttgtttttgttgtttaggttggagtgtaatggcgttattttagtttattataattttcgtttttcgggtttaagtaatttttttgttttagttttttaagtagttgggattataggtatgtgttattacgttcggttaattttttgtatttttagtagagatggggtttttttatgttatttaggttggtttcgaatttttgattttaggtgattagtatatttcggttttttaaagtgttgggattaaaggtttgagttattaggttcggtttttttttttttttttaaacgaaatatttgaaggatatataagtattatacgtggtattggaaatataaagattagacgatatttatttttaaatggttatagtatagggaaatagatatttatttaggatatttttaaaatagtatagaggagagtgttagagtacgttatagtaagtgttattattaaatgaattttagagattaagtttagtttttaaataaaggaggaggaaaatgagttttaggaagatgttgttagttgttaatgatgaatataggttttgtgggtattttttttttgaagaatgatttttttttttagtttgtttgatagtttataatataatttgttatttaattttattattagattgagttggttaagattagtaaatagttttatagttgaaaaatatgttttattatttattttttatgtttattgttttataaatattattatattgtagtatttaatatcgattaggtatatgataatatttttttgaaaggtaaaaaatatttaataaaatgaagtttggtttttagagttttttatgggttattaaaaatgattttaattgaattgttatgaattgtataatttaggaaagttatgagttatatgagtttagttatgatgatattttgttgaagttgtagttggggtgtataagttttattttgattttaaaatcgttttttttttgtgttatttttaataaaagaggatgtagtgggtgggaggaaaaaatataggttatagatgagggatgagaaagtttgtatttgaaatatgtatttttaaatttattttgaggttattggtatggggattttttatattgtagtgttgattttattattgatagtattattttatttagtattttgatatttggtttttt

SEQ ID NO: 340 - DNA, 6152 bp, Artificial Sequence
  chemically treated genomic DNA (Homo sapiens)
ttagttagaagggttttgagttttaggttatagttttttaatgagtttttttttttcgttaatgttgtttaatttttatttttttatagtttgggttaagaagtttatgtagtttagtttaaattttagagaatggttattaatatttattggtgttattttttatgttggggaaattgtgaagtatataattagggagtatataaaagagtttatgggattttttttttagagtgggttttttttttgaggtgattgatatagtttggttgtgtttttatttaaattttattttgaattttagtttttataatttttatttgtcgtgggagggatttggtgggaggtaattgaattatgggggtggatttttttgtgttgtttttgtgatagtaagttttatgagatttgatggttttataaaggataatttttttgtatatattgttttgtttgttattatgtaagacgtgtttttattttttttttattttttattatgattgtgaggtttttttagttatatggaattgtgagtttattaaatttttttttttttataaattatttatttttaggtatttttttatagtagtatgaaaatggattaatatagtgatttaagtaaattttggtattttttggtattggtgttagatgagttatatgtcgataatgggggtagggtgtttacggttagtttttgtcggtagttttttattattatcggcgtgagttaggaaaatgtggcgaaggagagtagttcggtattatttatcgggttgggtgttaatttgtagataaataagatatttagcgttttaggtattggggttattgttttaattttttttttggattgaatttgtaattatagtaataattatagttgtatttagaatttgtgatttgtatttattatgtttattagttttttgagtagtgatgtgttggggttagttggtgagagttaattgttaaatttttaggaattttgtaagttagttgttaaatatagttaatatttaaaattaaattatttaagttttaataaattgttttaaagataaaggtaataatatttaaaatttattattttttttttttgtttttttttttttatttttttttttttttttttttttttttttttttttttttatttttttttttttttttttttttttttttttttttttttttttttttttttttgtttagaattgtagggtattaatatttttaggggtaaaattttattaaggtagtatagaagtttattttatattttttgggtggaaaattggatattttttagaaggatttagtaggatttaggtttttttgtttatagtagtgacgttgaggttatattttattttgtttttttttttttttttatattattttttttaaatttttttttttgttgtttggaattattttttaaataagttatttgtttttaggtttttgattgaggttttgtttttgggagaatttaagttaaaattatgtgaataaggtattacgagtttagtatatagtaaaaattttttaaaaggtgatttttatgatatagttatgtattattttatatattttttataataatttagtaagatgggtggtagggttatattatatgtttattttatagataaaaatattaaggtatagagagtttagagtatttgtttaaggttttattgttggaaagtggtgagatgggaatttaaatttattgtttgttgattttagtgttttgttattttttttagtatttttttatattgtttttttataaagcgattataaattggttgaaaaagtggatagttagagattttttggggttaggaataatagtttacgtttttattttttaatttttattttttattttggagggtttaaatgtgtgtgtttttggtttagatagagatgttgggagaagataacgtagtgttcgtttattatagagttgttatttggttttttgttgtttagagaataaattatagggtttcgttttatgtagaaaaggtagtattttataatgttatggttagtataatgttaataatatatataataatataatatgttgtaaggttgagtatgtgagtttagaaattagattatttgagtttttattttggattttaaaaatgatttcgttttttttttttatttgtttttaattttttggaatgtgatttggtagtttattttattaaaaagtcgagtttgtttttttatattttgaatataagttggtttgtgatttgttttggttaatagaatatagtgaaaaaagtggtgtgttagttgtaaatttgaattttaagaagttttgtatgttgttatttatttttttggaagtttgttatattattgtgtgatcgagtttgggttagtttgttggaggttgagtatacgcggggtttagttgttttattgttttagttaatagtcggtttatttttagtagtatagttattttgttgtataggagtaagtttggttaagattaaatgaattatttagttgagtttagtttaagttgttttattttatgggttatttattaaattgtaagttaaatgagtggtaattgttttaagttgttaagtgttgagatagtttgttataaagtaaaagttatttggtaaattttaggtaagttatttaatttttttgtgtttgtttttttatttattagataaagatagtaatagtatttttagggagtttgtgaggagtgaatgagaagatatttgtaaagtatttggataggtttggattatggaaagttttttttaaatttgagttattgttttttttttattaaaggataggaggaggtaaggaagtgagtgattgataaatgaatgaacgtgtgtatgggtggacggataaaaggacgagtagatagagtagtagatgggttgtaggagtagtgtttatttttttgatggatatttttggaggttttgttttggtttttttttttgttttttttttgatttattttgtatagggtcgtattgggattatggtttttaggttggggttatatttttttgtaaaggattttcgtcggtttcgttggtttagatttgagataaggtagggttttttatttattattttgatggtagtttggagttttgggtttttggtttggggatatttttattttatggtagagaaatggtaaaggttattgagaggtgaggatgtttgattgggattaggtagtttttattttatttagattagtttttttgttttgatttttgagaattgtttttattaatgagttttttatatttgtaggggagtgtggttagaagatttgttacgttttttaatgttacgttgaggtttttttattagtaggattatttaatttttttttttttatgttgggttggttaagagtagaaaattttatggtgtggttttggttgggagtcggtttaatgattaaggttgagttttagtttagggaaagagttttaagaaaatgggtttttttagtattatttagagttaagtttggttgatatatatatatatgtatatgtatatatgtatatatatgtatatatatatttatatagatgtatatatgtatatatatttataaatatgtatatatatcgttatgcgtatatatttatatatatttacgtatatatatgtatatattttttttttttttagatttttttagatttttaggagtttttgtatttatattttttttattttgatatttattggttagagaattttaataatattattttttaggattagttatatttggataggtttatattttttatatttttgtgattgttgttttaaatgaaaattaataatttaggtggagaggatattttttgtaatgtttgtttagtttttaagttagttattttattttttagttatttaaatttaatttatagagtatgatttttgaaggttttttatgtttagttttagtttttttttgaggtttttttttatttttgttttagggttttatgatagttatttttttatattttatagataaattttttttttttatttaaggtatgttgagttggtttttgttatttgtaaataaaggttttattattatatataaacggggttatatttttatgagttttttttggaagtttttatagttagaagtagtagataaattaatttttattaagttgttagtggttgataaaattatggtatggtagagttggaagtgtttttagatgtaattttttatatattttttattatatagaagaggaaataaaggtttagagagaggaaggatttatttaagagtatatagagaatgagtagtatttattttatttggggtattttggatataggaaattgatgtttttttttttttttaataattttataataatttttgtttatattatataataagaggtatttttttggaataatatacgtattttttataatagaatttgaaaattataatgtttttattttaaaaagataaattttttaacgtggaaattgaagattcgtagttagatggagaagtttatatgttttagagttagtagttgatgaaaagttttttaattattgttaatgaatttaaagtttttgttgttattgtggttgttgtggagacggagttttattttgtcgtttaggtgggaatgtagtggtgcgattttggttaattgtaatttttgtttttcgggtttaagtaattatttagttttagtttattgagtagtcgggattagaggtgtacgttattgcgtttggttaatttttgtatttttagtagagatagggttttgttatattggttaggttgatatcgaatttttgattttaggtaatttatttgttttagttttttaaagtgttgggattataggcgtgagttattaaaaaaaaaaaaaaaattgagataggattttattttgtcgttaggttggagtgtagtggtattattttagtttattataatttttgttttttgggtttaagtgattttttttttttagttttttaagtagtagggattataggcgtgtattattatgtttagttaatttttgtatttttagtagagacgaggttttgttatgttgtttaggttggttttaaatttttgggtttaagtaatttgtttgttttagttttttaaaagtgttgggattataggtatgagttattgtgtttagtgtagttaatgaatattaatgatataaatattatagatttagttgtagatttttaatttaatgagagtattagtagttattagagattttttaaatttttggttaaattgtatattttattttttattttttatttgtattattgaatattgtattttagttatgtggaatattttattattttttggataaattgtttattttttttgttttttagtttttgtatttattattggtataatttggaattatttagtatttttttttttatttgattaatttttgtttagtttttaaggtttagtttaaatatttttttttttaagaaaatttttttatatatttttttatttttttaaataaattgtgggttttttgtttgttttgtttgtagttatatttttaatatttagtatagtttttggtatatcggaaatgtttaatacgtatttgttgaatgaatgaataatagtaagtatgagaaataattaagatgtaaattttttttttagaaagtgaaaaataagtatataataatatatagtaaaatataaattattttgaaattaagtatgggatgatataaaaataataaataaagtataaattataatattgtgttagttttagaaaaaatattttttaaaaagggttaaagttaagaagttagttaaggaaataaaatgaaatattaaatagtagattaattaaaaaaaaaaaaaaaaaaaggtaggtaaggagggatagaagaataaaatataaaaggaataaatagaagataaatattaatagtaagttaatagatttaaatataattatattaataattatattaaatataaatggagtaaatattttaattaaaaaataaagattgttagattgaat

SEQ ID NO: 341 - DNA, 6152 bp, Artificial Sequence
  chemically treated genomic DNA (Homo sapiens)
atttagtttgataatttttgttttttaattgaaatatttattttatttatatttaatgtaattgttgatatggttgtgtttaagtttattggtttgttattaatatttgttttttatttattttttttgtgttttatttttttgtttttttttgtttatttttttttttttttttttttggttaatttattatttagtgttttattttatttttttgattgattttttagttttaattttttttaaaaagtattttttttagggttaatataatgttataatttatattttatttgttatttttatattattttatatttaattttaaaataatttatattttattgtgtgttattgtgtgtttattttttattttttggggaaaggatttgtattttagttgttttttatatttattattatttatttatttaataaatacgtattaaatattttcgatgtattagggattatgttaggtattggaaatatagttgtaaataagataaataagaagtttatagtttgtttggggaaataaaaaagtatgtaggaaagtttttttagaaaaggaaatgtttgaattgagttttgaaggttgagtagaaattggttaagtgaagaaagggatattagatggttttaggttgtgttagtagtaaatataaaaattaaaaagtaggaggaataaatagtttgtttagggagtagtaagatattttatatggttggagtgtagtatttaatggtataaatagaaggtggagagtagagtatgtagtttggttagaggtttagggagtttttggtagttgttaatatttttattgaattaggaatttatagttgggtttatgatatttatgttattaatatttattaattgtattgggtatagtagtttatgtttgtaattttagtatttttgggaggttgaagtaggtagattgtttgagtttaggagtttgagattagtttgggtaatatggtaagatttcgtttttattagaaatataaaaattagttggatatggtggtgtacgtttgtagtttttgttatttgggaagttgaggagggaggattatttgagtttaggaggtagaggttatgatgagttgagatggtgttattgtattttagtttggcgatagagtgagattttgttttaattttttttttttttttggtgatttacgtttgtaattttagtattttgggaggttgagataggtggattatttgaggttaggagttcgatattaatttggttaatatggtaaaattttgtttttattaaaaatataaaaattagttagacgtagtggcgtgtatttttagtttcggttatttagtaggttgaggttggataattgtttgaattcgggaggtagaggttgtagttagttaagatcgtattattgtatttttatttgggcgatagagtgagatttcgtttttataataattataataataataaaaattttaaatttattaataatgattaaagagttttttattaattattagttttaaaatatgtgggtttttttatttgattacgagtttttagtttttacgttgggggatttatttttttgagatgaagatattatgatttttaaattttgttgtaaaaagtacgtatattattttagaggagtgttttttgttatataatataagtaagggttattgtagggttattggaggagggagggaatattagttttttgtatttagagtgttttagatgagatagatgttatttattttttatatatttttgagtaagttttttttttttttgggtttttgtttttttttttgtataatgagaaatgtgtaaaagattgtatttgaggatatttttagttttgttatgttatggttttattagttattaataatttgatgggagttggtttatttattgtttttagttatgaaaatttttagaaagaatttatgggaatgtgatttcgtttatatataataataaggtttttgtttgtaagtggtagagattaatttaatatattttaggtaaaaaaggagaatttatttatagggtatggggaagtggttgttatgggattttagggtaggaatagagggaggttttaggaaaggattaagattaggtatgggaaatttttagggattatgttttatggattggatttaggtggttggaggatggggtggttggtttggggattgaatagatattgtaaaaagtgttttttttatttgggttgttggtttttatttggggtagtagttatagaagtgtggggaatgtgggtttgtttagatgtggttggttttgaggggtggtgttgttgaagttttttgattagtgggtattaggatggaggggatgtggatgtaaaaatttttggggatttgagagaatttgaaagaagaaggggtgtgtgtatgtgtgtgcgtgggtgtgtgtgggtgtatgcgtatggcggtgtgtgtgtatgtttgtggatgtgtgtgtatgtgtgtatttgtgtggatgtgtgtgtgtatgtgtgtgtatgtgtgtatgtgtatgtgtgtgtgtgttagttaaatttaattttgagtaatattaagaaaatttatttttttggggttttttttttgggttgggatttagttttggttattggatcggtttttaattaaaattatattatagggttttttgtttttggttaatttaatatgagaaaagaggaattaaatggttttattaataagaaagttttagcgtagtattaagggacgtagtaggttttttggttatatttttttataaatgtggaaagtttattggtgaaaatagtttttaggggttaaagtaaaggaattgatttgggtaaagtagaggttgtttgattttaattagatatttttattttttaataatttttgttatttttttgttatagagtgaaagtgtttttaggttaaaagtttagggttttaggttgttattaggatggtgggtgaaggattttattttattttagatttggattagcgaggtcggcggagattttttgtagaaagatatgattttagtttgaagattatgattttagtgcgattttgtgtaaggtaagttagaagaaggatagaagggagggttagggtaggatttttaggaatgtttattaggagagtgggtattgtttttgtaatttatttgttgttttatttgttcgtttttttgttcgtttatttatgtatacgtttatttatttattagttatttatttttttgtttttttttgttttttggtgaaaaggaggtagtagtttaggtttaaggagagttttttatgatttagatttgtttaagtgttttataaatatttttttatttattttttataaattttttggaggtattgttattatttttatttgataggtgaggaaataggtatagagaggttaagtgatttgtttaaggtttattaggtagtttttgttttgtaatagattgttttaatatttagtagtttaaaataattgttatttatttagtttatagtttgatgggtgatttataaaataaagtaatttgggttgagtttagttgggtggtttatttggttttgattaggtttatttttgtatagtaaggtggttgtgttgttggaggtgggtcggttgttggttggggtaatggggtaattggatttcgcgtgtgtttaatttttagtaggttagtttaggttcggttatatagtaatgtggtaggtttttaagggaatgagtgatagtatgtagggttttttgagatttaggtttgtaattggtatattattttttttattgtattttattggttaaagtagattataagttagtttatatttaaagtgtgaggaaatagattcgattttttgatggaatgagttgttaggttatattttaaggaattgggaatagatggggagagaaaacggggttatttttgaaatttaggatagaaatttaggtagtttgatttttgagtttatatgtttaattttgtagtatattgtattattatatatattattagtattatgttaattataatattatgaaatgttgttttttttatatggaacgaggttttgtggtttgttttttgagtagtagaaggttaagtggtaattttataataagcggatattgcgttatttttttttagtatttttgtttgggttaaggatatatatatttaagttttttaaggtgagaggtggaggttggaaggtgaggacgtgggttattatttttagttttaggagatttttaattgtttatttttttaattagtttataatcgttttgtggagaggtaatgtggggaggtgttgaagggaatgataggatattggagttaataagtagtgggtttgaatttttattttattattttttagtagtaagattttgggtaaatattttaaattttttgtgttttgatgtttttgtttatgaaataggtatataatatgattttgttatttattttattgagttgttgtgaggaatatatgaagtaatgtatgattgtattatgaaagttattttttagggaatttttattatgtgttgagttcgtagtattttatttatatgattttagtttgaatttttttaaaagtagggttttagttaagaatttggaggtaaatagtttatttgagaagtgattttaagtagtaagaagaaagatttagggagagtgatgtagggaaggaggaaaaggtaaagtgaggtgtggttttagcgttattgttgtgagtagaggggtttggattttattaggtttttttagaaagtgtttagttttttatttagaggatgtgaggtggatttttatattattttagtgaagttttgtttttgggggtattaatgttttgtaattttgggtaggaggaggaggaagaagaggagaaggaggaaaaaaaggaagagaaggaggaatgggaggggaaaaaagaaggaagaggaggggaagaagaaatgaaggaagaagaataaaaaaaggaagtgatgggttttgagtattattatttttgtttttaagataatttattaaaatttaggtaatttaattttgaatattgattgtgtttaataattaatttgtaaaatttttgaaaatttaataattggtttttattagttggttttagtatattattgtttaaagggttaataaatataatgaatgtaagttatagattttgagtgtagttgtggttgttgttgtagttataagtttaatttagagagagagttggggtaatgattttagtgtttggaacgttgagtgttttgtttgtttgtaggttagtatttaattcggtggatgatgtcgggttattttttttcgttatatttttttggtttacgtcggtgatggtgaaaggttatcggtaaaggttgatcgtagatattttgtttttattgtcgatatatgatttatttgatattaatgttaaaaggtattaggatttgtttgggttattgtattagtttatttttatattgttatgaggaaatatttgagagtgggtaatttataaagaaaaagaggtttaatggatttatagttttatgtgattggggaggttttataattatggtggaaggtgaaggaggagtaaaggtacgttttatatggtggtaggtaagatagtgtgtgtagaggaattgttttttgtaaaattattagattttatgagatttattattataagaatagtataggaaaatttatttttatgatttagttattttttattaggttttttttacgataggtggagattatgggagttaaaatttaagatgagatttgggtggggatatagttaaattgtattagttattttaggagagaagtttattttaaggaaggggttttataaatttttttgtgtgttttttagttgtgtgttttataatttttttaatatggaaaatgatattaatgggtgttggtaattattttttgagatttgggttggattgtatgaattttttggtttaagttgtggggaggtgggaattaggtagtattagcggggagagaggatttattgaagagttatggtttgaggtttaggatttttttggttga

SEQ ID NO: 342 - DNA, 6224 bp, Artificial Sequence
  chemically treated genomic DNA (Homo sapiens)
aaatagtatttataagattgtatgatggttttaaatgtggagggttaagggaaaggaggtgttaaaggtgatttttgggtttttggttaaagtaattcgatggatagtggtgttatttattaggttaagaaggattagaaagttgttagtttgtttttgttgttattattgtttttgttatttaatgtattttggtttttttgtatttgtttggaaggttagtaagaaggatggaaggtaatattaataaattaattgggggtatagtatgtttgagatattttagaagatttaggttttgggttgttttggtttttaggtaagtgatatgtataaatgaggtatttttgaattttgtttttttttattatggttgtgtatataaagttttaaataggttagtttttttaaataatttttaaagtattttttgaatttatgttattttatttttattttttatgttaatataatgttaatgttgttattaaatatagtttatagggatgttggtgtattgggttgaagagtgttttttaagaatttatgtttatttagaatttgtgaatatgacgtttagaaattaggtatttgtaaatgtaatttggttaatttgaggttatattgaataaggaataggttttaaatttaatatgaatgatgttcgtataagaaaagggaaatttggatatagggatagagatagagaggaagatgttatgtgaatatagaggtagagattggagttatgttgttataaattagggaatgtttggggttattagaagttggaaaaggtaagtaaggatttttttttagaggttttggagggtgtatggttttgataatattttgattttggatttttagtttttagaattatgagagaataaatttttgtggttttaagttatttagtttttggtaatttgttataattgttttaggaaattaatatagttgggaaatttaagggaattaatatgtttgagtttgaattattatatagggtatatagtataggtttagtaaatatttattttttttttatttataatagttattattatttttttggtggtttaaattatgattaattcgtatatttatttatttagataagttttattatttcgaggattgttttataagtgaggaaattgaggtttaggaaagttaaataatttttttagaattataaagttaaatatagaagagttagagtttaaatatttgttttttatatttatagtattttagtaggttttgatagagtggagaggtattgttagattagatttttaatgtttagatattaattgatttaatgtttagatattaatttttaattaaatttatatttattaataaaataataagttgtagagatttagtataatttttatttatttatagaagaatattaggtttttagtttaaggttagcgttattaaggaatttgttattggtttatattgtttttatttagtagtgtatttgttttgtatatatgtattttaagttaaggtattattagattggatatttatggttttaatttatttaaatgtattttttttatgtatttttttattttattttgatgatattgatttattttcgttatttaataagattataaaaataaatagtgtgagtgtagaggaaattgtttttaaattttatatgttaagatgtttattttttaaattataaagtaaaaaataaatttatgttttaaatttatttttttttttaattaatttggttatttttttttttaagattgagttgttgtgttgttgaatataatagatatataaatttaaggtggtatagttgttattataaggtgttaattttatagaattttagtgtaggagggatttttaaaaagtattttgtttatttatattaggtaagagaaagagtgtttatagtttttaagttttagaagagaagcggttgtattagaagatttttgtgagttatttaagattttgtggttatgttttggtagaatttcgtagaatgttaggttttttgatttttttaaaagtgtgtttagttttttaagttgttattaattattaataatgatatttttttttggttttgtgttaatttttttttttgtttattattttggttataaaaagattattataaatagttttagcgttttaggtttttttaattgatatttaatgttgataaattaatttagttcgagttgaaagttttatatatatatatatggttttaagaagggcgatcgcgtttattttttaaattgagtagtgatgatttttggattttttaagtttattttttaggaggttgatatggtatataattttgataagagtttggaattaagatttttttttacgttttgtttataagggtgtttataagtagaagttttttttttgtttttttattataatttattaggcgcgcgcgtatatatatacgcgcgtatatatatatatatataaataataaaggaaaatatagttttataaaggtttagttattgtattttttagtttatatttgttaaaagataaaaattatgcgggaattttgttttggtaatatgtttaatatttttcgggaaaagtagcgtcgtggtatttttagggcgtgcgttgttgtatatatataaagaattggtgttgggtttgcgagtagttcggggtattagtacgtttttagggttggaattcggggtttttttttacgttttttcgtttagtaaaatggaattattttttatttggttggtagagagtttaggttggatagtagcgtatgggttgagggtgggcggttttttatttttattttttaggtagtaggtttttagtttttgtattttttaggagatgtaggatcgcgttgttatagtggtttttttcgtattttttttcggtaaagagagatgtttcggttattagcggcgcgtattttcgtaggcgttttttttttcgtcgatatttatttaggtagtttcgataggcgcgtttgtttatttggtggtcggttgttagcgaagcggcggtgttttagtttttttttagttgttatagcgtttttagcgttatgttttcggttttttcgggcgtacgttggggaattattattggttgggtaggggtaaggggggcgggggttagcgggagggggtgagaggtagagttatagttttttattttttatttaaattttttttagttattgagtatgtttagttgttcggtttcgtttttcggaggattgtttatgagcgtacgtagttgtttcgggttttcgtggtagtcggcgggaggtaggttgtagcggcggtcgggggtggaggtgagggggagggtcggggggcgtgtttatatttagggtgtaggagttaggagtcgggagttggagtaggcgattaatttaattacgtttatttttagtcgttttcggcgggggtagtttttgtacgtttttttttttaatattcgggatttgtagaaatgttgtttaggattattgtaggattgagttttgtttaagaggttagtagaggtggggaggaggaggggttgagaagtagaatagtgggttggtttttttgttattatttggatcggtgatttttaaatttttatgtgtttgtgaattaaaatgtagatttagatttaattggttgggttttgagattttgtaagtttaataatttcgtaggtgatgttgttgttgttggtttttttattatttcgagtagtaaatatttagagaattttttatttgtgattttttagtggttattttttaattcgttagtttagtaatggtttttggtgtttatagagatttttttagtttggggttgttgagttttatttggaaggagtgtttgtggggttaggttgtgattatttagtttttttttggttgttgtttgatttcgaatttaaggtttaggggaagaaggatttttggatttttttatgtttattttgttagttggttagtaagttagttgttggatgagttgtttcggttaagtttgaattagtttgttttggttgtttttttgttttttttgagttgggataaaaatttagattgggtattaaagtgtttattgtatatttaatagtaagtttgggtttgtttagttaagaaagtcgatagattatgataaatatagagcgtatttttgtattaagagatgttaggtttttgtgtttagtgatgtttgggttgaagtttgtaacgatatttgtggtttaatttaaattttttagttgtttattgtttttttagatttttgaagtttttagtattattaagattttagtgaatgaaagatatttacgaagtagttttgagtttttatttttggaaatgaagaagttacgtttttgtttgtttttagttgttataagagtatttttatgagttagtagtggatatggaatttgattttataattagatagtaggttataaaataaggatttgtattttttcgttttttattatatttaatgattttagatagttttttagttaatagtatagtagttattatttttttttgtttgttttttatttatttagtatttttaatattgtattggttatattaaaatagaaattataggataaatggatgattattttttttttttagtagttttatgtttttgtgtattatatttatttttttttttttaaagttgtatatagttttaataatttatttattgttattatcgttatttttataattatatgtataaatattttttatttttgatttttttatatgtgtgtttatatagatgtaaaagttagaatatatttttattgagatatcgtttatttgttattggttagtattagttaaaatttttatttgaaatattgaattttaattatttaaaatagtttttttgttatatataaagtttgtgtttgtatatttgtttttgttagttaaatatgatgatgattgttagttgttttaaatttattttggaagcgtgtaaggtaaaaattatagatgaataataatgttatttttgtaaatattgtattgtatgaatttttaagggttttttttatatgtaatgttattttttgagggtttagtttgtagtatttgattaaggattaatatttgtgggtgggagggatataggaagtaggagtaggtagaggtagaagttaagttgtgatgtaagttaattgtagtttttgttagttttttatggagtttattagttagggtgattttttagaatgattatgagttggtttgagatagttagttttttatatttatattaattattgagtatgggttgtttttaggaggggtacgaatttaagataggtagttttggtaatttttataggtaataatagttaaaggtttttgttagttgtagtttttgtggttgtagtaataaattttttatttaaggggaatttaggtaaaatatttttttgtttattatattgatgtatttattgaatatagtatttttgaatatataaagtagaattttattgatttgttagatagattttaaaattttatttttgaataagtaatagattttttttttggtttaaagatttaaaagttggaaaataatttgtaattagttattgagagtatattatttatttaggtatttggttgtatgtattttttatatgattagtttaattatgatttattgagtaggtatgtatttattgtttattatttaagatataattttttttgttaaaatttgtatttgtaatttgtaatggggtaggaataagtgtttgatagtaaatagaagtgtgttttttaataaaatagagttattgattagttaagattttatgagaaattaatgttaattaattttgttgatattaaaaattgtgataagatgaatttgaggggtggagaatttggtagattggttgatagggatgtgtaagatagtatgttggaatttaggtttagattatttagtttattttttttattttttttaggttatgtatttataaatggttggaatttttgaaagatgaatcgtaattataagggaattagtatagattttagaaatgaagtaggatatttgtttagatagtggaggtagggaaagaataggaggtggaaaagaatgttttaaggaatataaataaaagtatataaagaa

SEQ ID NO: 343 - DNA, 6224 bp, Artificial Sequence
  chemically treated genomic DNA (Homo sapiens)
ttttttatatgtttttgtttatgttttttggaatatttttttttattttttattttttttttatttttattatttgagtaaatgttttgttttatttttagaatttatgttggtttttttatggttgcggtttattttttaagaattttagttatttgtagatgtatagtttggagaaggtaaagagaatgagttgggtagtttgaatttgggttttagtatgttgttttatatatttttgttagttaatttattaagttttttattttttaggtttattttgttatagtttttggtgttaataaggttggttgatattagttttttatgaaattttgattagttagtagttttgttttattgaaaaatatatttttatttattattaaatatttatttttattttattataaattataaatatagattttgatagagaaaattatgttttaaatggtagataataaatatatgtttgtttaataaattataattaaattagttatataaaaaatgtatatagttagatatttaaatagatagtatatttttaatggttgattataggttattttttaatttttaaatttttgagttagagagaaagtttattatttatttaaaaataaagttttaaaatttgtttgataaattagtagagttttattttgtgtgtttaaaagtgttgtatttaataaatatattaatgtggtggataaaggaatgttttgtttaaattttttttaagtgaaggatttgttattgtagttatagggattatagttgatagaggtttttagttgttgttatttgtaagaattgttagagttgtttgttttaagttcgtgttttttttaggaatagtttatgtttaatgattgatgtggatgtaaaggattgattattttagattaatttatggttattttgaaggattattttagttagtgagttttataaggggttgataaaggttgtaattggtttgtattatagtttagtttttatttttgtttgtttttgttttttgtattttttttatttatagatgttggtttttagttaaatattgtaggttaaatttttaagaaatggtattatatataaagaaaatttttaggaatttatgtaatgtagtatttatagaaatagtattattatttatttataatttttattttgtacgtttttaaaataaatttgaggtagttaataattattattatatttaattagtagaaataaatgtataaatataaattttatgtataataggaaggttattttaagtgattaaagtttaatattttaaataaaaattttaattgatattaattaatgataaataaacgatattttagtaaaaatatgttttggtttttgtatttatgtgagtatatatataagaaagttaaaagtagaaaatatttatgtatatagttgtgggggtgacgatggtggtagtgggtaggttgttagggttgtgtgtagttttgagaaggaagagatgagtatgatatataaggatatgggattattgagggagaaaagtaattatttatttattttgtggtttttgttttgatatggttagtataatattaaaggtattaagtgaatggaaaataagtaaggggaaatgataattattatattattagttagaaaattgtttaaggttattgagtataataaggaacggagagatataaatttttattttgtaatttgttatttagttatgggattagattttatatttattattagtttataagggtatttttgtggtagttgaagatagataagagcgtggtttttttatttttaagggtgaaaatttaggattatttcgtgaatgttttttatttattagagttttgataatgttggagattttaagagtttgggagggtagtaggtaattgggaagtttaagttgaattataaatatcgttgtaaattttagtttaaatattattgaatataaaggtttgatattttttggtataaaaatgcgttttatgtttgttataatttgtcggtttttttaattaggtaagtttaagtttgttattagatgtataataaatattttgatgtttagtttgagtttttgttttagtttaggaaaggtaaggggatagttaaggtagattggtttagatttgatcggggtagtttatttagtaattggtttattagttagttagtaaagtgagtatgaaaaggtttaggaatttttttttttttgggttttaaattcgaaattagatagtagttaaggagaagttgggtggttatagtttagttttataaatattttttttaggtaaggtttagtaattttaggttggaggagtttttgtggatattagagattattgttaggttggcggattgaaggatggttattgagaggttatagataaggggttttttagatgtttgttattcggagtggtgggagggttagtagtagtagtattatttgcgaggttgttaggtttgtagaattttaggatttagttaattgaatttgaatttgtattttaatttataggtatatgaaagtttgagaattatcggtttaggtggtggtaaagaggttagtttattgttttgttttttagtttttttttttttttatttttgttagttttttaagtaaaatttaattttgtaatggttttgaataatatttttgtaaatttcgagtgttgggggagagggcgtgtaggagttgttttcgtcggggacgattgggagtaaacgtgattggattggtcgtttgttttagttttcggtttttggtttttgtattttgagtgtagatacgtttttcgatttttttttttatttttattttcggtcgtcgttatagtttgtttttcgtcggttgttacgaaaattcggagtagttgcgtacgtttatggatagtttttcgaggggcgaagtcgggtagttgggtatgtttagtagttgggggaggtttgggtggagagtagaaagttgtggttttgttttttattttttttcgttggttttcgttttttttgtttttatttagttagtagtagttttttagcgtgcgttcggggagatcgggaatatggcgttgggagcgttgtagtagttgagaaggggttgaggtatcgtcgtttcgttgatagtcggttattaggtaggtaggcgcgtttgtcgggattgtttgggtgggtatcggcgagaggagaggcgtttgcggggatgcgcgtcgttggtaatcggagtatttttttttgtcgggagaggatgcgaagaggattattgtgatagcgcgattttgtattttttaggagatgtaaaggttagggatttgttgtttggagggtagggataggggatcgtttatttttaatttatgcgttattatttagtttgggttttttattaattaaataaaggatggttttattttgttgggcgggagggcgtggaggagaatttcggattttagttttgagagcgtgttggtatttcgaattgttcgtaagtttagtattagttttttgtgtgtatatagtagcgtacgttttgggggtgttacggcgttgtttttttcgagaagtgttggatatattgttagagtaggattttcgtatggtttttgttttttggtaggtgtggattggaggatgtaatagttgagtttttatgaggttgtgtttttttttgttatttgtgtgtgtgtgtgtgtgcgcgcgtgtgtgtgtgcgcgcgcgtttggtgggttgtaatggagagatagagagagaatttttgtttgtgggtatttttgtgagtagggcgtggaagaggattttggttttaaatttttgttaaaattgtgtgttatgttagttttttagagggtaaatttgagaagtttagggattattattgtttagtttggaggataagcgcgatcgttttttttgaaattatgtgtgtgtatatggagtttttaattcgggttgagttaatttgttaatattagatattaattaagggaatttgaaacgttgaggttatttatggtggtttttttatggttagaataataaataaaaagaaaagttggtataaagttagaggaaagtgttattgttaatagttgatgatagtttgaaagattgaatatatttttaggaaaattaggaaatttggtattttacggagttttattaagatatagttatagggttttaggtaatttataaaaattttttagtgtaatcgttttttttttggggtttggaggttgtagatatttttttttttatttgatatagatggataagatgttttttagaagttttttttatattagaattttatgaaattgatattttataataatagttgtgttattttagatttgtgtatttgttatatttaatagtataataatttaattttggggagaaagataattaggttagttagggagaaaggtaaatttaaagtatgggtttattttttgttttataatttaaaggatgggtattttagtatatgaagtttggagatagttttttttgtatttatattatttatttttatagttttgttaggtggcgagaatgagttagtattattaaaatgaagtgggggaatatataaggaaaatgtatttaagtaaattaaagttataaatgtttaatttgataatattttgatttggaatatatatgtgtaaggtagatgtattgttaaatggaagtaatataagttaatggtaagttttttggtaacgttggttttagattaaaaatttagtgtttttttgtgagtgggtagagattgtattaggtttttgtagtttgttattttattaataaatgtgagtttaattgaaaattgatatttaagtattgaattaattgatatttaagtattgaaaatttagtttggtagtgtttttttattttgttaggatttgttgaaatgttgtaggtatgggaggtaggtgtttgaattttgatttttttatgtttagttttgtgattttgggaaaattatttaatttttttaagttttagtttttttatttatagaatagttttcggaatagtaagatttatttagatgagtagatgtacggattaattataatttaaattattaggaaaatggtggtgattgttatgagtaagagggaaatggatatttattgaatttatgttatgtgttttatataatgatttaggtttaaatatgttaatttttttaaattttttaattatattagttttttagggtagttataataagttattaaaaattgggtggtttaaaattatagaaatttatttttttatggttttggaggttagaggtttaaaattaagatgttgttagggttatgtattttttaaaatttttaagggaggatttttgtttgttttttttagtttttggtagttttaggtattttttggtttgtggtagtataattttaatttttgtttttgtatttatatggtatttttttttttgtttttgtttttgtgtttaaatttttttttttttatacggatattatttatattggatttaggatttgttttttatttaatatgattttaaattaattaggttatatttgtaaatgtttgatttttaaacgttatatttataggttttggatgggtatgaatttttgggagatattttttagtttagtatattaatatttttatgaattgtgtttgatgataatattaatattatgttagtataagaggtaaagatagagtagtatggatttagaaaatattttaaagattatttaagggaattaatttatttgaggttttatatatataattatggtagggaagagtagggtttaaaagtattttatttatgtatgttatttatttgggagttaagataatttaggatttggattttttagagtattttaaatatattgtgtttttagttgatttgttgatgttgttttttattttttttgttaattttttaaataaatgtaaaaaaattaaaatgtattaaataataaaaataataatagtaataaaggtaagttaataattttttagttttttttaatttggtaaatggtattattatttatcgagttgttttaattagaaatttaagaattatttttgatatttttttttttttgattttttatatttaaaattattatgtagttttataaatgttattt

SEQ ID NO: 344 - DNA, 6103 bp, Artificial Sequence
  chemically treated genomic DNA (Homo sapiens)
ggtataatttgttttttaatataaggttattaaagtaacgttttgattttttttttttttttttttagtgatgatgtttattgtgagaataattaatgggtagttgagtacggtggtttgggatttggggtaaaatgagtttaatagggatatatgaataagttgttaaagttaagtggaaatgagaagtagagggaatttggagaggtagatgaagaaggtattagggagtattgagagaatatggagtgaatgttgttagattgtggttttaggaaagggaatatttgtttgtatttgtttagttgtagtattatagtatttttttttgtatattggatttattttattaggtagaaaaaatgggagagattataggaatattggtagtggtggggatgggtaatgaattaggagtgtttgggaaaagtaattttttgttttaaatagttgatagtagtatttgttataattttagagaggtttgtaggaaagtttttatttgttatataagaaaggttgggtaagtagatttttagttgggaagtagatttttagtatttatagaaggtagatattgggttagtttttatttaagatggtagtgttttatattggaaagttaaaggaatttggatttaaaggattttggtttttttttttttgtttataatttttggaattataatttagtattattagattaaggtatgttttattaaattaaaaattaaaagtttttttatggggaaagttttaatgttatagttgaaagaggtgatagtcgtattattgttattaaaaataatttattaattttgtttgtgtaaagtattttggtaggtattaaattttaggggttttttgttttaatgtattttttgttttttgtagtttttttagtgtaacgtttggttttttttttgtgaataaaatggatattttgaaaattttatttttgtggagattattataggataagagaatgcgggttttattatttacgttaattagatagtgttgggggaatgtattagaaagttgttttttttaattttatatttttaacgtttgtaaataaaaatttttttttttcggtttttattttagattaggaaatttggggagagttggtaagtaaggttttgtattgtcggtatatgttatgttaatattggttttttgttttttgtttcggtaggtattatatagcgttggagaaataggtatataggtgtttttttagttaagggaagaaagtagtaacggaatttgggagtttaattttaaatttttttatatttattttttataaatatttgttttgtaacgtgtgtatttgtgcgtatatttataggtaaagataatattttaaggtaagtttatataaatggtttggagatatttgataggtttgattatataaaggttttttgttttatttgtattttttaggaatttaggtaaaggtggttttttatttagtcgtatcgttattcggtaggggagggtataggtatttttttattcgtattcgttttcgttttttcgtttagtagcgttagtttttgattttattggattcgtataggagacgatttataatcggtcggaagttgtttttgtttttttattttatcgtaaacgggggtttgtttggattatttatttattttgtgtgtattaagaaattagtattagttgttagtgggaggcgttattttgttcgaattttagttcgtcgcggcgattttgtatatatatacgtattagtttggtagttagagttcgtttggagacgtttttagttcggggtttgcgtttttcgggattttcgacgtagtttttcgttttcgttttttacgtttaatcgggtagggcgtcggggcgtgattttcgattttttgtttgtttgttgggtttttcggaggcgggttagatcgtattcgtcgcgggcgttcggtgcgtttttagtttttggttcgcggcggcgatagcggcgttgttcgttggagtttgatttttcggcggcggcggtagcggcgcgtagtagcgaacggttggagtaaggcgagtcgggtcgttagtttttcgcgttgcgttgggattggtttttttagaagagtgttggtcgagggttggttgcgggtcggttgaagaataggtgtattttatcgttcgggttcgcggagtagtcgtcgaagatcgcggcggttaggtaggttttttgtgtcggaatgcgggtggcgggtattcggtatttcgcgatcggtcgtcggggttattgaaggcggcgcgaggtttaggcgcggcgcgagcgggcgttttagggagcgggttgggcgcggtgtttcgaggatgtcggcgtttttggagcgtacgtaggcggcgggtagtagtagtagtagcgggcgcggggattcggcgcgtaggaggcggtttggagggttgtagacgcgtttcgtcgttttttgatcgatcggaggcgtcgggggttcgtttcgtttttttttcgagttttttatcgtttttttttcggtttcgttttttttttcgtttttttttttttcgttcgtcgttcgtttttcggggggaggggcgtgggggtagggagcggatttgtatgcggtcgtcgcggtcgttgtttgcgttcgagttcgtcgtcgtcgtcggagttcgcgttcgcgttcgcgttcggttcgcgcggttttatgtttttgtcgcggttttcgggggggcgaaggtgaagatcggtttttaggatgagtgaaggggcggtcgttgtttcgttatttggtgtcgtttcggtagtcgtcgtttcggtcgaggagggtatcgcggcggttgcggcggcggtagcggcgggcgggggttcggacggcggcggcgaaggggcggtcgagttttttcgggagttacgttgtagcgattgtatcgtgtggaatcggtagtagacgtggttgtgcgtggtatttttgtttatcggttttatcggtttggggtttagttttatgttttttaaatggatcgtggtgggtttcgttaaggagtacgtgtttatcgatttagtggattttaaggggatgggttaggattttttttttttttttaagtttagttttttttttaaggttatggagattattattattattatttttattacgtttttcgttatttttttcgtcgggggtgtcgttttttttaggacgtttaatcggattagtattcgtttgattattattacgcgggcgtttattcgttttttcgggtatcgggtgtttattcgggttagttcgcgttttattatagtacggaatattgcggtttttgcgacggtttcgtttattacggtttcgttttttagtagtagtacgttgggttttcgattttcggtgttaggaattttaagtatttaggtaatgtttttttggtttattgcggtatacgttatttttttttatttttacgattttatttttttttggattttgttttttttttaggatgttgttttttttttttttttttttttttttttcgttattattattatattagaaattagtattagttttaaatttcgtaagtaaatattgtgttttaattatgatttattattgagttttttttttgtttttttgttgtttttttttttcgtcgtttgttttttagtaagtttttttttttattttaggtttggggtagagtgagagttgattaaaattggttattagcggggaagaaggtgttagtttgttttggttttgggggggtgggggcgtgtaggaacgggagggagattgttaggttttattggttttattttagcgggttttaagtgagaatagattttttaattttttttaaagggttaacgcgagtgcgatttttttttattgtagatttgttggcgagttgtcggatttcgttttagtagagggttagggagggagagagggttttttcgaaggtattgagtttttttttcgttcgtcggtaggaaggaaagaaagtaaagtatatgtaaattgatcgacgataaattataaaaggaagttatgtttttgtgtggggtgacgagttgatggagataatggtagaatgttgttgaggacgtttttagtagttttgatttgggtaggaattagaaagggttaattagaagttattgggagatttggggaaaggaggcgatttaaggtaaagggttaaattgattttttagtttgtttgtggttattttaaggtgtagatatagattttgtgatcgtcgagagtgagttaattaggaggaaatatgaagggagttttgtagagttgttatttttagggttttgacgaaggaggagttttttttagttttgttaagtttttgtttttgtttcgtttttaaaggtggggtgtgaattttattttttttttttttgtgtttgaaaaatatagacgagttgagagttttttgtatttaagggtgagaatatttaatcgtttggaaatatgttatcgttagaatgtagtatttttaatttgggtttagtatgagttagtatatttaaagtatgatagttttttgtttatttgtatagaaagtgcgtatttttttaatatttttataaatgttgtaggtgattaattgattttttattttaatttttattttgtttttatttaaaggaaattttaggtgttttttaagttgatttgattaggatatgggaatagtttgtgtaatttgtgaaggttatttaggataaattttaggttgttagtttaagttttgtgtaaggttattttgtaaaaaattgtttggttatgttgtttttatattgtatttgtgttttgagttatagtatttgagataaaggaagagtgtttattattaattttttagtgatgatgggaatattgggtttgtttttagttatttgttaattttttatttttttgttttatgattttattttgggtgttatttaatttttgaaatttttttttttttaaagaatgtagtgtatttgtaagtaaggtttaggagagggaaagggggaaaaaaaagtaaatttattttgttttggaaaaaatcgtttagaagataaattgggagataggaaggagggaaggaaggaatttgttataaattagaatggtagtagagttagtaatttgttgttttttttttttttggttgaagtagttatttttgagagtatatttttttaggaggtgtttagagtttttatttaataaatttagtttgtgttttgtagaaggataaaggatttatgagtgtatgtgtgaatatatttaatggattgaaaatgagtttattttgaagattttagatttttgatttgtttttttgatgtagttgatagaataatggagtgtggtatatttttaatttttgtatgcgttgggagaggagggggattatatacggtaggggtattttatgtttttttttaattgatttttttgtgtattatttcggaggtttttaaagaaaagtttaaggtaattatttttatttttttatgttttttttttatatttcgtggacgggaatggtagtttgtttaataagtaatgattattgatagggtttttagttttaaggaaaagaggggaaaaatttgtaaatggtgttaatgtttatatagatatataagtagtatttgttgtatttgtattttagttttagtttttttttttttttaaatttttataagaagttgaattaaggtatgtaatataagtatgtaaaatttagttgaaattgatttggtttgtatttataaataagggaaattttaaggaaaagtggattatgtagtttttataaaacgtgtttaaataggtaagttgtatggtgatttgaagaaagaggatagtttagttattttttttatttaagattgtaggatgattaataaaaggaaattaagattttatttgagagattattagtagtgttattgtaggatgaaaaaagtttgaattattggtgtttatattttttttatttgttttgattatgttcgtaaagtttttaggagagaaatttttttttttttagtttttatttttatattttagtggg

SEQ ID NO: 345 - DNA, 6103 bp, Artificial Sequence
  chemically treated genomic DNA (Homo sapiens)
tttattaaagtatggaggtaggagttggggaaaagaaaattttttttttgggaattttacgggtataattaagataagtaaaaaaaatatgaatattagtgatttaggttttttttattttatagtagtattgttgataattttttaaatgaaattttaatttttttttgttaattattttgtaattttggatgaaaaaaataattaaattattttttttttttaagttattatataatttgtttatttaaatacgttttatgaaaattatataatttatttttttttaaaattttttttgtttatagatgtaaattaggttaattttagttggattttgtatatttgtattatatattttaatttaattttttgtaaaggtttaaaaaagagaaagagttgaaattaagatataaatataataaatattgtttatatgtttatgtgaatattgatattatttatagatttttttttttttttttttggggttgagggttttgttaataattattatttattaaataggttgttattttcgtttacggaatgtaggaagagagtatagaggggtagaaataattattttgggtttttttttaaagattttcggaatggtatataaggaaattaattgagaaagaatatgaaatatttttatcgtgtgtagtttttttttttttttaacgtatataagggttggaggtatattatattttattattttattaattgtattaaaagagtagattaaaaatttggggtttttagggtagatttatttttaatttattgaatatgtttatatatatatttatgaattttttatttttttataaaatataagttagatttgttgagtggaggttttaaatattttttgggaaaatgtgtttttaaaaatgattgttttagttaaaggagagagaagtagtaagttattggttttattgttattttggtttgtggtagatttttttttttttttttttttgttttttaatttattttttagacggttttttttaaagtaaagtaggtttgttttttttttttttttttttttttttggattttatttataaatatattatattttttaaaaagaaaaaagttttaagggttaagtaatatttagggtaagattatagggtagggaaatgaaaaattagtagatgattgaaagtaaatttagtatttttattattattgaagagttaatgatgaatattttttttttattttagatgttatggtttaaaatataaatataatataaagatagtataattagatagttttttgtaaaatagttttgtatagaatttgaattagtagtttggggtttgttttaaataatttttataggttgtataaattgtttttatattttgattagattagtttaaaagatatttgagattttttttgaataagaataaggtgggggttggggtgggaggttaattagttatttataatatttataaaaatgttgagaaaatacgtattttttatataaataaatagaaagttattatgttttgggtatattggtttatattgagtttaggttgaagatgttatattttaacggtgatatgtttttaaacggttggatgtttttatttttgagtgtagaaaatttttaattcgtttatattttttaggtatagagggagaggagataaggtttatattttatttttgggaacggaataaaagtaaaggtttggtagggttgaaaaaaatttttttttcgttaggattttagaggtggtagttttgtagggttttttttatatttttttttagttaatttattttcggcggttatagaatttatgtttatattttggaatggttataggtaggttaggaggttagtttagttttttgttttggatcgttttttttttttaagttttttagtggtttttaattaattttttttggtttttgtttaggttagggttgttggaagcgtttttagtaatattttattattatttttattaattcgttattttatataaggatataatttttttttgtggtttatcgtcggttaatttgtatgtgttttgtttttttttttttttatcggcgggcggagaaggggtttagtgttttcgggaaggttttttttttttttttggttttttattggagcgggattcggtagttcgttagtaggtttgtagtgaggagggatcgtattcgcgttaattttttgaagggagttgggagatttgtttttatttgggattcgttaaagtggggttagtggagtttgataatttttttttcgtttttatacgtttttatttttttagaattagagtaggttggtattttttttttcgttggtggttagttttaattagtttttattttgttttaaatttgggatgggggagggggtttgttagaaaataggcggcgagggaaaaagatagtaggagggtagaagggaaatttagtagtaaattatagttgagatatagtgtttatttacgaaatttggggttggtgttagtttttggtgtggtggtggtagcggaggaggaagaagaggaagaagaggaggtagtattttgaaagggagatagggtttaggagggagtagaatcgtgaaggtaggaggaggtagcgtatgtcgtagtaggttaggagggtattgtttgggtatttggagtttttggtatcgggggtcgggagtttagcgtgttgttattgaagaacggggtcgtggtggacgggatcgtcgtaggggtcgtagtgtttcgtgttgtggtggagcgcgggttggttcggatgggtattcggtgttcggggaagcgagtgggcgttcgcgtgatggtggttaggcgagtgttaattcggttgggcgttttggaggaggcggtattttcggcggagggggtggcgggggacgtggtggaagtggtagtggtggtggtttttatggttttggggaaagagttgggtttggagaggaagaaggggttttggtttatttttttggagtttattaggtcggtgggtacgtattttttgacggagtttattacgatttatttgagaagtatgaggttgagttttaggtcgatgaagtcgatgaatagaggtattacgtatagttacgtttgttgtcggttttatacgatgtagtcgttatagcgtaattttcgggggggttcggtcgttttttcgtcgtcgtcgttcgggttttcgttcgtcgttgtcgtcgtcgtagtcgtcgcggtgtttttttcggtcgaggcggcggttgtcgaagcggtattaggtggcgaggtagcggtcgtttttttatttattttaggagtcggtttttattttcgttttttcgagggtcgcggtagaggtatggggtcgcgcgggtcgggcgcgggcgcgggcgcgggtttcggcggcggcggcgggttcgggcgtaggtagcggtcgcggcggtcgtatgtaaattcgttttttgtttttacgttttttttttcgagaggcgggcggcgggcggggaggagaggagcgggggaggggacggggtcggggagggggcggtaaggagttcggaagaggggcgagacgggttttcggcgttttcggtcggttagagagcggcggggcgcgtttgtagttttttaagtcgttttttgcgcgtcgggttttcgcgttcgttgttgttgttgttgttcgtcgtttgcgtgcgttttaggagcgtcgatattttcggggtatcgcgtttagttcgttttttggggcgttcgttcgcgtcgcgtttgggtttcgcgtcgtttttagtggtttcggcggtcggtcgcggggtgtcgggtgttcgttattcgtatttcgatatagagggtttgtttggtcgtcgcgattttcggcggttgtttcgcgagttcgggcggtgaggtgtatttgttttttagtcggttcgtagttaattttcggttagtatttttttggagagattaattttagcgtagcgcggagggttagcggttcggttcgttttgttttagtcgttcgttgttgcgcgtcgttgtcgtcgtcgtcggagagttaaattttagcgaatagcgtcgttgtcgtcgtcgcgagttaggggttgggggcgtatcgggcgttcgcggcgggtgcggtttgattcgttttcgagggatttaataagtaggtagaggatcggaaattacgtttcggcgttttgttcggttgagcgtgggggacggaagcgggagattgcgtcgggggtttcggggaacgtagatttcgggttgagggcgtttttagacgggttttggttgttaggttggtgcgtgtgtgtgtgtagaatcgtcgcggcgggttgggattcgggtagagtagcgttttttattagtagttaatgttggttttttaatgtatataagatagataaatgatttaagtaaattttcgtttgcggtggggtgggggggtaaaagtagttttcgatcgattgtgagtcgttttttgtacggatttagtggggttagagattgacgttgttgggcgagggggcgggggcggatgcgggtgggagggtgtttgtgtttttttttgtcggatggcggtgcggttggatggaaggttatttttgtttgagtttttgagagatgtaggtggagtagaagatttttgtataattagatttgttagatatttttaagttatttatgtgaatttgttttaaaatattgtttttatttgtaaatgtacgtataggtatatacgttataaggtaagtgtttgtgagaggtaaatatgaaaggatttggggttggatttttaaatttcgttattgttttttttttttggttggggaggtatttgtgtatttatttttttagcgttgtgtggtatttgtcgaggtaaggggtaaagagttagtgttagtatgatatatgtcgatagtgtaaaattttgtttgttaattttttttagattttttggtttaaagtgaaaatcgaagaggaggggtttttatttataagcgttaagaatatgaggttgagaaaggtaattttttaatatatttttttagtattgtttgattggcgtggatgatggagttcgtatttttttgttttgtgatagtttttataaagatgaagtttttaaggtatttattttatttatagggggagagttaaacgttatattgaagagattgtagagagtagaggatgtattgaaataggaagtttttggggtttggtgtttattagagtattttgtatagataaggttaataaattatttttgatggtagtaatgcggttgttattttttttagttataatattgagattttttttataggaaagtttttgatttttagtttgatggaatatgttttaatttagtagtgttgaattatggttttaaaaattgtaagtaaaaaaaaaaaaattagaattttttgaatttaaatttttttagttttttaatgtaaagtattgttattttaagtaaaaattgatttagtatttattttttgtaggtgttaggaatttattttttagttaggaatttatttgtttagttttttttgtgtagtaaataaaagtttttttgtaaatttttttggaattatagtaggtgttattgttagttatttgagatagaaaattattttttttaagtatttttagtttattgtttatttttattattgttagtatttttgtggttttttttattttttttgtttggtagagtaaatttagtgtatagaaagggatgttataatgttgtagttgggtaaatgtaggtaaatgtttttttttttgaagttatagtttgatagtatttattttatgtttttttagtattttttaatgttttttttatttgtttttttaaattttttttattttttatttttatttggttttaatagtttatttatgtatttttgttgagtttattttgttttagattttaagttatcgtatttagttatttattggttgtttttatagtgaatattattattagagagagagaaaaaaaaaattaaaacgttgttttgatagttttgtattggggaataggttgtatt

SEQ ID NO: 346 - DNA, 6103 bp, Artificial Sequence; identical to SEQ ID NO: 344
  chemically treated genomic DNA (Homo sapiens)

SEQ ID NO: 347 - DNA, 6103 bp, Artificial Sequence; identical to SEQ ID NO: 345
  chemically treated genomic DNA (Homo sapiens)

SEQ ID NO: 348 - DNA, 6250 bp, Artificial Sequence
  chemically treated genomic DNA (Homo sapiens)
tatgtatatgtttatatatatttatatgtataagtttatatatatttataggaaaaagagtatataattgagtatttgggagtgggtatttaaaaagttattgtttattagaggttttttttatatttattaaaaatgaatagaattaggaaagaatttaggatattatttgatttaggattttatttaggttataaatgtgtattatttgatatttgtgggatatttgttaagtttaaattttagttaaaaattttagaattgggttttttattattgtttaattgaattttagttaagaaattatagatatttattttttattggtattttatattagtgtttattattatttttattggcgagttttttaaagggaagggattgggaaataagaatgtttataggataaatttaatttttaattaaaatgggtaaaagtgatttttatataatattaatttaaattttaattaataattattaatagagtaaaattttattgttttaaatatttatttatatatgattttagtaagagttgtttttttagttttattattgttaggtttatttttttgtgtttgatttagtataaaatatgtttttttattatttttttaatatttgattaaattttgatttgtattatgtggtataataggatggcgagtttatggtggggaggagatatatgaattttattggttattttgagagattgattaggaattgtatatttagttttagggatattattaataaattttaatagcgtttttttattttaagaagttattgttaattaatggttttcgttggaacgttttaatgttttataaagatatatatcggtagattttatttgttttttacggatatggtggaatttgtttgtttggagaaaagaaatgttattggtaagaaaagttttgttttaaatgtatgtgtaataaagatattgtttaatttattattagtgttgtaaagtgtatagatttttttttgtttttttaggaaaggtttatgttttgaaggagagttaggggtgatattttagttttaaaatttgttagtggttaaaggaattaaagataggttggtttttgtatttgggtggttttagtatagagattgtttttttataaggaaattaaatattttgtttagttattgattttggttatattggaaatttttagtaacggtttttttgaggaaattttttaaaaaattttgtattttttatatttttatgtaatagtatttagatatttttatttcgttatcgaagggtttgtttttacgataaaataaaaatttattttgagataattataattaagtttttgggatgtagttgtatttttaatatgatttattgggtttttatattttataaatttattaggtttgtaatttattagtaagattatgattattattatacggtttttgtaaatcgttgtttgtatgtacgtaattaaaacgggtaaaagatatttttttattaagttttttggggttcggttttattttgttgatttttttttaagttaattaaattgaagtatagtaggttaaacggatagttattaaaatgaattttttgttggagaagggaggtgtttttggttttgtttttataaggattttatttttgttatggttttatttttttagtaggtaaataataagattttgggggtaaaatttaagttaaagtatttttagttttttttgtattttttaaatgtttttttttgtttgattaaaaagagatgttaaaaaatggcgtgattttgtaacggtaagaatattgattgtttttttaaaagatgttttgtaggtagagataagttatttattttatttatgttttatttagtattggtatcgaatcgatcgattaatattttttttgggttaaagggcgtagggtaaagaaagtataattttacgttttttttttagaggttatatgatgttatttttatttagtttttttttttggggattttaaagtttttgttattgatatataagagttttttttgtacgggttgtgagaaatttggtttatgatatttgttttcggaacgattttagagaggtagggtttgaaaaaatgtagcgtttttttaattttgtttttttttaatatttatatatttttggtatattttttacgtttattcgtttcgattattggtagtttataggtaagagtagaggatgatcggagagtgggggtcgttatatttttagttcgtagtattttcggggtttttcggttgggcggcgttagcggatgtgagtttaggtttagcggtcgtattttgcgagtggtttcgagatatataatgtagtagaagtaaattttttagtagtaaagtcgtttggtcgtatagaagtaagtaattaatcgggtaattatttagtattattttttcgggtataggagcggagattcggttttaattataattttaggttagtagtatagatttaagaattgcgtggttaggttttttcgcgtagtttcgttcgcgtagtttcgttaaatagttaatggacgcgtagttcgacgtttcgcgtattttcgttaattaattagaaaaggtcgagtagacgggcggggttatttcgttttttgtttttgtttttcgattttttttttgggttttatgttttttttttttttgcgtcgaatgcgttttttaatcggattcgtcgatttttttaggtgggcgtgttcggtagtcgacggggcggggcggatatgattggcgggtcgattagtgttggttgttatcgtcggtttagaaattttattttcgcgtcggggattggatttttttttacgttagcgtagttaggcgatgtcgggagcgagttcggatcgagggtttagttgcgttagtgtcgcgcgcgtgttcgtcgggcgcgcgtgttcgtcgggcgcgcgcgtttttcggttagatttggggtttcggtagggttggaaaatgatggaagaggcggaggtggaggcgatcgagtgttgagaggaatttgcggaatcggtcgagatggggtttggcgcgcgttttttttcggggatttttcgtgttcggtggttgttgttgtttggtttggtgggtttagttttcggtgcggcgcggttaggtgggtgttcgcgtttcgggtcggttgggacggttgttttttagggacggggcgttcggagtgaatttgtggtgtttgggagtggaggggttcggtttggggatcggattcggggtcggggggcgcggtcgttttaggtgtgtgcggatcggggtcgtattcgaggcgcggggtttggcgttttaagttttttttggttcgggttttttgttcggtatcgtttttttcgtgttttgttcgatggagtcgtttttagcgtttttttatttttcgtcgtttcgcgcgatttcgggttttttagacgtttcgaaattcgttttggggcgggcgttgatttcggcgggtcggagttttgtaggttgggcgcgttcgcgggcgtttagttttttaaacgtttgtagggagggagttggttttcgttcgtggagttaatgtcgtttggaaagagattgagagatgaaatttttgttgtaggttataatttgaaattttgacgtttatggtatttttgggttaatatagttaaatttaatggtggaataaaggtgggtgggaggacgtttattttttttgggttatttttgtagtaagaatattttgtaaacgatgtgttatttttttatagttaaattatttttaaaaaatttgtgtttttattgggttcgtattgtgttaaattcggatagataatttttgtttttttgaatttataggattattgtaggaattaaattatttgtgtgaaatcgtttttgaattgtgaaattgtttttgattatgtaagatatttgtattggagatgtttaaatatagtggaagtagattgttagtacgttggcgtttttttggaaataagttgtttattttggattttgtatgatataattgtttgtatggttgtattttttttattagcgatagaggatgatggagaatgggagtttttattaaattattgattgaaagttatttaaaggtgatgatagaagattttaacgtaggattgttgatttttaggaaattaattatttgttttttttatttttggttgttttatttgaaattaagtaaatttgttttagtgtggaaatgttgaaattttgataatgttttgaatgggaagttgttaaattttttttggttaaaattattttttcggtggtattttagatggttaatatttatcgatgtttaaggtgaagacgattatatattcggagttttattaatttgtgatttttttttgtgtttgtaaatgtaaataagattgtatttttaaatgttaatataaattgttagttattatcgatttgtattaggtgagtggaatattttgatggtttttaattgtggttttggttagttttttatttcggtatgtgtatgtttttttaaagtttagttatcgtttatggaatttttataaatattatatagttgattgtagaggggtagaaggtgattaaatatgttaagcgtatttgagagatgttggggaagatttttagagaaaataatatttgaattgggttatatcggtgattttttaagtagaatagtagatatattttaagtagaggaaagtttttgtaagagtatggtggggcggggggcgtatgaaagaatatgattttttaggaaatgataaaaatgttaatatgtttttatgtagattataaaagggagggatggaagattaaattaaggtaggttgttattagttgggaagagttttttatgttgaattaaggggtttggattttatttcgtaggaagttttttgggtagtggaggttttaagtaggggtgcgatttaattttattttttgttaagaaaacgggtaatacggtggaggatagaatttaggagggagagattagaggttgggatatcggttaagaggtttttgtaatagtgtgtagtgagttaatttttgtttttttcggggaacgtttatataaaattagttgattatatttttgtagtataaggtgtttaaaacgtgtattgaaatattttttaggatcgaaagaggaatttgaggtattaggtatacgttagttatattaggagttaattaggttttataggatttttattattttttataatattgttttaatgaggaaatgtagtataatttttaaatagttaatttttagtaaattttttttttttttttaaattgataaaggtaattgtgttattgtaaaaaataagcggaattaggtatgaaattttttttgattttttaaggtagtaattatgaggaatagatttagaatttttttttaaataaagattggtattttaaagaaaatgattttgaaagtttatttatggtgagttattgtaaaattatttgtgtagtaagaatttaggtttatattaatttcgtttttagatgttagtaaaatatttgaatttgatatgtttgtgtttgtgtcgataggagaatgtagttttttatatttaagaatgatttggtttttaattttttaagtaaaaaagaaagtatatataattaaaatatgtataaatttagtttttggtttttaagatagtttttaaaaagtatttgaagttttaatttattaaatttatatttgttttttgtaaaaaatttgggtttataatagaatttattatggaattttttaaaagatgtaagttttaagtaattggaagtttttttttgggaatattcgtaagtttaaatatatgatatagttttatattttttttttttttttggtatgtaatatatattggaggtttggagttatgttatttttttgagttagcgttatggaattgttttataaatgaatgtagtttttttgtattttagtagttaattttttatagtttttttttttttgagatggagttttgttgtgtcgtttaggttggagtgtagtggtacgatttcggtttattgtaatttttatttttcgagtttaagtaatttttttgttttagttttatgtttggttagttttttgtatttttagtagagatggagttttacggtattagttaggatggtttcgattttttgatttcgtgattcgtttattt

SEQ ID NO: 349 - DNA, 6250 bp, Artificial Sequence
  chemically treated genomic DNA (Homo sapiens)
aggtgggcggattacgaggttaggaggtcgagattattttggttaatatcgtgaaattttatttttattaaaaatataaaaaattagttaggtataaggttgaggtaggagaattgtttgaattcgggaggtgaaggttgtagtgggtcgagatcgtgttattgtattttagtttgggcgatatagtaagattttattttaaaaaaaaaaagattgtgagggattagttattgagatataaaaggattgtatttatttatgaggtagttttatagcgttgatttaaaaggatggtatgattttaagtttttagtatatgttatatattaaaaaggaaaaagaaatatgaggttatgttatatgtttgagtttgcggatatttttaagaaaaagtttttagttatttagagtttgtattttttgggggattttataataaattttattataaatttagattttttataaagagtaaatataaatttggtaagttaaagttttaagtgttttttgaaaattgttttggaaattaggaattaggtttgtatatattttaattatatatgtttttttttttatttaaaaggttgaaaattaaattatttttaaatgtaaaaggttatatttttttatcggtataaatataaatatattaaatttaaatattttgttggtatttgaaaacgagattagtatggatttaagtttttattatataaatgattttatagtgatttattatgagtaagtttttaaagttattttttttagaatgttagtttttgtttaaaaaaaaattttaaatttgttttttataattattattttagaaaattagaagaggttttatatttgatttcgtttattttttataatgatatagttatttttgttagtttaaaaaaaaaaaaaaagtttattgaaagttagttgtttggaaattatattgtatttttttattgagataatgttataaaaggtagtaaaaattttataaaatttaattaatttttaatgtaattgacgtgtgtttggtattttaaatttttttttcgattttggaaaatgttttagtgtacgttttaaatattttatattgtaaaaatgtggttagttgattttgtatgaacgtttttcgagagaaataagagttgatttattgtatattattataaaagttttttaatcggtgttttagtttttagttttttttttttagattttattttttatcgtgttgttcgtttttttaatagaaaatgagattaggtcgtatttttatttaaaatttttattgtttaaagaattttttacggggtgaagtttaaattttttagtttagtatagaagattttttttaattggtaataatttattttagtttgattttttattttttttttttatagtttgtatgaagatatattgatatttttattattttttaaaaagttatgtttttttatacgtttttcgttttattatatttttgtaaaaatttttttttgtttagaatgtatttattattttatttgaaaaattatcgatgtagtttagtttaaatattattttttttaaaaattttttttaatattttttagatgcgtttagtatatttggttattttttgtttttttataattaattgtgtggtgtttataggagttttataaacggtggttaaattttgaaggggtatatatatgtcgaagtgaggagttggttaaaattatagttaaagattattaggatattttatttatttaatgtaggtcggtaatgattgataatttatattaatatttaaaaatatagttttatttatatttataaatataaaaaaaaattatagattaataaaatttcggatgtataatcgtttttattttaaatatcggtgagtgttaattatttagaatattatcggaaaagtagttttaattagaagaaatttggtaattttttatttaaaatattgttagagttttaatatttttatattggggtaaatttatttaattttaaataaagtagttaaagataagaaaaataagtaattagttttttgaaggttaatagttttgcgttgaaattttttattattatttttgaataatttttaattaatgatttagtaaaaatttttattttttattattttttgtcgttgatagagaaaatatagttatgtaaataattatattatataaaatttaaaataaataatttgtttttagaaagacgttagcgtgttgataatttgtttttattatgtttgggtatttttaatataagtattttatatagttaagggtagttttataatttaaaaacgattttatataaatgatttaatttttataataattttgtgagtttaaaagagtagggattatttgttcggatttaatatagtacgaatttaataaaaatatagattttttaagaatggtttggttatagaaaggtagtatatcgtttataaaatatttttattataaaaatgatttaagagaaatgagcgtttttttatttatttttattttattattaaatttagttgtgttgatttaaggatattatgaacgttaaaattttaaattataatttgtagtaaaagttttattttttagtttttttttaagcgatattaattttacgagcgagagttagttttttttttgtaggcgtttggaggattgaacgttcgcgggcgcgtttagtttgtagggtttcggttcgtcgaggttagcgttcgttttagagcgggtttcggggcgtttgggggattcggggtcgcgcgaggcggcgagggatggggggacgttgggaacggttttatcgaataggatacggaggaagcggtgtcgggtagaggattcgggttaagaagggtttggggcgttaaatttcgcgtttcgggtgcgatttcggttcgtatatatttggagcggtcgcgtttttcgatttcgggttcgatttttaggtcgggtttttttatttttaggtattataggtttatttcgagcgtttcgtttttaggaagtagtcgttttaatcgattcggggcgcggatatttatttggtcgcgtcgtatcgaggattgggtttattaggttaagtaatagtaattatcggatacgaagggttttcgagggaaagcgcgcgttagattttatttcggtcgatttcgtaggttttttttagtattcggtcgtttttattttcgttttttttattattttttaattttgtcggggttttaagtttggtcgggaagcgcgcgcgttcgacgagtacgcgcgttcgacgagtacgcgcgcggtattgacgtaattgagttttcggttcgagttcgttttcgatatcgtttagttgcgttgacgtagggaaaaatttagttttcggcgcgagaataggatttttaaatcggcggtggtaattagtattagtcggttcgttagttatattcgtttcgtttcgtcggttgtcgggtacgtttatttaggggggtcgacggattcgattggagaacgtattcggcgtaaaagaaggaggagtatgagatttagaagaggaatcgagaagtagaagtagagggcggagtagtttcgttcgtttgttcgattttttttagttggttggcggaggtgcgcggagcgtcgagttgcgcgtttattggttgtttggcggggttacgcgggcggggttacgcggaaaggtttgattacgtagtttttgggtttgtgttgttggtttggggttgtggttgaggtcgggttttcgtttttgtgttcgggaagatggtgttaggtggttgttcggttagttatttatttttgtgcggttaggcggttttgttgttggggaatttatttttgttgtattgtgtgtttcggagttattcgtaaaatgcgatcgttgagtttgagtttatattcgttggcgtcgtttagtcggagggtttcgggggtgttgcgagttgggaatatggcgatttttatttttcggttattttttgtttttatttgtaagttattagtggtcgaggcgggtggacgtggagggtgtgttaggaatatatgggtgttaagggaaggtagggttggggggacgttgtatttttttagattttgtttttttgaggtcgtttcggaggtaaatattatgaattaggttttttatagttcgtgtagagaaaatttttgtgtgttagtgatagaggttttgagatttttaaagaggaaaattgggtaggagtaatattatatagtttttggaagaagggcgtaaggttgtgttttttttgttttgcgttttttagtttaaggagagtattagtcggtcgattcggtgttagtattgagtaaggtataaatggagtaaatgatttgtttttgtttataaggtattttttaaaaaagtaattaatatttttatcgttgtagaattacgttattttttaatatttttttttgattaaataagaaaaggtatttgggaaatgtaaagaggattgagaatattttggtttaaattttgtttttagaattttgttgtttgtttattgaagagatgaaattatggtagaagtagaatttttatagaaataggattagaaatattttttttttttaataaaaggtttattttggtggttgttcgtttgatttgttgtgttttagtttaattggtttggaaaggggttagtagggtgaaatcgaattttagaaaatttgatgaagaaatgttttttgttcgttttgattacgtgtatgtaaatagcgatttgtaaagatcgtatgatgatgattatgattttattggtgaattatagatttgatgaatttatagaatgtgaagatttagtggattatgttggaaatgtaattgtattttaggaatttggttatggttgttttaaggtgagtttttgttttgtcgtaagagtaaatttttcgataacgaaataggaatgtttgaatgttattatataaaagtataagaggtataaagttttttgaagaatttttttagaaagatcgttattggaaatttttagtatggttagggttagtgattgaataagatatttggtttttttatgaaggagtaatttttgtgttaaaattatttaggtgtaaagattaatttgtttttggtttttttggttattgatagattttgaaattaaaatgttatttttgatttttttttaaggtatgaattttttttgaaagagtaaaaggaagtttgtgtattttgtaatattggtgatggattgggtagtatttttgttatatatgtatttggggtagagttttttttgttaatgatattttttttttttaggtaaataggttttattatgttcgtaggagatagatagagtttatcggtatatgtttttgtaggatattaaagcgttttagcggaagttattggttaatagtggttttttggaatggaaaaacgttattaaggtttattagtaatatttttaaagttgagtgtatagtttttaattaattttttaaaataattaatgaagtttatgtattttttttttattatggattcgttattttattatgttatataatgtaagttaagatttggttagatgttaagagaatgatgggaaggtatgttttgtattaaattagatatagaggaataaatttgatagtaataagattaaaagggtaatttttattgaaattatgtatagataaatatttaagataatgaaattttattttgttgataattattgattaaagtttgagttaatattgtatagagattatttttgtttattttaattaaaaattgagtttattttgtaagtatttttattttttagttttttttttttgaggaattcgttaatgaaaatagtaataagtattgatataaggtattagtaaaaaatgaatatttgtgattttttggttagaatttagttaagtaatggtaagaggtttagttttgaaatttttggttggaatttaaatttaataggtgttttatagatattaggtaatatatatttatgatttaaataaagttttgagttagataatattttgagtttttttttaattttatttatttttaatagatataaaagagatttttaataggtagtgattttttaaatatttatttttaaatgtttagttatatgtttttttttttgtaaatatgtataagtttatatatataaatatgtataagtatatatata

SEQ ID NO: 350 - DNA, 6134 bp, Artificial Sequence
  chemically treated genomic DNA (Homo sapiens)
tttttgtaggaattttgtttttacgttttattttaaagttattatagtatttgtaattttttttgtagttatgtatgtttaattttggaagattgttaattatttttttaggtttatttaaatgaaaatgtattataaaatcgtaggttttttttttattttattgaaaaattattttaaaaatgattagtaagttgttttgttgaagtaaaatatttagattttaaataaaagtagtagaattataatatttttatagaaatggattttgagttttttttttttaattggggaaaattttattttttaaaaaagaattttagaatatatttttgtttttagttttttaattttaatataatgttatgttagagaatatgtggtagtgtatattaagtttttatgttgttttatatttttgggataaaatatttgttttgaaaggatttttttgaattttgttattttttgtttattgagtagtggtttttttttgggaaaatagagttattttagttagtgtttagattttattttgtatacgtttttgtggaatattaatagtgttattgagatatatttattattttttttttgtttttgttgtttttatagtttagtgaaatttatatttggtgtttgtaggaaggttattagaagttatttggatattaaatttttaaattataaataatgatggtaagattgttaggatatttttttatagttaaatttatttaatagagtttcgtttttatgatagtgtaaattaaattagaataaaattagtgtgattttaggatagttttaaagtgaatatatttttttttttttttttttatttatatattaaggagatattttagattgtatttttatttaaattgcggttattagaaaatatcgtgagaaggtagtgtgtaggtaatggtttagttagtattgattttagaaaatggaaaattaagagtaagttatttttaaagtgaagtaatagattttgaatatggattgttttaatttattatttttcgattataatataagagtattttattgtaaattaagagtttaagttaattatagttgtggtataattttgagaatgttttttttatatgtagataattttggattttttcgtggtgttcgttattttggtttttaatttttgttttttgtaggggaggggttaatgtttttttatttttttgttttttagaattttttattagagggaggataagggaaggagtaggttttacgcgtagttttgagtaaagtttgaatttgagaaattttatatttacgaattaaggatttttagttttgtgtttttattttatttttttttgtttgtttttttattcggtagaattgagtgatttttagcggttgtagtaattttaattattttgagtcgtgtttcgaattatgttttttattagtttttttgaaaattaagttgtagtaagagacgtagtttaagggtatttttttagaagaggttaggttattttttaaggaaaagttgaagatttttaataggtatttattaaatatatatatatatatatatatatatatatatatacgtatacggcgtagatttagtaggagagcgtaatttagtatttttaaggttcgtttagttttttttgtgtatttggaaggaagttttattttaaatttttttttatttagagtttattttcgtttgcgtgcgatagggtttttgtatttaagtgagttaaggaatgaatttcgaatttttttgggaaagttattaacgtttttttcgtattttttttagggtttttgattacggagattttgtttggggtataggtgtgggagtcgtaaatttttttttgcgtcgttttttttcgcgtggaatgggacggagtagtttttttaggcgttgtttggttgcggaggggagcgggtagcgagagtttcgggttttcgtttgggttttcgggttttcggggcgttggtttcggttttcgcgtagcgtttagcgatttttgtcgggggttttcggtagtcgcgtcgttatttttcgttcggttagcgcgggaggaaaaggggttgcgttcgggagcgtcgagtttaggtttttttcggtggcgtgttcgcgtttcggggtgggggtgtggtggggaagagggagggggcgaggttaggggagggtgcgaaggaggcgtttgtttttaatttgcgggcgggaggtgggtggttgcggggtaattgaaaaagagtcggcgaggagtttttcgaaatttgttggaatttcgggttcgcgcggaggttaggagttgagcggcggcggttgtcggacgatgggagcgtgagtaggacggtgataattttttttcgatcgggttgcgagggcgtcgggtagaggttaggacgcgagtcgttagcggtgggatttatcgacgatttttcggggcgataggagtagtttcgagagttagggcgagcgttcgttttaggtggtcggatcgttcgtcgcgttcgcgtcgcgttttttgtaggtaacgggagacgttttcgcgtagcgcgagcgttttagcgcggtcgttcgttttttttttcgagggataaattttttttaaattcgattcgagtttttggattaaattcgtttgcgtcgagagtcgttcgcgtagagcgtttcgttttcggcgagatgttcgagcgtaaagaaggtagaggtaaagggaagggtaagaagaaggagcgaggtttcggtaagaagtcggagttcgcggcgggtagttagagtttaggtgggtgcgtagcgcggttcgggttttacgattttttttttgttttttttattttttttttttttcggatgtcgtggtttttttttttttttttttttcgttcgtttttttcgttttgcgttttgagcgttcgttgagtcgcgcggtgtttttttttttgggggtcgtcgtttatttgggcgtcgagttttatcgggcgtttacgtttagagtttagggtaagggatagtagtttcggtcgtatttttttagagtttcgggagcgtttcgttttttggtacggtttttttttagcgttttagcggttgagtttagttcgggagtgggatttgggttataggagtcgaggttgcgtgcgcgcgtgtttcgcgttataagcgttttgtacgggggtcgtgtgttttttagcgggaaacgttggaatgggtcgtttggagggagagtcggttttttcggtgtgtttggtagcgtagaagtgggtggtcgagtaagaggtcgcgtgggaagttagtttcggcgttttggggtatagggtaagcgatgtagagtgcgcgtcggtttattttgatttagttttgtgttacggagatttaagagtagcggtagggatttttaaaggttagcgaagtagatgaaatttagtttagtgttaggaattagttttgttttaaataagttttataaatttttggtttaatagttttattttttaagatttttgtgataaatatggataatttatttttttaagagatgtaagaaaataatcgtttatttgaatttttgaatttaattgtttgttggttatttatataataaaatggtaattgaagttttttagaaataaattttgtattttattattagaatacgagtatgaataaaagttttattttagatgtttttaggaagcgttgatgttttggatattattttggataaaagaggtatgtcgaataaatatttgtttatgagtgattggtaggtagttgataaaagaggggaggaaggagatgggggagaatttattttttgtttttgtaatttttaattattaattgatttagatgttttaagtcgtttcgagcgtatttttaatatatattttatgaagtatttttgtagaattaatttattagtatttgataatattgtggttatagtaatattgtagaagtatttgttttttgttggaagaaaataaattatatttgtttggtttttttattggtattattgatagtattttagaatttgggttattggtagagatttttagtagagttttgagtaaaatagaaattgaatagagagtaattgttttattattggttatttttgtgtttgtttttttaataagattttgttgattatatttattttaattattgattattgttttttatgagggtgtattgaatttttttttatttttattttatattttggggagagattatagtattttatttaataagataggaaattggggagttggattagttatttttttgcgtgattttgtttattgttttttttaaggttattatagtatattacggagattttagatttagtttaaatcgttgtaaagagttattttgggggtttttattattgtttgtggttgtgtttttttgtttttttgtttattggttttagaagaagtttttgtggttttttgtagatggtttaatgaattaagaaggggttagcggtttgaagtagtattttgtttaggtaataggtgtgtattttgttaagggtttttagtagtagtatcgtaatatagtaatttgataagtttagtgggggaggggtaggtatttttgtgttttttagattttatttattaggtaggtagttgttttgtgattagttacgtttttttgatatagagtattagagtttttttggtggtttttatttgttttttagtggtatagtagtgattttttgtaaattagttaagttagtatttttaagtgatatttgtttaattgttttttttgaaaaattggggtgaatttggttgtaggttagtttttagtatatttgtttttgttttttattagattataattttttttggggagggattttttatttttttcgaagtattttgtgttttttaaattagataagaatatgtattttttatttgatttagaaagaatggttaataatttgaaattagttttatatagaagtatatggtattaaatataatgttttagaattagtgtttttttttttttttgttattttttttataatggtaagtgttagtgtagttttttttgttttaggagaatttatatttgatgattataatggtttgtgagaaaaatttatattttaggttttaggtatttttaaaggaacgatttatagatgttataattttagtatttatatttgtcgtgttagtttaaattaggatttaggaggataagttttttttgtattgtttttattttagtgtttgttagttttaagttttattttttttttaaaatagttattgtaattgtttgtttttgatgatatgtatgtaatagttaagtttttttttagttgttttaatattgttttatgatagttaggggagagataatggggtgggattttagttatttagtttcgttgtgtgttatattgtacgtataggtataaatatatttgttggagggaaatttttagggggaaaaggtttttttaatttttatatggtatgagtgattgatatgcgatatatatatggttattttagagtatttgtatttttatataattaattaaatgttgaattgtatattattggggttgtagatgtttaatataattatttattttataataatagttttaataggttttaagtttttggagttattgattttttttttttgtttaaaataagtaagttaagaatagttttgggtgttgtattattgatttacgtattaagagttttgtaatagtttgggtttttttggtgttggattttttatatttagtttttttatattgatttagtttaatagatttttttttttgaagtttgaattataaaattagagtttttttttttttttttttttgacggagtttcgttttgtcgttaggttggagtgtagtgggtgtaatttcggtttattgtaatttttgttttttgggtttaagtgatttttttgttttagatttttgagtagttgggattataggtgtgcgttattatgtttagttaatttttgtatttttagtagagatagggttttattatgttggttaggatggtgtcgattttttgatttcgtaatttatatgtttcggttt

SEQ ID NO: 351 - DNA, 6134 bp, Artificial Sequence
  chemically treated genomic DNA (Homo sapiens)
aggtcgaggtatgtggattgcgaggttaagagatcgatattattttggttaatatggtgaaattttgtttttattaaaaatataaaaattagttgggtatggtggcgtatatttgtagttttagttatttaaaagtttgaggtaggggaattatttgaatttaggaggtagaggttgtagtgagtcgagattgtatttattgtattttagtttggcgatagagcgagatttcgttaaaaaaaaaaaaaaaaaaaagttttggttttgtaatttaggttttaagagaaaaagtttgttgagttgaattagtatgaagaggttggatatgggaggtttagtattaaggagatttaggttgttatagggtttttggtacgtggattagtgatatagtatttaagattatttttagtttgtttattttgagtaaagaaaaggaattaatgattttaagggtttgggatttattagagttattattatggaatagataattgtgttgaatatttgtagttttaatagtgtgtaatttaatatttagttaattgtataaaagtgtagatgttttgaaatagttatgtatgtatcgtatattagttatttatgttatatgaaagttaaagaagttttttttttttgaaaatttttttttaatagatgtgtttatgtttatgcgtataatatagtatatagcggggttgagtggttgagattttattttattattttttttttgattgttatgaggtaatgttaaaatagttgaagagaggtttggttattgtatatatattattaaggatagatagttgtagtggttgttttaagaaaggagtgaaatttggaattgataggtattaagatgggagtaatataagagaaatttgtttttttaagttttaatttgggttggtacggtaagtgtgaatattagagttatggtatttataggtcgtttttttgggaatgtttgaaatttagagtgtgggttttttttataaattattatagttattaggtatgaatttttttaagataaggaaaattatattggtatttattattataaggaaaatgataaagaaggaaagaaatattgattttgaagtattgtatttaatgttatgtgtttttatataaagttggttttaagttgttgattattttttttgaattaaataaagaatatatatttttatttggtttaaaaagtataagatgtttcgaagggggtaaaaagtttttttttaaaaaagattataatttggtggaaaatagagataaatatattaaaaattaatttatagttaaatttattttaattttttagggaagatagttaagtaaatgttatttaaagatattgatttagttggtttatagggaattattgttgtattattggaaagtagatgagagttattaaggaagttttggtgttttgtgttaagagagcgtagttaattataagatagttgtttatttagtagatgagatttggagggtatagaaatgtttgttttttttttattgaatttgttaagttgttgtgttacggtattgttgttgggagtttttgataaaatgtatatttattatttgaataggatgttattttagatcgttggtttttttttaatttattagattatttatagaggattatagaaattttttttgaagttaatgagtagggagataggagaatataattataaatagtgataagagtttttaaaataattttttataacgatttgagttaggtttgaaattttcgtaatgtattatgatgattttagaaaggatagtagataaagttacgtagggaggtaattaatttagttttttaattttttattttgttgaataaagtgttatggtttttttttaaaatatagggtaaaaataagggaaaatttaatatatttttatgaggggtaatgattagtaattgaagtgaatatgattagtaggattttattaaagaagtaagtataagaatggttagtggtgaaataattattttttgtttaatttttgttttgtttaaaattttgttgaaggtttttgttaataatttaggttttgaaatgttattagtgatattagtaagaagattaagtaaatgtggtttgtttttttttagtaagggataaatatttttatagtattattgtagttatagtattattaagtattagtgaattaattttgtagaagtgttttatgaaatgtgtgttgggggtacgttcgaagcgatttaaggtatttggattaattaataattgggaattgtagaggtaaaaaataaatttttttttattttttttttttttttttttattagttatttattaattatttataaataagtatttattcgatatgttttttttgtttaaggtaatgtttaaagtattagcgttttttagggatatttaaggtaaagtttttgtttatgttcgtgttttgatgatgaaatataagatttgtttttagaaagttttaattgttattttattatatagataattagtaaataattgggtttaaaaatttagataaacggttgtttttttatattttttgggaaagtaaattatttatatttattatagaggttttgaaaaatagaattgttaagttaaaagtttgtagaatttgtttggggtagagttgatttttgatattggattagattttatttgtttcgttgatttttaggaatttttgtcgttgtttttgagttttcgtagtataggattgaattaagatgaatcggcgcgtattttatatcgtttgttttgtgttttaaaacgtcgaagttaattttttacgcggttttttgttcgattatttatttttgcgttgttaggtatatcgaggggatcggttttttttttaggcggtttattttagcgtttttcgttagagggtatacggttttcgtgtaaagcgtttatggcgcggggtacgcgcgtacgtagtttcgatttttatagtttaggttttattttcgggttgggtttagtcgttaaggcgttggggaggggtcgtgttagggagcgaagcgttttcgggattttgggagggtgcggtcgggattgttgttttttgttttgagttttgggcgtaggcgttcggtaggattcggcgtttaggtgagcggcggtttttaggaggggaagtatcgcgcgatttaacgggcgtttagagcgtagggcgaagaggacgggcgagggagagggggagggagaggttacggtattcgaggaggaggaggagtaggaggagtaggaggaggatcgtggggttcgggtcgcgttgcgtatttatttgggttttggttgttcgtcgcggatttcggttttttgtcggagtttcgttttttttttttgtttttttttttgtttttgttttttttgcgttcggatatttcgtcggagacggagcgttttacgcggacggttttcggcgtaggcgagtttggtttaagggttcggatcgggtttgggaaaagtttgtttttcgagggggagagcgagcggtcgcgttgaggcgttcgcgttgcgcgggggcgtttttcgttgtttgtagggagcgcggcgcggacgcggcgggcggttcggttatttggaacgggcgttcgttttggttttcggggttgtttttgtcgtttcgggaagtcgtcgatgggttttatcgttggcggttcgcgttttggtttttgttcggcgttttcgtaattcgatcggggagaggttattatcgttttgtttacgtttttatcgttcggtagtcgtcgtcgtttagtttttggttttcgcgcgagttcggagttttaataagtttcggggaatttttcgtcggtttttttttaattgtttcgtagttatttatttttcgttcgtaggttggaggtaggcgtttttttcgtatttttttttggtttcgtttttttttttttttttattatatttttatttcgaggcgcggatacgttatcgggaggagtttgggttcggcgttttcgggcgtagtttttttttttttcgcgttggtcgggcggggggtggcggcgcggttgtcgggaattttcgataggggtcgttggacgttgcgcggagatcgaggttagcgtttcggagattcgggaatttaggcggagattcgaggttttcgttgttcgttttttttcgtagttaggtagcgtttgggagggttgtttcgttttattttacgcggaaaaggacggcgtagagaaaagtttgcgatttttatatttgtgttttaagtagagttttcgtggttaggaattttgggaggggtgcggggggaacgttggtggtttttttagaagagttcggggtttattttttaatttatttaagtataaaagttttgtcgtacgtaggcgaaaataaattttaggtggaagggagtttaagataaggtttttttttaggtgtataggaagggttaagcgaattttaaagatgttaggttgcgtttttttgttgggtttgcgtcgtgtgcgtgtgtgtgtgtgtgtgtgtgtgtgtgtgtgtgtgtttagtaagtgtttgttagaaatttttagtttttttttaaaaaataatttggttttttttaagggggtgtttttaaattacgttttttattataatttaatttttagaggaattgataaaaaatatagttcggagtacgatttagaataattaaaattattgtagtcgttgaaagttatttagttttgtcgagtggaaaagtaggtagggaggggtagaataaagatatagaattggagatttttaattcgtgaatgtggggttttttagatttaaattttatttagaattgcgcgtgaaatttatttttttttttgttttttttttggtggagaattttaaagagtaaggaaataagaaggtattgattttttttttgtaaaggataaaagttaaagattagggtaacgggtattacggaaggatttagaattgtttatatgtagagaaaatatttttagagttatattatagttgtggttaatttagatttttaatttatagtgaaatatttttgtgttgtggtcgggaagtggtgagttggaataatttatatttaaaatttattgttttattttaaaagtgatttgtttttggttttttattttttggggttaatgttaattgaattattatttatatattatttttttacggtattttttgatggtcgtaatttaaataaaagtgtagtttggagtgtttttttgatatgtagatgggaagggagggagggaaatatgtttattttaaaattgttttaaaattatattaattttattttagtttaatttgtattgttataagaacgaaattttgttgaatgggtttaattgtggaaagatattttagtagttttgttattattatttatagtttaaaagtttgatgtttaagtagtttttgatagtttttttataaatattaaatataaattttattgggttataaagatagtaaaagtagagaaaagatgatgaatatattttagtagtattattaatattttatagagacgtatgtaagatggagtttgaatattggttgaaataattttgtttttttaggagggggttattgtttagtaagtaggaaatagtaaaatttagagaagtttttttaaaatagatattttgttttaaggatgtgagatagtataagggtttagtatatattattatatattttttaatatggtattatgttagaattgaaggattgaaagtaaagatgtattttgggatttttttttaaaaaataagattttttttaattaaaaaaaagaagtttaaaatttatttttatggaaatgttgtaattttgttatttttgtttagggtttggatgttttgttttaataaaatagtttattggttatttttagagtaattttttagtgagataggggaagagtttacgattttgtgatatatttttatttgaatgaatttgaagaggtagttgatagttttttaaaattaagtatatatgattataaaagagattatagatattatggtggttttaagataaaacgtaaaagtaggatttttataggaa

SEQ ID NO: 352 - DNA, 6103 bp, Artificial Sequence
  chemically treated genomic DNA (Homo sapiens)
aagttttataaatatgttttttaatttttaatttttttatataaggttttttaaaatggtatttatttatatatttttttttgaatattaatttaaagtaatttttttttgtattttaaaatgtttattgttatatatatttttgatttttgataatttgtgatatgtgagggttttttttttattagtgattgtagttttaaatgtatttttttaagaattatattatatatgttattttgataatatgagatgattataatttagaaatagattatatttttgttttttaaattttttatgatttttgtatttaattgttaagttattgaatatttattagaataaataatgtgtaattgataaggtgtattgtgttgggggaaggagaaagtaggaggagggagataagggagtagagaagttagttattttatggggttatttgataaagattattaagtttttagcggtttagattagggattatgtggagatgtatattgtgtaaatgtaggagtaatttattaataattaaatagaagttgtttttggataagatttaataaatatttttattatttattttttattgtataatattgttttatagttttttaaggtattttagagtattttaatattttttaagtattaaaatatttaatagaataaaaaattagaaatttttagttggtttttatttgtttttataaaatattttagaatataaaattaataataaaaagtagttaataatatttttaaggataatgttagagcgataaattgttgttattttttaaagtttttttttttttattaagatattgttaagattttttttattaaagtgattatagtttaatatagttagtgtttagatatatttttattattaaatttttaaaatttgttttttgaagggggtgggggaggaaagtttttaaaaattataggtatcgatttagaaagatgaaggtagtaaaatttattataagttgttatatatattttgttatttaaataaagtttgtttatattatttagaattagttggtaaaattggtaaatatattaatttttatgagagtataggatatttattataatttagcgattatatagtttagtaagttatatcgtatgttaataaatttagttttagttgggataaaacgaaattttaatttgaataagtacgagataggtttatattaaatattttagtgtgggataatttgatttgaaatattttattaagaagtaagtattggatttagggataagaagaaaaagtttttagattgatatttttttgatttttgatatgggagatttttatttttagttgtagagatttatagattttagtgttttgtttttaattatttgtatttttgtgtagtatttaatattatgaagatgagagatgtagttaaatatattcggcgagtaagacgttagagttgaatttaaagtatttagtagaagttatttttttttattattattataattaatagattttgtaatttttttagaaatagttaaaaaaaaaaaaaaaaaaaggtgtttgtttgttagttttaagagaaggatgtgttatttgtttagtaaagataggtaattacgatgaagaaaaaaattggagttatatggaggacggaaaatagtagtagaaaaagtttaattttgtttgcgttagcggtgtggatgagtagagtaacgagtttaggagaggaaggagggggcgggggcgattattttttaggagaatttgtaagcggaggtttttatagtttgggagtttgtttagttgttttcgtagattttgttagtttgggtacggtaggttcgcggtagtagggtaggtaaggttttcgagggttatttttgatttattgagttttaggttagtatcgttaggattttttcgttttttttttcgttattgggttatgatggtagttttttagttttatatgttatatattagtcgtagattttcgttggtataggttagcgttttttttcgttttttatttttggtatattttgagtttgattttttttttttttaattttaatttttttatttattcgtgttaggcgttttgtttaggggcggttttatttttttagcgttcggacgttgttaggttcgggtatttgtagtattttttcgttttatttttattttttattatttcgttttttttttttttttttagtaaagggagggggcgatttatcgtagttagtgtataggattttgtttattttttttttgagatttttgtcgttggtatcgaggggggtaaaggtcgttttaaagattaagggttgtttcgtgggttttaggaaaaagatgtagcgttggtttttttcgagcggtatataggagtttacgttgattatttgttcgcgttgtagtttttcgtttcggagcggttatttgtttagtatttttattaacgttattcgattcgaggcgggcggttttcgggtgttgttggagttggagtcgtcggttgggattagtttttgtattttgttttttattattacgggtgttttgtacgtttggttttgtattgatttgaggttgggcgagtagtaggcgagcgatatatcgaagagtagtatggagaagtcgggggtcgggtcgcgttttatgtcgtcggcggttgcggttcgcgaacgggcggcggtttttcgggttgcggggttgcggggttgcggttgttgttgcggtcgcggttttgggggcgtagcgggacgagagatgttgttgttgttgttgttgtttttgttgttgttgtcgttttcgttgttgttgttgttgttgttgttgtttttttcgttgttgttgttgttgttgtcgttgtagttgttgtatcgatttttttttagtggcggcggcggtagcgttgagtagtaaatttgtcgtatttggttaggttatttggggggtttcgtcgtttagtcgtcgtcgttttgggaggggaaatagagttcgttggaaaatcggaaatagcgtaacgttagcgttttttagttttttatcggtagttcggggaggtggtttagttagggtagggggtaggcggtaagcgggtcgcgatgcgtagcgcggcgtagcgtagcgtttttattttgtgcgttaggatttggaggaggatgcggaggatgggacgttcgtttatttgttttttcgcgttttttttgttttcggatcgagtagggagcgcggtttttgtaggggaagtttgggattgtattgttttagtgttcgtttttagttcgtaggggcgcgggaggaatcgtgttattttttgttttcgggatttatcggtatgatagtgggggtggtgcgtgaggagaaggcgaagaagagataacgggtttttggtattattttatgaacgtggtaatgggacgtagggcgtgttttttgtttttggttagtagttgtaggagttagagaggttgttatggttagggtggtcggttagtttttcgttttttgggttgtttttttttttaggaggattttggagtttagtttttaaatgatattacgtgttcggttttgttatcgtttggtgaacgttggatattcgatttgaggtgggggagaattttagtttcgttattttggaaagagttgggttataaggtgttttgttttagtattgaggatatttaagtagaggtggtagttgagaaagggtttagtttttaatattttgggttttttttagcggttacgtggggatttggttgagtattgtataattttattttttaaaaatttgatttttaagaaaggtggggggttttttgggagttaatagagagttagagtttgttagggttagaggttgttttataaaaaaggttttttttgttttgttttgttttgtttttaaggttgatgtttgtaagaggtagaagagtttgttgtattggagttagtatttgatttaaaatatatatatatatatatatatatatatataggtttataatttattagtttattaatgagggtttagggagtttttaatatttagtttttaattttgaaggatgtggagtttaggaatgttagtgagtttttggggaattttatatcgtattgggttttataggaaattggtttaaggatgagtgatttaggttaggattgttattttggaaaggaagtagagagagttatatttttttttttagttaagagatattttaaatttaatatatttaaagttaatattattattttttttattttattttaaattttttataattattaatgttattgttttatttttttagattatattaatttattataataagtttttttattttattttttatttttttttatttaattaattattaaggtttttgggttttttttttaaaataatttttaatttatttatttttattttaattttgttgtaaatattttaagtttaagtttttattattttttatttggataatttttaagttttttaattggtttttattttttttattttattatttatttttagttttattaatgttagagtgatttttttaaaaataaaatgtaagtataatttggttatgttattgtttttagaagttaagtttaaattttttagtaaggttttttatgggttttttttgtttagttagttttatattttgagagttaattttttattttagtaatttttagtattttatgtttttttttggtgtgtttttgtatatgatgttttttgtgtttagaaagttttatttttattttgattatatggaaaatttatttttttaaggtttagtttagtattatatcgtatttttttttttatatatttatttttatttttattaatatatatatgatggaattaattttttttttttttgtattgttatgagttttatatatagtattattgttgggatattggtttatatcgtattttaagtagttatttaatgggtttgtattttttattaggttaggtacgttaatgttagggattatatatattttatttatttttggatttttattatttttaatataatgtttggtataaaataaggattagtaaatttttagtgaaagaaggagagaaggaagaaaataattgaaaatcggtacgtttaaaggtattaagttaatttttttggtttttttagtgttttttattttatttttatagattatagattttataaattataaaatattattataaggaagatagcgatatttatttttttattttataatgaaagaaaaagttttagaggggataggggatttatttaatattttatatagttaggattgaatttagttttttgtttttgagattagggttatagtgaagagtttgtgttttggagtttagtagagttgggttttaaagtaattttgtgatttattaattttgggatgagtttattttattttttaggttttagtttttttattagtatgaaggagaaaataatagggtttatttcgtaaagttgttttttgtttagtatgtatttttaataaatatttaattgaatggtttttttgtgttaagtattgaggtattgtatgttattggatgtattgtggtgaattaaattgtttaatagtatatgtttgtgtttttaaagtttatattttgattgggaagataatagtaaataagtatataaatgggtaattaattatttgtattgttgagtgttttgaaggaaataaataggatgaaatgttagagaataatggaaaggggagaggataggtttatttggataagggaaggtttttttgaggagataatatttaagttgagattagaaggatgatgaggatgtggattatgtgagataatatgtaaagtgtttagaataatgtttggtgtatagtaagggttaaaattaaagttgaagattattaatattttatttatattggtggtttttaatttaagagttgagaatttttaagtggtatttattttttgtatattaaaaatatttattaggattttttgtatattaaaaaatgcggttgggtgtagtg

SEQ ID NO: 353 - DNA, 6103 bp, Artificial Sequence
  chemically treated genomic DNA (Homo sapiens)
tattgtatttagtcgtattttttaatatatagaaaattttagtgaatatttttaatatatagaaaataaatattatttagagatttttagtttttagattgggaattattagtataagtaaaatattagtaatttttaattttaattttggtttttattgtgtattagatattgttttaagtattttatatattattttatataatttatatttttattatttttttagttttagtttaaatgttatttttttagagaagtttttttttatttaagtagatttatttttttttttttttattattttttagtattttattttgtttattttttttaggatatttagtaatataagtaattagttatttatttgtgtatttatttattgttgtttttttagttagagtatgagttttgagagtatagatatgtattattgaatagtttggtttattatagtatatttagtaatatatagtgttttagtgtttggtatagaggagttatttaattgaatatttattgaaagtatatattgagtaaaaaatagttttacgaagtagattttattatttttttttttatattgataaggaaattaaggtttagagagtgaaatagatttattttaaagttggtaagttatagagttgttttaaaatttagttttgttgggttttagagtataagttttttattatgattttggttttaggaatagaagattgagtttagttttggttgtgtgaaatgttgagtaagttttttattttttttgggatttttttttttattgtaaaatgaaagagtggatgtcgttattttttttatggtgatgttttgtgatttatgaggtttgtgatttatgaaaatgaaatgggggatattgaaggagttaagaagattggtttgatgtttttaagcgtgtcgatttttagttattttttttttttttttttttttttattggagatttgttaatttttattttatgttaggtattgtgttggaggtaataggaatttaaagatgaataggatatatatagtttttgatattaacgtgtttggtttgatgggagatgtagatttattaaatggttgtttgaaatacggtatgggttagtattttaatagtaatattatgtgtgaagtttatggtaatatagaggaggaagggattaattttattatgtatgtgttggtgggagtagaggtggatatgtaggaagggggatgcggtataatgttgagttgggttttgggaaaataagttttttatgtggttaaggtggaggtgaggttttttggatataagagatattatgtgtagaagtatattaagaaagagtatgaagtgttgaggattgttagagtggggggttggtttttaggatatgaagttggttaggtaaagggagtttatgaagagttttgttgaggagtttgaatttaatttttgagagtagtagtatggttaaattgtatttatattttatttttagaaggattattttggtattggtaggattggagataggtgatgaggtgaaaggagtggagattagttagaaggtttagaagttgtttaggtgagagatgatgagggtttggatttaaggtatttgtagtagagttggagtggaagtagataaattggagattattttaaaagagagatttaaaggttttggtgattaattggatgaggaagaataaaagatgagatgaagggatttattgtaatggattgatgtagtttaaaagaataaaatagtggtattaataattataggggatttggagtgaagtggaagaaataatgatgttggttttggatgtattgagtttaagatgttttttagttaggaggaaaggtgtagttttttttattttttttttagaatagtagttttagtttaagttatttatttttggattagttttttgtggagtttagtgcggtataaaattttttaagagtttattggtatttttgagttttatattttttaaggttaaaagttgggtgttgaaaattttttggatttttattgataggttaatggattatggatttgtgtgtgtgtgtgtgtgtgtgtgtgtgtgttttaaattagatgttggttttagtgtagtaaatttttttgttttttgtaagtattagttttggaaataaaataaaataaaataaaaaaaattttttttatggagtagtttttggttttgataggttttggttttttgttggtttttaagaagttttttattttttttagagattagatttttaaaagatgaggttgtatagtgtttagttagatttttacgtggtcgttgaagaaagtttagagtgttggggattgggtttttttttagttattatttttgtttgggtgtttttaatgttaagataagatattttgtggtttaattttttttaaaatgacggggttgggatttttttttattttaagtcgaatatttagcgtttattaggcggtggtaggatcgagtacgtggtattatttaggggttgggttttagggtttttttaggaaagaggatagtttaagaggcgagaggttggtcggttattttggttatggtaatttttttggtttttatagttgttggttaaaggtagggggtacgttttgcgttttattattacgtttataggatggtgttaggagttcgttatttttttttcgttttttttttacgtattatttttattgttatgtcgataaatttcgggagtaaagggtggtacgatttttttcgcgtttttgcgggttgaaggcgggtattaaagtagtgtagttttaagttttttttgtagaagtcgcgttttttattcggttcgggggtagagggggcgcgagagagtaagtgggcgggcgttttatttttcgtatttttttttaggttttggcgtatagggtgggagcgttgcgttgcgtcgcgttgcgtatcgcggttcgtttgtcgtttgttttttgttttagttgggttattttttcgggttgtcggtggagggttaagaggcgttaacgttacgttgttttcggttttttagcgggttttgtttttttttttaaggcggcggcggttgagcggcggagttttttaaatggtttggttagatgcggtaggtttgttgtttagcgttgtcgtcgtcgttattggagaagggtcggtgtagtagttatagcgatagtagtagtagtagtagcgagaggagtagtagtagtagtagtagtagtagcgagagcggtagtagtagtaggagtagtagtaataatagtagtatttttcgtttcgttgcgtttttagagtcgcggtcgtagtaatagtcgtagtttcgtagtttcgtagttcggagagtcgtcgttcgttcgcgagtcgtagtcgtcggcggtatgaggcgcgattcggttttcggtttttttatgttgtttttcggtgtgtcgttcgtttgttattcgtttagttttaagttagtgtaggattaggcgtataaggtattcgtggtggtggagggtaaggtataggggttggttttagtcggcggttttagttttaatagtattcgagagtcgttcgtttcgggtcgggtggcgttggtaaaggtgttggataagtggtcgtttcggagcggggggttgtagcgcgagtaggtgattagcgtgggtttttgtgtgtcgttcgaaaggaattagcgttatattttttttttggagtttacggaatagtttttagtttttaagacggtttttgtttttttcgatattaacggtaaaaattttaagaaagaggtgggtaagattttgtgtattgattgcggtgagtcgttttttttttttgttggagaaaggggggaggggcgaggtggtggagaatgggggtggggcggggaggtgttgtaggtgttcgggtttggtagcgttcgggcgttgggggggtggggtcgtttttgggtagggcgtttggtacgggtgggtgagggggttggggttggagagaagaaggattaggtttaaagtgtgttaggggtggggggcggagggaggcgttggtttgtgttagcggggatttgcggttgatgtatggtatgtggggttggaaagttgttattatagtttagtagcggaaggaaaaacggagaggttttggcggtgttggtttgaggtttagtgagttaggagtgattttcggaggttttgtttgttttgttgtcgcgggtttgtcgtgtttaggttggtagggtttgcgggagtagttgggtagatttttaggttgtgaaggttttcgtttataagtttttttagggaatggtcgttttcgttttttttttttttttttgggttcgttgttttgtttatttatatcgttggcgtaggtagagttggattttttttgttattgtttttcgttttttatgtggttttagtttttttttttatcgtgattgtttgtttttgttaagtaggtagtatattttttttttaagattagtaagtagatatttttttttttttttttttttagttgtttttgggggaattataaggtttgttgattgtgatgatgatgaaagagagtaatttttgttgaatgttttaagtttagttttaacgttttattcgtcggatgtatttgattgtattttttatttttatgatgttggatgttgtataggaatgtaggtgattagaaataaaatattgaaatttgtagatttttgtagttgggaatggaagttttttatgttaaaagttaaagaaatgttagtttaagagttttttttttttgtttttgaatttagtatttattttttagtaagatattttaaattaaattgttttatattggagtatttggtgtaagtttgtttcgtgtttatttaaattgaggtttcgttttgttttaattaaagttgaatttgttggtatgcggtatgatttgttggattgtgtaatcgttgaattatgatagatgttttgtatttttatagaagttggtatgtttattagttttattaattgattttgggtagtgtagataggttttgtttgagtagtaaaatatgtgtaatagtttatagtaagttttgttgtttttatttttttagatcgatatttatgatttttggaagttttttttttttattttttttaggaggtaaattttaggagtttagtgatgggagtatatttagatattaattatgttaaattgtgattattttaatgagaagaattttggtaatgttttaataaggaggggaaaattttgggggataatagtagtttatcgttttgatattatttttaggaatattgttgattgttttttattattggttttatgttttgaaatgttttataaagataagtagagattagttaagaatttttaattttttattttattaagtattttgatatttggggagtattaaaatattttgagatgttttggggagttgtgaaatagtattgtatagtggaaaatagatagtaaaaatatttattgaattttgtttaaggatagtttttgtttggttgttggtgagttgtttttgtatttgtatagtgtatatttttatataatttttagtttgggtcgttgaggatttgatggtttttgttagataattttatagagtaattggtttttttgtttttttgtttttttttttttatttttttttttttttaatataatatattttattaattatatattgtttgttttagtgggtatttagtagtttaatagttgaatgtagaaattatgaaagatttgaggggtagaaatatggtttgtttttaggttatgattattttatattattaaaatagtatgtgtagtatagtttttaaaaagatatatttagaattgtaattattggtaaaggaagggtttttatatattataaattattaaggattaggaatgtgtatggtagtaaatattttagaatgtaaaaaaaaattgttttgaattgatatttaaagggaagtatataaataggtattattttggggagttttatataaggggattagaaattaaaggatatatttgtgagattt

SEQ ID NO: 354 - DNA, 6245 bp, Artificial Sequence
  chemically treated genomic DNA (Homo sapiens)
taaggaggtagtttaaggttaaatttaatttaatttaatatttttagtttgaaagataaaattaaattaaattaattaagaaatagaaaaaagaaaatttaaagatgtatgagtatgtataattttgataaaaataaaaataataattatttgaattggtaattagaaaatagttatatttttaggtaatagatgtttttaggtggatgagattgtgggtggttttttttgttgttgatattttttgtgtatttttaaaaaatatttaatgttttgtaaagaatataagaaatagattagtatattagtggttttggaggaaataattttagtaaaatatgtgtttattaatgaatgtatttttttatttttttttaaaaaagtttataggtgtagttatagttaaaggtaagaggtagttttgttagagttagtaaagtaattaattattttggtttgtttaagattaagtagttttttaagatattagatttttagtgttaaaattagagaagttttatttatattaggagagttgattattttagtttgtgtaatttgtaaagattttttatattttttggtttttgtgagttttaaatttatttagtgaggtataggtgggtcggtggatggttatttttattttagaagagaggtagttaaggtttagggaatttttttatttttgattcgggaaaggttttaagagaaagtggttttttaaattgtgtgtatatattattttgataaaattaaaaattagttttaaagaagagagagggttaggcgtagtggtttacgtttgtaattttagtattttcggaggtcgaggcgggtaggtcgtaaggttaagagatcgagattattttggttaatataggtgaaattttatttttattaaaaatataaaaaaaaaaaaattagtcgggcgtagtggtgggtatttgtagttttagttattttagaggttgaggtaggagaatggcgtgaatttgggaggcggagtttttagtgagtcgagattgcgttattgtattttagtttgggcgatagagtgagattttattttaaaaaaaaaaaaaaaaaaaagagtgagggttaggcgtagtcgttacgtttgtaattttagtattttcggaggtcgatgcgggtagattacgaggttaagagatcgagattattttggttaatatggtgaaatttcgtttttattaaaaatataaaaattagttaggcgtggtggtgggcgtttgtagttttagttatttaggaggttgaggtaggagaatcgtttgaattcgggaggtagaggttgtagtgagttaagatggtaatattgtattttagtttggtaatagagtgagattttgttttaaaaaaaaaaaaaaaaataaaaataaaaaaaaaagagtgggaatttagaatgatagaaagaaaatgagtttgggagggatgaattgtagaggattataaggtaatatgggagtagttttgtaggtgtatataattgttaaaatttattgattgtatattttaattgggtgtagtttttgttgtttttaaattatgttttaattagagagaaagagagagaatataaggaaatgggggtagttatggcgtttttggagaatttatatttgggacgataattgtttatttgtgtatttttttttttttatttgttttttattttatttttgtttttgatggaatatttttttagttaagttattttttttaaggtagtttaattttttgtggggttgttatagtattaaattgttttttgtgtttttaggattttaatttgtttgtgtatatagaaaattcggattttattttttgtttttagaattttttgttggtttgggtgttttgtatttatttgtgggtcgttttgttttgttatttgttttatttgcggtattattgtcgtggttatattatttttttttatttgtttaagtttaagatggttagtggtttagggattttttatcgatggggttgggttttggggattttgtttttattttttaatttaattaaattaattaattaattaatttagagatagagttttattttgtcgtttaggttggagtgtagtggtatgattttggtttattgtaatttttgttttttgggtttaagcgatttttttgttttagttttttgagtagttgggattataggtatgcgttattatatttagttaatttttgtatttttagtagagatggggttttgttattttggtaggttggtttttaatttttgattttaggtgattagttttttaaagtgttgggattagaggtatgagttattgtgtttagttagtattttggttttaatgaggtttttttttattttttcggttggattgggttttttagttttatttgatttgtttggggttatgggaatttgataattgagaatatatatagttagttgatatattttttatttgggaaagtttaagtaagtttagtaatattttttttatttttagtaagtttttggttagttttatttttagattttagtgttagttttaggtaggtttagtggattttggtggttttaggtataaagatttttttttagtgaggattgtttttgtttttggggatgcggattttaatttgtgtttttttcgtaggttttgggtgttttgttgtggtgcgttttttgggcggattttttttattttttttatggtttggtttatggtcgggtttttgtttttgttttttttgttatttttttggtggtgggggttattatggttagtgtggggttttgggaaagtggatgggggaggtttttattgggttgtggattgtgatagggaaattgtgggttttgaggagagggttggatatattgggaatgggaagaagaagggggtggttttagaaatttttggttatgtgggatggggagaaatggaggtaggtttagatgtgtgtgttttgttcgggtttttttgttttttttgtatagttgttggttattttgttgatatagtatgagcggttgtagggcgtatagttttcgggggtttttattattttttggtttttgtgtgtggtttgcgttatcgttttatttcgttttaagatttttttagttaaggtagaggtaaggttgggggagaggggaatttgttaggtttagttttgataggagggtgattttagggtttaaagttattgttgggttttaggtttttttttcgaggttttaagtataaatataattgtgttgttttttatttgttatatttttatttggaagtaggttgaggagggggtattagtgtaatataggaatgagttaagatgttattattgttggattattatgtgagggtagggggttgttttatagtatttatttattaagtgtaatatttgacgtgggtgttagttagtgtttgtgtaatgaatatatgtatgtagataagtgtgaagagttttggtttatttagaggttttattagtatgttttttttttttttttttattttttttagtttttggttttttttttgatttttagtggttgtgatgttgggttggtgggatggaatattgtaggttaatttagtgttttttatttttttattttagcgggaagtaggtaaggagagtagtaaagaatataggttgtgaataatttatttattttttatgtgggttcgggcgggtcgttgaaatttttggagttttatttttttaattgtagaaagggcgttatgagttgttttgtttgtaggttgatgttttagttagataaggttatgtaggtaaggtgatggtattatatttggtataggtgttatatttggttttcgttgaattagagtttttttgtgatttttttttattttttagagttttttgagtggggatttggaggtttttaggtgttgttttttgttttagaggagattgatgttttaagggatttcgtagggtaggggttgtaggtttaggtttttttagtgtttttgacgtttttttatttttttatttagggtgagattttagatttttttcgttttattattttttatatttattttgttttggtattttttgtttttattttggtttgttttagggagaaatttttattttttttcgtaaagaatgtcgattttgtgagttttttatggagggtgcgggggttttatagttgagtttttagtttaattttgattagtagtttttaatttttttagttttttttaaagtgggagagaggttatttttataatttgtaaattggggtttggagtaggaataagggttttttttatttttttattttgttttgagagggtggtgggtatttttgattttttcgttttattttttcgttttttagaatttttattttgagattagcgttggttttttttttcgtttgtttttttggtggtttataaagtgagttggtttttttattagttaggttagagggaggggagggatggaaggtgagatggagaaaggggagtagggtagtagtttagggatcgggttggttatttattttattttttatcgtagtgggtatagggtagatgagggtagggaagtggtttgggagggggattaaatgtagaggtttggtttggtttagtgtcgtttttaggttataggttagttttgtatttggtaggttgtggggataggtttaggaggttggaagaagattgttattagttttgagtttttttgtttgtgataaatttgtagtttgttatttttttggttgcgttttagagcggtttgagtaggataattgtgtttgtgatttgggtgatagtttattaattttatagtattgaggaagtattcgaggttggggttaaattgtttaggtttcgtttttatttagggttttaggtagcgtggattttattattagggtttggggtggggaggagatgggatatttggggaggaggaggagaagggggtagtggtaggaatttcggagggagagttagtgattttaagtttatttattgaggaaatgaaggagatattttttatggttatagtgttcgagggagatttttttttttggagattttggggttttggagatattgatttttggttttaggttgttaaattttgattttttgcggggttgtttgtcgggttttatttttttttaggatggttatttatggttatcggtattttttggaggagaaggatttttggtttttaaaggaagaggatagattttagatggtggtgtagtagttgttggaggtatggaggaagtaggaaaagtagacggtacggtgaggttttttttttgttttaatatttagttttttcgtttattttagattttttgtagaggacgttggtagattttggagggcggtattgttggggtggtaagtagagtaggattaggtgattttttggtagtttcgggattattttatgggaagtttaggtttggatggcgttagtttttttagttttggtgggggtaggagaatggttggtattttggagtaattattttattttaggttttattttaaggatataaataaatttatttaattttttaatagttttaaagggtaggtttaagtgtttttgtgttatagatggggatattggggtcgggtgtggtggtttatagttgtaattttaatattttgagatgttaaggtaggaggattgtttgagtttaagagtttaagattagtttgggtaatatagtgagattttgtttttataaaaaataaataagatgagtcgggtatggtggtgtgtatttgtagttttagttatttgagaggttgaggtgggaggattatttgagtttaagaggttaaggttatagtgagttgagattgtgttattgtattttagtttgggtaatagagtgagatttttttttaataataataaaaatagatggagatatcgaagtatagaaatttaatagagggttttttagggtttttaagttggtggtggtagagttggaatttatatggagtcggttggttttagaggttttttttatattattgtattattttgtttgattgagagggttgattttagggttaggagttagtatatttttgttaattttgtttttttttgtttggaggcggcggttgaatgagatgatttttttttgaggggtttttttattgttagttttttattaaggattat

SEQ ID NO: 355 - DNA, 6245 bp, Artificial Sequence
  chemically treated genomic DNA (Homo sapiens)
gtggtttttgataagaggttgatagtgggaagattttttaggggaagattattttatttagtcgtcgtttttagataggaggaggtagaattggtaggggtgtgttggtttttggttttggaattagtttttttagttaggtagggtggtgtagtgatatgaggagaatttttggggttagtcggttttatgtggattttagttttgttattattaatttggggattttgggaggttttttgttaaatttttgtgtttcggtgtttttatttgtttttgttgttgttgagaaaaggttttattttattgtttagattggagtatagtggtataattttagtttattatagttttgattttttgggtttaaatgatttttttattttagttttttaagtagttgggattataggtgtatattattatgttcggtttattttgtttattttttgtagagataaggttttattatattgtttaggttggttttgaatttttggatttaagtaatttttttgttttggtattttaaagtgttaggattatagttgtgagttattatattcggttttagtgtttttatttgtaatatagggatatttgaatttattttttagggttgttgaaaaattaagtgagtttatttatatttttaggatgggatttgggatggagtagttgttttaaagtgttagttatttttttgtttttattagagttgggagaattagcgttatttaggtttaagttttttatagaatggtttcgaggttgttaagaaattatttggttttgttttgtttgttattttagtaatgtcgttttttaaggtttattagcgttttttgtaggagatttggggtaagcgaaggggttgggtgttggggtaaggggagggttttatcgtgtcgtttgttttttttgttttttttatgtttttagtagttgttgtattattatttgggatttgttttttttttttagggattagaggttttttttttttaggggatgtcggtagttatagatggttattttggggggaggtgaagttcggtaggtagtttcgtagagggttagggtttagtagtttggagttaagggttagtgtttttagggttttagggtttttagaaaggagggtttttttcgggtattgtgattatgaaaggtgttttttttatttttttagtgaataggtttgaggttattggtttttttttcgaagtttttattattattttttttttttttttttttttaggtgttttattttttttttattttaggttttggtgatggaatttacgttgtttggggttttgggtgaggacgaggtttgggtaatttggttttagtttcgggtgtttttttagtgttgtggggttaatgagttgttatttaggttatagatatagttattttgtttaagtcgttttgaggcgtagttaaggagatgataggttgtaagtttattataaatagaggagtttagaattaatgatagtttttttttagttttttgggtttgtttttatagtttgttagatgtagggttggtttgtagtttgggggcggtattgggttaggttaggtttttgtatttggttttttttttagattatttttttatttttatttgttttgtgtttattgcggtggggggtgggataggtggttagttcggtttttaaattgttgttttgtttttttttttttattttattttttattttttttttttttttggtttggttggtggaagagttaatttattttgtgaattattagaaaaataggcgggagagaaagttagcgttggttttagggtaggggttttagaaggcgagagaataggacgggggaattaggagtgtttattatttttttaaagtagagtagggaaatggaggggatttttgtttttgttttaagttttagtttatagattgtggggatgattttttttttattttgaaaggaattggaggggttgggggttgttggttagagttgggttgaggatttagttgtggagttttcgtattttttatgggaaatttatagggtcgatattttttgcggagaaaaatggaggtttttttttgaagtaggttaagatgagggtagagagtattagggtaaagtggatgtagaaggtggtgaagcggaaggggtttgagattttattttgggtgggagagtggaggggcgttagaagtattggaaaagtttgggtttgtagtttttgttttgcggagttttttggggtattagttttttttggggtaggaggtagtatttgggggtttttaggtttttatttagaggattttgagagatgaggaaggattataagggagttttggtttagcgaggattaggtgtggtatttgtgttaggtgtggtgttattattttatttatatgattttgtttaattgggatattagtttataggtaggatagtttatgacgttttttttgtaattaaggaaatgaggttttaaaggttttagcgattcgttcgagtttatatggggagtaagtgggttgtttatagtttatgttttttgttattttttttgtttgtttttcgttgagatggagaaatgggaggtattaggttggtttgtagtgttttattttattagtttaatattatagttattgaagattaagaggaaggttaggaattgagggaggtgggaagaaaggaagggaatatgttaatgggatttttaggtaagttagaattttttatatttgtttgtatatatgtgtttattatataggtattgattgatatttacgttagatattgtatttggtgggtgggtgttgtggaatagttttttatttttatatgatggtttaatagtggtggtattttggtttatttttgtgttatattggtgttttttttttagtttgtttttaggtagaaatgtagtaagtggagaataatataattgtgtttgtatttgaagtttcgagggagggatttgggatttagtagtgattttgaattttgaggttatttttttattagggttaaatttggtaggttttttttttttttaattttatttttgttttggttaaaaggattttggagcggaatgggacgatggcgtagattatatataggaattagaagataatgaggattttcgaagattgtacgttttgtagtcgtttatattgtattagtagggtggttagtagttgtgtagggagggtagggaggttcgggtagaatatatatatttggatttgtttttatttttttttattttatatggttagaagtttttggggttattttttttttttttttatttttaatatgtttagttttttttttagagtttatagtttttttattatagtttataatttaatggagattttttttatttatttttttagggttttatattgattatggtgatttttattattaagggggtgataaagaaaataggggtaggggttcggttatggattaggttatggaaggagtaaaaaaggttcgtttaggagacgtattatagtaggatatttaggatttgcgaagagagtataggttggaattcgtatttttagaggtaaggatagtttttattgggaaggggtttttgtatttgaagttattagaatttattagatttgtttgggattggtattgaggtttgggaatggagttgattagaagtttgttggaggtggggagagtgttgttgaatttatttaaatttttttaagtggggaatatgttagttggttgtatatatttttagttgttagatttttatgattttaagtaggttaggtgagattggggaatttagtttagtcgaggaggtgggagagggttttattaaaattagaatgttggttgggtatagtggtttatgtttttaattttagtattttgggaggttgattatttgaggttaggagttggagattagtttgttaaaatggtaaaattttatttttattaaaaatataaaaattagttgggtgtggtggcgtatgtttgtaattttagttatttaggaggttgaggtaggagaatcgtttgaatttagaaggtagaggttgtagtgagttaagattatgttattgtattttagtttgggcgatagagtgagattttgtttttaaattaattaattaattaatttaattaaattaaaaaataaaagtagaatttttagggtttagttttatcggtaggagatttttgagttattgattattttgagtttggataggtgggagaggatgatgtagttacgataatggtgtcgtaggtagagtaagtagtagggtagggcgatttataggtagatgtagggtatttaggttagtagggagttttggaagtagggagtgaggttcgggttttttgtgtgtatagataggttggagttttggggatatagagaatagtttagtgttgtggtagttttatagagaattgggttgttttgaggaagatggtttagttggagagatgttttattagagataggggtggagtggaagataggtgaggaggagagagtatataaatgagtagttgtcgttttaagtgtgaattttttaaggacgttatggttgtttttatttttttatattttttttttttttttttaattgaggtataatttaagggtaataaaaattgtatttaattaaagtgtataattagtgagttttgatagttgtatatatttgtaaaattgtttttatgttattttatggttttttgtagtttattttttttaggtttattttttttttattattttggatttttatttttttttttttgtttttgtttttttttttttttttgagatagagttttattttgttgttaggttggagtgtagtgttgttattttggtttattgtaatttttgtttttcgggtttaagcgatttttttgttttagttttttgagtagttgggattataggcgtttattattacgtttggttaatttttgtatttttagtagagacggggttttattatgttggttaggatggtttcgattttttgatttcgtgatttgttcgtatcggttttcgaaagtgttgggattataggcgtgacggttgcgtttggtttttatttttttttttttttttttttttgagatggagttttattttgtcgtttaggttggagtgtagtggcgtaatttcggtttattgaaaatttcgttttttaggtttacgttatttttttgttttagtttttggagtagttgggattataggtgtttattattacgttcggttaatttttttttttttgtatttttaatagagatggagttttatttgtgttagttaggatggtttcgattttttgattttacgatttgttcgtttcggttttcgaaagtgttgggattataggcgtgagttattgcgtttggtttttttttttttttaaaattaatttttaattttattaaagtgatatatatatatagtttaaaagattatttttttttaaggtttttttcgggttagggatagggagattttttgagttttagttgttttttttttgaaatggaggtgattatttatcggtttatttgtattttattgggtggatttgagatttataggaattaaaggatatggagagtttttgtaaattatatagattagagtgattaatttttttagtatggatgggatttttttggttttagtattgaaagtttagtgttttgggaagttgtttggttttgggtaaattaggatggttggttattttattggttttgataagattgttttttatttttgattataattatatttatgaatttttttggaaagggatgggggaatatatttattaataaatatatgttttattgagattgttttttttaaggttattaatgtattaatttgttttttatgttttttgtaaagtattagatgttttttagagatgtatagaaaatattaataataagaaaaattatttataattttatttatttagagatatttgttatttgaggatataattattttttaattgttaatttaaataattattatttttatttttattaaagttatgtatgtttatatatttttgaatttttttttttttgttttttggttgatttggtttggttttgttttttaagttggaggtgttaaattagattaaatttggttttaagttgttttttta

SEQ ID NO: 356 - DNA, 6150 bp, Artificial Sequence
  chemically treated genomic DNA (Homo sapiens)
aggttgatagtttttttagaaagtgtggaagtaaaatagaggttgcgtaagggatgggaaaaattaaaaattaagtattttttttatttttatttttagtatcgaatgttttatttttggttatttaaatgtgtgggagtttttttttattaattattagttttttagtagagattaattgggagttttataatttaattttattttgattttatttatttggagaaagtattagattatataggttaagggtttagttttataagatttttttttaatgttagatgttaattataagtagtaggttgttatatttatatttttgattaattagttataagttgggggtttataattttttttttaggtttagttaatttgttaggtaagtttatagaattatagaaaatatttgtttatatttattagtttattatattaatgaaggatgtaattagggatatagatgaaaaatagttggaagagatgtaaagggtagagaatgtggaaagggatatagagtttttgtgttttttttagatacgttattttttaggaattttgatttgtttagtaatttggaaattttataaattttgttttttggggggtttatggaggtttaattatatagttatgattaattatattattggcgattaagttaatttttaattcgttttttttttttggaggttgtaagggaggtggtattaaaagttttaattttaattatgttttaataagtttattagtatataaaagatatttttaatattttagagattttaaggattttaggagttttgtgttaggaattaggggtagagatatattttttattatattataatattatagtttggtgtatagaaaataaagtaaataaaaattaagataaggtaattattaattttaggaaaagtaaaaagttataagagggatgaaatgttataaaatattgtacggtaaaatagtgaaaagtatttgtaaagtttttttagtgtaaatattgaatttttttttaatgatggtattattatattgggtagttgaaaagaagagaaggtagtgtgtttggagtagggtgagtaaagggagaatggtaagaaaggagattagaaaggaaaataggaattaggttatgttgaggtttggatttttttttttaagggtgttagagagttattggggagttttagataggaaatttgaatgttttaatttatgtttgaaaataataattttggttttattgtggaggaaaatatattatgtagggataaggtgaaaagttagtaggttcgttgggtaagagggataagaggtttttgtagaagagattttttttataatgtggtttggattgggaaaggtatatttcgggatgtaaggaagtgggtaggtgggaatatatttaggaggttggtggtttacggagtaaaaagagggatatagggatgattttttgtatgttagtataaggtatgtggagaaggtagaggaggttgttattgggtttaggaaggttggggagggaatgatttgtaattagagagtttgggatttagggttttgttttggatttgttaggtcgagttgttttagaaagtattaagtaggtaattgtgttagggtttagggtatagataaggttagggagaaatttagaatatgtttagatttaataggtagtaattttttttttttttttgttaatgtaaagaaatgttttattatatgtttggcgttttatacggttttaatggtatgatttggggtattgattgattgaagatttgatattgagaatttaagggtaaataagtagtgaattttggaatatattataataggtaatttatttaaagtgtttaggtttttttggttttttattttgggttatatttgttttaaggaaatattttttttattaaagttgaatttataaaatagtaaaagttttttttcgtttatatatataagaaataattttttattattagttggatttaataaatatttttttttaaaaaaaaaatttgtttttgtttagtagatttttttttatgtgtataaagtacgtgttaagttaaagattatgttaggtatattttgagatatttttcgttttttaaaaagtttttttttaataaatatttaaaaggattaatttgtttaaaagttttttaaagtataatttattataggtcgtagagttttttaaatttttagtaggatttttttttgatttttttattgttttgtgtaatttttgtatttaattatttattttcgaattggttttcgtagtgtggtttttaataagaattgggttttagttatattatagtagacgcggtgggggcggagggtagtagtggtaatcgtaaaataaaacgtattataaagtggtaacggttcgtgatttaggttagttgttgaaaaataaatgtttgttatatagaattatagaatttgagagtttgcggttaagggaagtcgtttatcggtggatcgatagcgtttcgggcggtagaaagaaggcggcggcggcggagattcggggaagttgtcggatttttaaaaaggtatttgttgggtgagtttttattgtgtaaacgggagttataggtgttcgattttaaggggttataattcgggaaaatttaagtttgtaaaattaagtacgttaaattaagtaagttttcgttgtgtattaagttgatgggggcgattatttacggcggagaaattgagtggaggaaggagggagaatttcgttaaagtttgtttgcgattgatagttagggagtgatttggaagttaggaagaggggtagagaggaaattaaagaagtaggtaagagagttagtttatgaaaatagagtttgttgtggagagtagtaggtatatttgcggaggagggggttgttttatttgcggggtcgttgcgcgtttttttaagtgtgttagcgggggaggcggggttggaaaggaaatttggtgaagggttggttcggagtttggggtggggatatttattgcgggatagggttagtaagaggattcgatacgtatcgtttcgagtgatacgtgtaaatgttaagatatagagatatttgtaaatgttatttaagagggtgaggacgggggagcggtttcgaggttgtgtttttcggggtaggtattggtttttgtggggttgcgggttaagtgtcgtttttttttaaggaattggtatttggggggggggggtcggtttcgtcgcgttggaagcgtaagtttcggggtttcggagatgcgtcggggcgcgtcgtttttcggggtagttttggatttcggcgcgtttaggcgtagcgtgcggtgttttcggcggggcgggtagcgagtcgttttagttcggcgatttatttcgggtttcgtagggcgcgagtagagtatcggttagggcgagtaggagggcgcgggcgggggatacgggtagcgggcgcgttgttatcgtcgtcggtttttagtgtagtagttttcgggttcggcggcgagcgttgtattattttacgcgggcgtcgagtcggggtcgggcgtcgcgatcggagggattttttgtttcggcgagttagtttcggagttttcgcgtagcgttcgcgtcgtcgttgagtttttttagttttttatttttaaaaaagttttttttcgtgtgtgtgcgtgcgtgcgcgcgcgcgcgtcgttttggtataagttagttttgatcgttgtaataaatgagtaaattgttcgagttggttcggggattaggaagagcgttagtgagagaaggtaggtttgtgaaatggatttacggttagtagttatcgtttttattatcgcggaataaattattgtttttttcgtattttcgttagttggcggcgtttcgcgggttttagagatcgttcgggttttttcgttagggtttcgtttcgagtcgcggttcgtttattttcgagggtgggcggtttagacgtggtttagtggcgttcgggcgttcggagcgtatacgttttcgttttaggatgatgtggtcgtagggttcggggcgttcggttgttaagcgtatatgcggcggtacggtttagttttttaggttgaagttggaaacgatgattttgttattcgtttttcggttttttgggaattttcggagtgcgggttaggtttttatcgcggtttatagttcggcgcgcgatttcgttcggttttaagcgtttaaaggggtatttttcgttcgagaaataagtttggattcgtaggtataagatatttgggcgttatttttgattaatagtgttaggttttacgttgatagattggtttacgtttttattttatgatttggatttagaaaagggtgtatagtgacgttttttaaatttttttgattgtaagaagtatttgggttggtttgttaaaaagattttcgggcgtttttttacgtttttagaatgagattttttaggttgtgaggttaggggagtttagggtgtttggagaaatattaatgaaagaatggtgcgttttgtttttttatttttgtttcgggttgattttatttttttagtttcgttcggtttttagggagattatgaaaagtagtagcgagggggttcgtatagatagaaatggttggagttatggaggatggttgatgtttattttgcgggttattatgatttttaattttggggatttattagaatagtaagagttaaagatattgttagttttagatattagttaatttagttttttataatgcgtggagtttaatagtttttaaagttttaggtgattttattgtgttgtttagatttaggattatttgtagaaattttattttggttttgcgatttcgtatcgatttttgacggagtatttatttttaggaggcggttatttagtatttgaggaagttgttttttatattatttttttttattgtagaggagtttttttaggagtttttttttacggtaggttttgtagtgtttttaaaatttaggtcgatttttttaataaggtgtaggattttttttttaaaaaattttagtgggaagtataggttttttagttttttttttaatgttgttatattttagtattagatttggaaattaggtttggtttaagttttgtgttatatttaatcgtattattaattagcgttgtagtgtattttttttgtttatttatttagttaatttatatgagtaattttatgttagaatttgggaaattaaacgagaaagttttttgtttttaaagatttttttttttgattaaattgataaattattattattggatagtgtgagttagttatttaatttagttaataatgattaggtttgtttattgatatggtttggttgtgtttttatttaaattttattttgaatttttatgtgttgtgggagggatttggtgggaggtaattgaattatgggggtaggttttttttgtgttgtttttatggtagtggataagttttaaaagatttgatggttttaaaaagaggagtttttttttataagtttttttttattttttgtttgttattatttatgtaagatatgatttgtttttttatgttttttgttttagttatgtggaaatgtaggtttattaaacgttttttttgtataattttatttagttttgtgtatgtttttattagtagtacgaaaatagattatttattattttataatttattatatatttcgtataatcggagtattgtgttaacgttttttatttgtattattttattttttaagttttgaatatatagatgaggaaattgtagtatagagatgtagtttttttattattatatagtgaagtaggttagagtttaattttagatttgttaaagataaagtttgtttttttaaggttgagttttaatttttagttttagtagttgttaagtgaaggtaaaatataaattttttaggtggttgtgagtattaggtgaaataatgtaatgttttttaatttatttgatttttgggatgtttgttaagaatttaatttttttggcgtttgtattggagatttttattagaaaggtttgggaaggataagttttagtaagtatttaggtga

SEQ ID NO: 357 - DNA, 6150 bp, Artificial Sequence
  chemically treated genomic DNA (Homo sapiens)
ttatttaagtatttgttaaaatttgttttttttagatttttttaatgagaatttttagtgtaaacgttagaggaattgaatttttaatagatattttagggattaggtgggttgggagatattgtattattttatttggtgtttataattatttgggaggtttgtattttatttttatttaatagttgttaaaattgaaggttggaatttagttttaaagaaataggttttatttttaatagatttgaggttgggttttgatttattttattgtgtggtggtgggaaagttatatttttatgttgtagtttttttatttgtatatttaggatttaaaaaatgaaataatgtaggtgaaagacgttagtataatatttcgattatacgaggtatgtaatgaattatgaagtagtaaatagtttgttttcgtgttgttgataaagatatatataagattgggtaaaattatataggaaaaacgtttaatggatttatatttttatatggttagggtagaagatatgaaggggtaagttatgttttatatggatggtagtaggtagaaagtgagagagagtttgtggaggggaatttttttttttaaaattattagattttttgagatttatttattattatgagaatagtataggaaagatttgtttttatgatttaattattttttattaggttttttttataatatatgggaatttaagatgagatttgggtggggatatagttaaattatattagtaaataagtttaattattattaattaggttaagtaattagtttatattgtttaataatgatgatttattagtttgattagaaagaaaagtttttgaaggtaagaggttttttcgtttagttttttaagttttaatatagggttgtttatgtagattgattgaatgaatgaataaaagaagtatattgtaacgttggttggtagtacggttagatatgatatagggtttgaattaggtttggtttttagatttggtattgagatatggtagtattgggaagggggttggagagtttgtgttttttattaaggttttttaaaaagaaagttttgtattttgttaggaggatcgatttgggttttgggaatattgtaaaatttgtcgtgggagggaatttttgagaaaatttttttgtagtgggaagagatggtatggaaggtagtttttttaaatgttggataatcgttttttaggagtgggtgtttcgttaggaatcggtgcgaggtcgtaggattaggatggaatttttgtaggtggttttaggtttgagtagtatagtagaattatttgaggttttgaaaattattgagttttacgtattgtgggaaattgagttaattggtgtttggggttggtaatgtttttaatttttattattttaataagtttttaaggttgggaattatggtaattcgtagggtgggtattagttattttttatagttttagttatttttgtttgtgcgggttttttcgttgttgttttttatggtttttttgagggtcgagcgaggttgaagaggtggggttagttcggaataaggatgagaaggtaaggcgtattatttttttattggtgtttttttaaatattttgggtttttttggttttatagtttggagagttttattttgaaagcgtaggagggcgttcgggaatttttttaataagttaatttaggtgttttttataattaggaaagtttggggaacgttattgtatatttttttttgggtttaggttatggaatggaaacgtgagttaatttattaacgtaaaatttaatattgttgattaaaagtaacgtttaggtgttttgtgtttgcgagtttaagtttgtttttcgggcgagagatgtttttttgggcgtttagggtcgggcggggtcgcgcgtcgggttgtgggtcgcggtggagatttgattcgtatttcgagggtttttagagagtcggggagcgagtagtagagttatcgtttttagttttagtttgaaaagttggatcgtgtcgtcgtatgtgcgtttggtagtcgggcgtttcgggttttgcggttatattattttggggcggggacgtgtgcgtttcgggcgttcggacgttattgagttacgtttgagtcgtttattttcgggggtgagcgagtcgcggttcggggcgggattttggcggggggattcgagcggtttttaggattcgcgggacgtcgttaattggcgggggtgcgggggagataataatttgtttcgcggtaataagaacggtgattgttggtcgtggatttattttataggtttgtttttttttattaacgttttttttagttttcgggttaattcggatagtttgtttatttattgtaacggttaaggttggtttgtgttagaacggcgcgcgcgcgcgtacgtacgtatatatacggggggaaatttttttaaaaatgaaaggttagaagagtttagcggcggcgcgggcgttgcgcgagggtttcggagttgattcgtcgaggtaggaaattttttcggtcgcgacgttcggtttcggttcggcgttcgcgtgggatggtgtagcgttcgtcgtcgggttcgagagttgttgtattgaaggtcggcgacgatggtagcgcgttcgttgttcgtgtttttcgttcgcgtttttttgttcgttttggtcggtgttttgttcgcgttttgcgaggttcgaggtaagtcgtcgaattagggcggttcgttgttcgtttcgtcgagggtatcgtacgttgcgtttgggcgcgtcgaggtttagggttgtttcgaggggcgacgcgtttcggcgtattttcggagtttcggggtttgcgtttttagcgcggcgagatcgattttttttttttaggtgttaattttttggggaagggcgatatttggttcgtagttttataggagttagtatttgtttcggagggtatagtttcgggatcgttttttcgtttttatttttttgggtgatatttgtagatgtttttgtattttgatatttatacgtgttattcgggacgatgcgtgtcgggtttttttgttggttttatttcgtagtgaatatttttattttaggtttcgggttagttttttattaggttttttttttagtttcgtttttttcgttaatatatttaggggggcgcgtagcggtttcgtaggtgaggtagttttttttttcgtaggtgtgtttgttgttttttatagtaggttttatttttataaattgatttttttatttatttttttagttttttttttgtttttttttttggtttttaggttattttttagttgttagtcgtaggtaaattttagcggaatttttttttttttttttatttagttttttcgtcgtaaataatcgtttttattaatttggtgtatagcgagaatttatttagtttaacgtatttagttttatagatttaggttttttcgagttgtagttttttaaaatcgggtatttgtggttttcgtttgtatagtgaggatttatttagtaggtgtttttttaaaaattcggtaattttttcgggttttcgtcgtcgtcgttttttttttgtcgttcggggcgttgtcggtttatcgatgaacgattttttttggtcgtaagtttttaagttttgtgattttatataataggtatttattttttaataattggtttaaattacgaatcgttattattttatgatacgttttattttgcgattgttattgttgtttttcgtttttatcgcgtttattgtaatgtggttaaaatttagtttttgttaaaagttatattgcgaagattaattcggggataaatgattaaatataaagattgtataaagtaatgagaaagttaagaaagaattttgttgagggtttaaagaattttacgatttgtagtgaattgtgttttgaaagatttttaaataaattggtttttttgaatgtttattaagaaagaattttttaaaaaacggaaagtgttttaaagtgtgtttgatatggtttttaatttggtacgtgttttgtatatataaagagaagtttattgagtagggataaattttttttttggaagaaaatgtttattaaatttagttaataatgggaaattattttttgtgtgtgtgggcgggggaggatttttattattttatgagtttagttttggtagagagagtgtttttttaagatagatatgatttaaaatagaaaattagggaggtttaagtattttgaatgggttatttattgtgatatattttaggatttattgtttgtttatttttagatttttagtattaagtttttaattaattagtgttttaaattatattattgaggtcgtataaaacgttaaatatataatgaaatatttttttgtattggtaagagaaaaggaggaattattatttgttgagtttgagtatattttgagtttttttttagttttgtttgtattttgagttttggtatagttgtttatttggtattttttggggtaattcggtttaataagtttaaaatagaattttagattttagattttttagttgtaaattattttttttttagtttttttgaatttagtaataattttttttgttttttttatatgttttgtgttgatatgtaggaagttatttttgtgtttttttttttatttcgtaagttattaattttttaagtatatttttatttatttatttttttatatttcgaagtgtgttttttttagtttaggttatattataggaaaaattttttttgtagaagttttttattttttttatttaacgggtttattggttttttattttatttttgtatggtatatttttttttataatagagttaaagttattatttttaaatatgagttagagtatttaagttttttgtttaaaattttttagtggttttttagtatttttaggaaagaaaatttaaattttagtatgatttaatttttgtttttttttttgatttttttttttattattttttttttgtttattttattttagatatattgtttttttttttttttaattatttaatatagtagtgttattattaaaaaaaaatttaatgtttgtattaagaagattttgtaaatattttttattgttttgtcgtgtagtgttttatggtattttattttttttgtaattttttgttttttttagagttaatgattgttttgttttgatttttgtttgttttattttttgtgtattaagttgtgatattgtgatataataagaaatatgtttttgtttttggtttttggtatagaatttttaaaatttttggaatttttggggtattaagagtgttttttgtatgttaatgagtttgttaaggtatgattagagttgggatttttagtgttattttttttgtaatttttagggaggggagacggattgaaggttgatttgatcgttaatggtgtaattaattatggttgtgtaattaggtttttataaattttttaaaggataaggtttgtagaatttttagattgttgagtaaattaaagtttttggagggtggcgtatttagagaggatatagaagttttgtatttttttttatattttttgttttttgtattttttttaattgttttttatttgtgtttttaattatattttttattaatataataaattggtaaatataagtaagtgttttttgtggttttgtgagtttatttagtaaattaattgaatttgagaagggggttgtggatttttaatttatagttagttggttagaagtataggtgtgataatttattatttgtgattggtatttgatattggggggaagttttgtgggattgagtttttaatttgtgtgatttgatgttttttttaggtagatagagttagaatagagttaaattgtaggatttttagttgatttttattgaagaattggtggttggtggggagaaatttttatatatttgggtgattagaggtgaaatattcggtattgagagtgagagtagggagaatatttggtttttggttttttttattttttacgtaatttttattttatttttatattttttggaagaattattaattt

SEQ ID NO: 358 - DNA, 6238 bp, Artificial Sequence
  chemically treated genomic DNA (Homo sapiens)
tgtgtttcgtttttaaaaagttgttaggaataattaattatattttatattaaagttataaaaggggtaataaagaatagtatatgtattttttagtatttttaatagaattttagtatgtataattttatttaaggatgaatattttaaatttaaatgtttatttttatggaaaataaagtttggattagaattttttatataattttataagatttacgtttttatatagttataatagttaattttttttaaaattatttttggataatttaatttaatttgattagtatttttttattaggttaatatattttaattataagtgtattttttattttttttttttttttttatttattttttatttaataaattttttttgtatgtttgtaaggtaaggtattatataatgtagtataattttaaggtagtttgaatatataatttttataataggaatttagaattattaattttattttttataataaaagtattagtgatgtattaaatttttatttatatgtatgataaatgtatttaatatgttttatcgttagggggaaataaagggggaaagatataatagatgggtggtaaattttataaattttataaaatattgaaaagttgtatttggattgtagttataattataaaagtaaataaagttttgaaataaaggaaaagaaaaaaattttaagtgattattaagagtgaaaaaggtttatttaatattagtttttagtatagtattatttaatattgattaattgaaaaaaaaaataggataatttatcgtttgtaaggatataggaaataatttttatatattttttataagatagttatatttttttatatttgtatggtttaaatttttttaaacgtttttaaaaatatagttttataataaacgaggttttttaatgatatatattttattttgtagatttagttataatacgttttaaaatatataaagaatttattttcgatagaaataaggagttataaaggttttttatttatttagaattattatataaaatattatttgtaattgtaaatagggtttgagaaaatttgatagttaataattataaaatggggtagattttaaaggaaaaaaaagttaatttttttattttgttttttttttttttttttattagatatataaaatgtttgtaatagcgttagatagagttttaaaataaaaatatagtgttatatatgtatattttatattacgtgtataggaatatatatgtatatattatacgtttataggaaatagaaaggttttttcgtttttgtttttgttttttttttattttaggaattgaagttatattaaattttattttataaattaagttaaattattattaaattaaagagtaataaaatattgtacgtagatttttttgagcgattattttttgagaaggaaaattttagattaagattatggttgaatacgaacgtttaatttttaaaaaaaattattaatcggtatttgtttttgtaagagaaaaagggagttttataatgaataattatataatttagttttagaagttaatcggggtaaaatataacgaattaaattagataaatgtatgaaaggataagtttttaagaattcgtttaaagtgaaagattggttttaatttcgggatataaaatattttttgtaggtagaagagtttttaattgaaaaagaaaaaaataaaataaagtggcgggtataagaaaaatttgaacgatacgtaaaggtaaagtaaaaaataatgataattttaaaaaggggtttttttttttatttttatttttagtttttatttttattttcgtaggataataggattagggttttaattgtaaattttaaacgtgtaaattagaagtagttttatcgtagttgtaattgtaaatttttttatttcgaatttagcgtatttaggaatatttttgttttgaaaatattagtaagtttttggtaaatataaattagatttattacgagatttttttttttttttttttaagtatttggaggatttattttaatataaaatattagttttgtcgaatagggtattattatttttttttagtttgcgttatcgcggtttatattttatatcgtattgtatatcgcgttgttaggggtaggtcgttaggagatatatagaaggtatatattttttatttggtatttaaaaatttaaaaatatatatttgtaaaagttttatacggaaatgtatttcgggttttttaacggttagtattagttcggttaaattattcgaatagggtttttttttttttttttatagaatataataaaatgttttcgaatttttaagttatgggtttttttttttagaggattatatagaggtttgggggacggagagtagaggtgttaaaaagcggttttttaaaaattttttttatatagtcgtttttcggggagaaaagtttttatcgtttttaaattttttcgcggaagttatttttgtgtttttcgaaggagggagaatgaagaggaaaaaaaagaatacgttgggagaaattcgggtaagtgataaaggaaggtaaaaaagggggttggagattgcgtttaagtttcggggttttattggtttgtagagagcgaattttttagaggtcgggattcgggttttttttcggtcggtttcggaatcgaagttgtcgtagtttcgggaatggggtcggtcggagaagtttagttagttcggtttgtttgggcgttttcgtcggggtgtaagaattaattcgatcgtattaattgtttttaagttttgttcggattttagttattagagttttattttaacggcgcggaggggatatttttttcgttttatgttgtttattcgttgaggcgttatttaatcgcgtcgggaggggggatagtaggtattattatcgttttttttacgtcgtttcgtttcgatgtatcgggattttgttaagtgtttgagaatatgtttaaaaagttgttttttatttcgatttttacgtttttttatcgttttttaggtttcggttttttaattagttattcgcgtttttttttagttttaattagaatggtacgattcgggcgttggtcgtattttaggagttagtgtcgggagtacgcgagttaggcgaggagggagtggggcgagggaagagaggtaaggtgggtggtgattggttgaggtcggttgtcggagtttggagtttgcgttttttgtttgttttgtttttgcgaaggagcgggagacggttgcgcgttttaagcgggttaattaggagatagtcggcgtcggtcggtaaggcggcgattggttagagtttagttattaagcgggataaaggtagaaggggaaaagaaaagaggaggaaaaaaaagaaagaaagaaaggaagaaaacgtaaacggcggttattgataggttgggcgagcgttcgggggtttaaattgtttggagataggcggggtttttgttgaggtttggttcgttcggacgagtaaggagaggagttagggaggatttgttggcgtgagacgtttttgttcggtgattggtcgcgggggaagggagcggatatagagggggtacgttttgttatttggcggggtgcgcgtttttttggtttttaggaggtttttggggagattttttttttatagatttttttattttgttgggatagtttttttcgtatttttgataagttgttaaagtaatggtttttaaatttatttgttattttattatttagggagaggatgtgttcgtggtttttgtaatttttttggttgttatttgattttattttttgtttttttttttgagtaattggatatttttgagggaggtatttcgtagtttttttgtgttttttatttaaagatttttgaatttagaggtaattttttacgtttaaaatagtgagaggttttagtaagtttttttgttcgagtgtttaaattaattaaaaaaaaaaaaagttttggaattatagtgtatgtgtaatttttaagataagttataggtgttggaattttttattaaaagggttttattttgtttttttgatagatttttttttttatatatttatttttatttttaaagtttaaatttgggagattggttttattatgaaaatgttgaatatttttatgtattttagaaatagttaattaatttgttggggaatattgaatagttaaaagtagatttgtgttttttgaagattgtgtttggaattgttattttgtatattttataatatagtttgaggaggttaaaaattgttttattttttttttatataggagtaataaagtttattgtgtttgagttgatagtttgatttaagttttagtaaaattttttattttgagtatgtttgttatattgattcgtttatggaagagttgttacgttttattttttattttttaaggtggttttgttttttttaaagatgttttgagttgagatagtttttgagggtagatagttaaaatgtatatggattgggtatagagtaattggtttaaaagggttagaaagtatggatggatatggttgagttaagaaaagatattaggatttttatatgtttttttattatttttgaaatttaaatatgattttaattttggggtaggatttattaattataattttttgaattattttttataggtagaagatattggaagattaattttaatttgtggttgtttttttagtagtttttattttagtatatttgggagttagaagtatttaagtttgataatttaaaagatagaataattagttaagggtgggttggtttatttttgtttacgggtgtttatgtgtatttttaaataaaatgagggtgaagagagaggaagtgtggaaaagataatggtttttagatttttatagtattttttgtttggattattttttagtatttagtggtggggttttagtttttaatatatagagtaattatttaggttttttttatagttaaggttttgagagatgaagtgacgtttaagtatagtatataattaagtggttaaggttgatatatggagtaaagttgtgatttagtttttttatttaaaattgtatgatttaattttttaatttaaatagatttttgaatatatttttagagaataagtgatgtaagaggtaatgatgaattaaggggaagtaaatttttttagtttttgagtttaaattagtgttttgttatgggggaaagtatttgtgagatgattttggttttttttttagttgagaaatagaagtgaggttgtgattgtttgttattaaattgttttaggttttttggtaaaggtaaaaaatgttagttcgggtgttttggattatttttaagttggagaattatatttgatttgggtgtggattaaatttagttttaagtatttaagtttttgggttataatttgttattttgggagttgtttgtttttttttgttttttttttttttttttttaatttaaagtagttttaggtaaattatgaaatttgtttttatttatatatttatgaaatagatttatgtaagttgtttagtttatagtgaaatatttagaatgaaaaaatatgttatttaagtatttaggattaatagtatttttttgtaattttaaatggttaggatgttttttattttttattttggtatggtttttttttgtaattgtttaaatatgttttatttttttttttttattttagagatggatgaaatattttttttgtgttttgaatatagggtatgattttagagttttttgtgttagtagaattagtttggaatttagttagaagtttttcgtgattaaaggtgttatttgagcgtataatatttttttaaaagttttgtaaaatggggtcgggtacggtggtttatgtttgtaattttagtattttgggaggttgaggtgggtagattacgaggtcgggagtttgagattagtttggtttacgtggtgaaatttcgtttatattaaaaataaaaaaattagttgggtatgttggtaagcgtttgtaattttagttattcgggaggttgaggtaggagaattatttgaatgtaggaggtagaggttgtagtgagtcgatattacgttattgtattttagtttggataatagggcgagattt

SEQ ID NO: 359 - DNA, 6238 bp, Artificial Sequence
  chemically treated genomic DNA (Homo sapiens)
gagtttcgttttgttgtttaggttggagtgtaatggcgtgatgtcggtttattgtaatttttgttttttgtatttaaatgatttttttgttttagtttttcgagtagttgggattataagcgtttgttaatatgtttagttaatttttttatttttagtatagacggagttttattacgtgggttaggttggttttaaattttcgatttcgtgatttgtttattttagttttttaaagtgttgggattataggtatgagttatcgtgttcggttttattttgtaaggtttttaaaaaaatattgtgcgtttagatggtatttttaattacgaagaatttttggttgagttttagattgattttgttggtatagagagttttgagattatattttatatttagagtatagaagaaatattttatttatttttgaaataaagaggaagaaatgaagtatatttgaatagttgtagaaaaaaattatattagggtgaaaagtgaagggtattttagttatttggagttatagaaaagtattattaattttaaatatttaagtggtatatttttttattttaagtgttttattataaattaagtagtttgtataaatttattttatagatatataaatgaaagtagattttatgatttatttaagattattttaaattaaaaaaagaaagggagagggtaaaggaaaataagtagtttttaaagtagtaggttgtgatttaggagtttgagtgtttagagttgaatttaatttatatttaggttaaatataattttttaatttggaagtggtttaggatattcgagttaatattttttatttttgttaaagagtttggggtagtttggtgataagtaattataattttatttttattttttaattgaaagaaagattagaattattttataggtgtttttttttatggtagggtattggtttaagtttaaggattaagaaagtttgtttttttttgatttattattgttttttgtattatttattttttggagatatatttaaaggtttatttaagttggagagttgggttatataattttaggtggaaagattgaattatagttttattttatgtgttagttttgattatttgattatatattgtgtttggacgttattttattttttaaagttttagttgtgggaaaagtttgggtgattgttttgtgtattagaaattgaaattttattattaaatgttgaaaagtggtttaggtaaaaggtgttgtggaaatttgaaagttattattttttttatattttttttttttttatttttattttgtttgggaatgtatatgaatattcgtgaataaaaataaattaatttatttttgattgattgttttgttttttgagttattaaatttgagtgtttttggtttttagatatgttgaagtagagattgttgggaaggtagttataaattagagttgattttttagtattttttatttgtaaggaatggtttaggaaattataattaatgagttttgttttaaagttgaaattatatttggattttagaaataataagaaagtatataagaattttggtgtttttttttagtttaattatgtttatttatattttttggtttttttaaattagttattttatatttagtttatatatattttgattgtttgtttttaggaattgttttaatttagggtatttttaaggaaggtagaattattttaggaggtagagggtgaaacgtggtaatttttttataggcgaattaatatagtagatatgtttaaggtaggaggttttgttagggtttaaattaggttgttaatttaaatataatgggttttgttatttttgtgtaaagaggaaatggagtagtttttggtttttttagattgtattgtagggtatataggatggtaattttaggtataatttttaggagatataaatttgtttttagttatttagtgttttttagtaagttaattagttgtttttgaaatgtatggaaatatttagtatttttatagtgaagttaattttttagatttaagttttgggggtgggaatgagtatgtgaggaagagggtttgttagggaaatagaatagagtttttttggtgagagattttaatatttgtgatttattttagaaattatatatgtattgtaattttaagattttttttttttttaattggtttgagtattcgagtaggagggtttgttgagattttttattattttaggcgtggggagttatttttgggtttaaaagtttttgggtgggaagtatagaggaattgcgaaatgttttttttagaaatgtttaattgtttaaggggagaagtagggagtggggttaggtagtagttaggaaggttgtaggggttacgggtatattttttttttgagtggtaaggtggtaagtgggtttggggattattgttttgataatttgttaagggtgcggagagggttgttttagtaaggtgaagaggtttgtaggaaaggagtttttttagagattttttaaggattagaagagcgcgtatttcgttaagtgatagaacgtgttttttttgtgttcgtttttttttttcgcggttaattatcgggtagaggcgttttacgttagtaggttttttttggtttttttttttattcgttcgggcggattaagttttagtaggagtttcgtttgtttttaggtagtttgagttttcgagcgttcgtttagtttgttagtaatcgtcgtttgcgtttttttttttttttttttttttttttttttttttttttttttttttttttttgtttttgtttcgtttagtaattgggttttgattaatcgtcgttttatcggtcggcgtcggttgttttttgattggttcgtttggggcgcgtagtcgtttttcgttttttcgtaggagtaaggtagataaaagacgtaggttttaggtttcggtaatcggttttagttaattattatttattttgttttttttttttcgttttatttttttttcgtttggttcgcgtgttttcggtattgatttttggagtgcggttagcgttcggatcgtattattttgattgaggttgggggagagcgcggatggttgattggggagtcgaagtttagagagcggtggggagacgtgaaagtcgagatggagagtagttttttgaatatgtttttaggtatttgatagaatttcggtatatcgaggcgggacggcgtggaaggggcggtggtgatgtttgttgttttttttttcggcgcggttgggtggcgttttagcgggtgggtagtatggggcggggagggtgtttttttcgcgtcgttaaaatgaaattttagtggttggagttcgggtagagtttgagggtagttggtgcggtcgggttggtttttatatttcggcgggagcgtttagataagtcgagttgattggattttttcggtcggttttattttcgaggttgcggtagtttcggtttcgagatcgatcggagaggagttcgagtttcggtttttgggggattcgttttttgtagattagtgggatttcgaaatttgaacgtaatttttagtttttttttttgtttttttttgttatttgttcgggttttttttaacgtgttttttttttttttttttattttttttttttcgaaggatataaaagtggttttcgcggaaagatttggaggcggtgggagttttttttttcggagagcgattgtgtagaaaggatttttgggaagtcgttttttaatatttttgtttttcgttttttaagtttttgtgtaattttttgaggagaaaagtttatagtttgaaagttcgggggtattttgttgtgttttgtaggagagagggggaggattttgttcgggtagtttggtcggattggtattggtcgttggaaaattcgaagtatattttcgtgtggaatttttgtagatatatatttttagatttttaaatattagataaaaaatatatgttttttatatattttttggcgatttgtttttgatagcgcgatgtataatacggtgtggagtatggatcgcgatgacgtagattggagggaggtgatgatgttttattcgatagaattgatattttatattgaaatggattttttaggtatttgggagaaaaaaaaaaagaatttcgtgatgggtttgatttgtatttattaagagtttgttgatgtttttagggtagaagtatttttgggtgcgttaggttcgggatgaggagatttgtagttatagttgcggtaaaattgtttttggtttatacgtttaaagtttgtagttaggattttgattttattgttttgcgaaggtgggggtgggggttggaagtgggggtgggaggagagatttttttttaaaattattattattttttattttgtttttgcgtgtcgtttaggttttttttgtgttcgttattttattttattttttttttttttaattaaagatttttttatttgtaaaggatgttttatatttcggggttaaaattagttttttattttgggcgaatttttgaaagtttgtttttttatatatttgtttaatttggttcgttgtgttttatttcggttaatttttgaaattgagttatgtgattatttattgtaagatttttttttttttttgtagaaataaatgtcggttagtgattttttttagggattgggcgttcgtatttagttatggttttagtttgaggtttttttttttagaagatagtcgtttagagaaatttacgtgtaatattttattattttttaatttaatgatgatttaatttaatttatgggatagggtttaatgtaattttaatttttagaataaagaaaaagtaaaaataaaaacgagggaatttttttgttttttgtgaacgtgtgatatatatatatgtgtttttatatacgtaatgtaaagtatatatatatagtattatatttttattttaaagttttgtttgacgttattatagatattttgtgtatttggtaggaaaggaaaaggaaagtaaaatggaaaagttggttttttttttttttaaagtttattttattttatgattattagttgttagatttttttaaattttgtttgtagttatagatggtgttttatgtaatgattttgaataagtagagagtttttgtgattttttgtttttgtcgaggatgaattttttatgtattttaaaacgtgttatggttaagtttatagaataaaatgtgtgttattggggaatttcgtttattataagattgtatttttggaaacgtttgaaaggatttgagttatgtaagtgtgaagaagtgtaattgttttatagaaggtatgtagaaattgttttttgtgtttttgtaaacggtgaattattttgtttttttttttaattagttagtgttaaatggtgttgtattaaaaattagtattgaataaattttttttatttttgatgattatttagaatttttttttttttttttattttagagttttatttgtttttataattgtgattgtaatttagatgtagttttttagtgttttgtaaagtttgtaagatttgttatttatttattgtgtttttttttttttgtttttttttaacggtaaagtatgttagatatatttgttatatatatgaatagaaatttagtatattattggtatttttattgtaaaaagtaaggttaataattttagatttttgttataagaattatatatttaaattgttttagaattatattgtattatatagtattttgttttgtagatatataaagggaatttgttgggtgggaggtgagtagggaggaggggagaaaatgaagaatgtatttatggttgaaatatattagtttagtagaaaaatattggttaagttgagttgagttgtttaaaaataattttaagaaaagttgattgttataattatatggagacgtgggttttataaggttgtatagaaaattttgatttaaattttattttttatggaaataaatatttgagtttaaaatgtttatttttgaatgaaattgtgtatattgagattttattgagaatattgaaaaatatatatgttgttttttattattttttttgtagttttaatgtagaatatggttagttatttttaatagttttttgaaaacgaagtata

SEQ ID NO: 360 - DNA, 6218 bp, Artificial Sequence
  chemically treated genomic DNA (Homo sapiens)
ttttttagtgattttttttttttttttttttgggaattttaagttttgtttttttttatataggaggatattgatatttaaatttttttgttttaagggttggtaattttaaatttttatttttaggaagtaatagattattggtttattttggtattgggagatattagatgttgattttatttattttggatttattgttttttggttttttttatttggagaaagtttgatcgagttttttttattttagggagtagtaattttgaggtatttttattttaggaaagtattaattttttttatagtttagaggatattgatttttaagtttttttttgtagagttggtaattttattggtttttggtgatagaaatgaatgtttttttttgttataagtgttagtgttttgatttttattttttggtattttgaggttagaaaaaaatattgatttgatttttttatttgagtggtttagagatttagattttttattatatgtgggtggtttttaatggataagtattaaattatgataatgatgaatttgatttttattattaaggagttattttagttttagttttttgaaggaaagttataatttttaatttttattatttaaatggtggtaaattttggtgttatttttagaggatagtgatttttttgagtaattgatgaattaaatttatttttttgtttttttttttgagatatagtttcgttttcgttgtttagttggagtgtagtggtacgatttcgatttattgtaattttcgtttgttgggtttaagcgatttttttgttttagtttttcgagaagttgggattataggcgttcgttattacgtttagttaattttttatatttttagtagagatagggttttattagttggttaggttggtttcgaatttttgatcgtaggtgattcgtttattttagttttttaaagtgttgggattataggcgtgagttatcgcgttcggttattaaatttattttgaggggttagtgataagtttttttagagggagataattttatattattttttttttttagagttaatgatattatattttagaataattattaaaaaagtataattttagatttatattttgtaggaaattgtgatttattttgttttattttatttttgttaaaggagatatattaagttatgtattttaaaatatggattatggatttggtttgaaggatatgttgatttttaatgtttttatatttaaaaggtagtaattattaatttttattattggtagtatagtttaataagatttagggtgggtaatgatgttaggttttggttttaatagggaagatgatttgagtattaggtttggaaagtttggttttattttttggggataaaatatagtaattttaaagttttgtttttaagtgatattcgttttaaatttttattttttgaaggatagggaatgtagatttttttttttcggggttggttttatttttgtttttttaggagataataattttagatttttatttgtaagcgattgtgatttttgatttaatattataatgaatagtaatattagatatttgtttttaaggtttaaggatttaagattttaataatggaagaatagagatttgtaattcgtttttttaagtgttagtaattttgatttacgagtaattttgatttttaagagatggtaattttaagatttttttttttgggaggaagagggttcggattttcggtatggggaggtatagtgatttcgagtttttatttaagtatatgaaagaatttgatggatgtttgaggagttttgggaattttaattattattttatacgggcgttattagtatttacggtttagttttatttcgggcggcgggaagttagtgtttgcgtcggggttttcgttgtttttttcgtcgttgtcgtcgggtttattttcggagttcgaggtttcgacgtttttatttatggtttcgatagatgttttttcgtcgtcggtgtcgtttgggtcggaggtcgagttttcggggtcgtcgtcgtttttttcgttttcgtcgtcgggtttcgcgaacgagttagttcgcgttttgttcgagtttttagggtcgtttttcgaaggttcgtcgtcgtttatggcgtcgagtataggtttaggttgcggggttcgggttgttcgggttgttttagtcgtcgtcgttgtcgtcgtttttttcgggttttggttttttttaggtcgcgtcgttttggtttgggtttcggtttcggtttagcgttcgtcgcggggtacgtcgggagatgtagttcggttgtcgttcgcgtcgtcgttatcgttttcggttcgtatagagagtcgcgtggtacgtcgggaaatgaagtttataaaagttttagagtagatcgcgggaatgatgggcgggaatgacgggttacgttgtacgtcgggaaatggagtttagggtaatttgttagtcgattgtacgacggggagttttgaagtattttaggaagtagagagtttgatgtacgttgggaaacggagtttatttatttagtttattagttgtgtatgttttttagagttcggtgcgttttgggaaattgagtcggttcgcgtgaatttgcgggtttcgggtcgtgaggtaagtcgggaaatggagtcgtcgttacgtttttatcgtattgtaggtgtaaagcgatttttaaagtacgtcgggaaatggagttttaggtggtttttaagttttaggtggatattgtagtttcggagatgggcgaggaaatggagtaggtttacgcgtttttttttttaggtacgttgggtcgtagtttttgtcgggaagtgtagttagtattaaggttttagtgtagttgttatagcgagttttggtgtgttttgggaaatggagttcgacgtattttttttattgattgagggggcgggatcgtttatgagttttaagtatgttggggaatagtttagatttgattttttgtgaggttagtttgcggaggtttgtcgggaagcgaagtttaatggttattattaggggcgtgtgaacgaaaggttagagattgcggtagttttttggagagatttaaaagtgttttagcgttttttttttcgtttttaggtttttttttaagaaagagtcgaggtcgattaaggattgttggaaaatggatttaagtatttttaagttttaggtgattatagattaggaaagaaaaaatgttttttttttaatcgtaattttgtaaagattcgggaaataaagttttcggcggttttttagaatattaattagttttcggatatagtttagttttttttagtaatgtggttcgtattaggaagttgaatggagtattaaaaagacggaaatgttatttttgggtttggcgttgtggtttaggttgggcgttagtagtttacgtttgtaattttagtattttgggaggtcgaggttggcggattattcgaggttaggagttcgagattagtttggttaatatagcgaaattttcgtttttattaaaagtataaaaattagtcgggtgtggtggcgggcgtttgtaatattagttatttaggaggttgaagtaggagaatcgtttgaattcgggaggtataggttgtagtgagtcgagatcgcgttattgtattttagtttgggcgaaaagagtgagatttcgttttaaaaaaaaaaaaattttgttttgaattattatttagtttttagtttttggtttgttttgagatagggtttcgttttgtcgtttaggttggcgggtagtggcgtaattataggttattgtagtttttaatttttaggtttaagtaatttttttatttaagttttttatgtaggtgggattataggcgtgtattattacgtttagttaatttggtttggtttgttttttggggtggtggggggtagcggggtgggtttcgttatgttgtttaggttggtttttaatttttgggtttaagcgattttattttagtttttaacgtgttggtattttaggtttgagttacggtatcgggttttttatttttgtgttttgtatttttcgttttttaaattataagatttcggaaagttaaaaataaggaagttagttgttttaggttttgtgtatttagtgagtcgttttatttatcgattaatattcgaaggagagtagtttttaaaaggcgttgggaaatagagtttttgtgtttgtatgtgtttttttttttttcggaaatatttagaagtagaatgaaagcgtttttagtttttttcgtattttggaatggtgggaaatggagtttttggattttacgttaattcgagtttgtgtttatattaattgttttgttttttttgaaattagaagaaagttttgtttatttagtttgtttttgattgtaatttttcgcggatataattgcgggggtcggtagcgttaaagtttgttgagattatattatttagaaggtaaagtgcggaatattttcgttttttttataaagtaggtggtcgtattacgcgcggttaggcgcgggcgtttttgggagttgtagttttttagttaaatggtatttgttgttttttgatggtagttttgagttaaaaagtaaaaattttagtcgagttttttggtttagggattttaacgcgggattaagacggtttaaaagggcggcgatatggggtaggatagcgagggttatttaatcgttagaattcgtggggtatgcgtcgttgcgtgtgggtaatcgttacgaggggattggggttcgtgggagtttgaaggtgacggtttgtaatttattaggatgtttgtagaggatgagaatgtttatagagggatgttaggaagggttgtaaacgtttgagagaggtttatgggtgtttagaagggttaagaggagttcgtggagtggtgaaggggtttttgatgagtttagttgataggataattattggggattagtggagaagtttgaggggatttaggttgtttgttaaaagttttatgggtgggtggacgcgatggtttatatttgtaattttagtattttgtgaggttaaggtcgtggattatttgaggttagttagaagttcgagattcgtttggttaatatggaggaaattttatttttattaaaaatatataaaaaaattagtcgggcgtggtggtttacgtttgtaattttagttattcgggaagttgaggtataagaattttttgaatttgggaggttgaggttgtagtgggttgagattgtattattgtattttattttgggtaatagagtgagattttgttttgaaaaaaaagaaaaaaaaaaaaggtttatgggagatagaaattattggtgattaaggggatttttgagcgatttgaaggggtgagggatggttgagaagtattgggaaggggttttgagagtttgtggaggtattggggttatacgtataaagtagggaggtttttgatgagattaattaatatgtgaagtgttttgagagtatttgtaaagggttttttatttggaagtaaggattttagaggatatggatgggattaagggtgtttttttgtaggaatattttaagttagttagttaatagatttaggtgggcgattaaaggttagagtagtcgttggagtttttaaggttaaatgttatttgtgatattttatatagttagaatttggggtaatttgtttggtagggttgtggtttgatttggatagtagttagggagttgagttgagtatttatgattttatattagatgtggttagaggtgttttgaaggtattgggtttaggggttgaggttagtagttagggtttttttttttcgagtgataatatttttttttttattattttattattattattaatttagttgtaattatgttgttaggagatatgttttattttagtttttagaaatagtttagtggtttttattttagggaatgatttatattatttaggagagggagtagtttttcgtaggtcgtttcgggagtttcggttttttgttagtattttagttttggatttttttttttttgttaatcgatattatttgggattatttattttggttggtatgaaatgagatgcgagtgggtagtagttgttagttaacgtttttttttttttagggt

SEQ ID NO: 361 - DNA, 6218 bp, Artificial Sequence
  chemically treated genomic DNA (Homo sapiens)
attttgagggggaagaaacgttgattggtaattgttatttattcgtattttattttatgttagttagggtgggtggttttagatgatgtcggttggtagggaagagaggatttagggttaggatattggtaggaaatcgaggttttcgaggcggtttgcgggaaattgtttttttttttgggtgatgtaagttattttttggggtgggggttattgggttatttttggaagttgggatgagatatgttttttggtaatatagttgtagttgagttggtggtggtggtggggtgatggagaaggggatgttgttattcgggaggagaggattttaattattggttttagtttttgaatttagtgtttttaaagtatttttaattatatttaatatggaattataagtgtttagtttagttttttaattgttgtttaggttagattatagttttattagataagttgttttagattttggttgtgtaggatgttataggtggtatttggttttgaaaattttagcggttattttaatttttaatcgtttatttaaatttattagttagttggtttgaaatgtttttgtaagaagatatttttggttttatttatattttttgagatttttgtttttaagtagaaagttttttatagatgtttttaaggtattttatatattaattaattttattagagatttttttgttttgtacgtgtagttttagtatttttatagatttttaaagtttttttttaatgttttttaattattttttatttttttaggtcgtttagagatttttttggttattagtaatttttgttttttatagattttttttttttttttttttttttaaaatagagttttattttgttgtttagggtggagtgtagtggtgtaattttagtttattgtaattttagttttttaggtttaagagatttttgtgttttagtttttcgagtagttgggattataggcgtgggttattacgttcggttaatttttttgtgtgtttttagtagagatggggttttttttatgttggttaggcgggtttcgaatttttgattgattttaagtgatttacggttttgattttataaagtgttgggattgtaagtgtaagttatcgcgtttatttatttatagaatttttagtagatagtttaagtttttttaggtttttttattggtttttagtaattattttgttaattaagtttattaaagatttttttattattttacggattttttttagtttttttagatatttataggttttttttagacgtttataattttttttagtatttttttatgaatatttttattttttataaatattttgatagattgtagatcgttatttttaaatttttacggattttaattttttcgtggcggttgtttatacgtagcggcgtatgttttacgggttttggcggttaaataattttcgttattttgttttatgtcgtcgtttttttgagtcgttttggtttcgcgttggaatttttaggttaaggggttcgattgaaatttttattttttgatttagagttgttattagagggtagtaggtattatttggttgggaaattgtaatttttagaaacgttcgcgtttagtcgcgcgtggtgcggttatttgttttgtgaagggagcggaagtgtttcgtattttgttttttgggtaatgtagttttaataggttttggcgttatcgattttcgtagttgtgttcgcggggaattgtagttaggaataaattgagtggataggatttttttttggttttagaaaggataggatagttagtataagtataagttcggattaacgtgaagtttagagattttattttttattattttaggatgcgggaggggttgagaacgtttttattttatttttaagtattttcgggggaggaagagatatatatagatataggaattttgttttttagcgttttttgggggttattttttttcgggtattaatcgataaataggacgatttattgagtatataaaatttgaggtagttggtttttttatttttggtttttcgggattttgtaatttaggaagcggaggatgtaaaatataagagtgggaggttcggtgtcgtggtttaagtttgaaatattagtacgttggaggttgaggtagaatcgtttgagtttaggaattggagattagtttgggtaatatggcgaagtttatttcgttattttttattattttaaaaaataaattaaattaaattagttgggcgtgatggtgtacgtttgtagttttatttatatgggaggtttaggtggggggattgtttgagtttgggagttagaggttgtagtgatttgtgattgcgttattgttcgttagtttgggcggtagagcgagattttgttttaaaataaattaaaaattgaaaattgaatggtggtttaagataggatttttttttttttgagacggagttttatttttttcgtttagattggagtgtagtggcgcgatttcggtttattgtaatttatgtttttcgggtttaagcgatttttttgttttagttttttgagtagttggtattataggcgttcgttattatattcggttaatttttgtatttttagtagagacgggggtttcgttatgttggttaggttggtttcgaatttttgatttcggatgattcgttagtttcggttttttaaagtgttaggattataggcgtgagttattggcgtttagtttgagttatagcgttaggtttagaaatgatattttcgtttttttaatgttttatttagttttttggtgcgaattatattgttaggaaaagttagattgtattcgaagattagttagtgttttgagaaatcgtcgggaattttgtttttcgaatttttgtagagttgcggttagagaggggatatttttttttttttgatttatggttatttggaatttaaaggtgtttggatttattttttagtagtttttgatcgatttcggtttttttttaaagaaggatttgggggcgaggaaggaggcgttgaaatatttttaagtttttttagggaattgtcgtagtttttaatttttcgtttatacgtttttgatggtggttattggatttcgtttttcggtaagttttcgtagattggttttatagagggttaggtttggattattttttagtatgtttggagtttatgggcgatttcgtttttttagttaatggggaggatacgtcgaattttattttttagaatatattagggttcgttgtggtaattgtattgaggttttggtgttgattatatttttcggtagggattgcggtttagcgtatttggaaagaggagcgcgtaaatttattttattttttcgtttattttcggaattgtagtatttatttggggtttaaaaattatttgagattttatttttcggcgtgttttaaaaatcgttttatatttgtaatgcggtgagggcgtggcgacgattttatttttcggtttgttttacggttcgagattcgtaggtttacgcgggtcgatttaattttttagagcgtatcgagttttgggaggtatatatagttaatagattgagtgagtggatttcgttttttagcgtgtattaggttttttgttttttaaagtgttttagggtttttcgtcgtatagtcggttgatagattattttggattttatttttcgacgtatagcgtgattcgttattttcgtttattattttcgcggtttattttgaggtttttgtggattttatttttcggcgtgttacgcggttttttgtgcgggtcgagggcggtgacggcggcgcggacgatagtcggattgtatttttcggcgtgtttcgcggcgggcgttgggtcggagtcggagtttaagttagagcggcgcggtttggaagaggttagggttcgggggaggcggcggtagcggcggcggttggggtagttcgggtagttcgagtttcgtagtttgggtttgtgttcggcgttatgagcggcggcgggttttcgggaggcggttttgggggttcgggtagggcgcggattagttcgttcgcggagttcggcggcggaggcggaggaggcggcggcggtttcggaggttcggttttcggtttaggcggtatcggcggcggaaaggtatttgtcggggttatgggtgggggcgtcggggtttcgagtttcgggggtggattcggcggtagcggcggaggaggtagcggaggtttcggcgtaggtattagtttttcgtcgttcggggtgaagttgggtcgtgagtattagtggcgttcgtgtagggtggtgattagggtttttaaagttttttagatatttattagatttttttatgtgtttagataggagttcgaggttattgtgtttttttatatcggggattcgagtttttttttttttaggaaaaggagttttggggttattattttttggagattagaattattcgtggattagaattattaatatttaaagaaacgggttataagtttttgtttttttattattgaggttttgggtttttgagttttaagaataggtatttgatgttgttatttattataatattggattagaggttatagtcgtttgtaaatggggatttagggttattgttttttaagagaataagaataagattaatttcgaaaaagagggatttgtattttttgttttttagaagatggggatttggagcgaatattatttagaagtagggttttgaggttattgtgttttgtttttaaagaatagggttaggttttttaaatttggtatttagattattttttttattaaaattaagatttggtattattatttattttaaattttgttgagttgtattgttaatggtgagaattaatagttattgttttttagatataaagatattgggagttagtatattttttaaattaagtttatagtttatgttttaaaatatatggtttggtgtgttttttttaataaaaatggaatggagtagggtaggttatagttttttatagaatatggatttaaggttatatttttttaataattgttttaaggtatggtgttattggttttgaaaaaaaaaagtgatgtagggttatttttttttgaaagaatttgttattggttttttaaaatggatttggtggtcgggcgcggtggtttacgtttgtaattttagtattttgggaggttgaggtgggcggattatttgcggttaggagttcgagattagtttggttaattggtggaattttgtttttattaaaaatataaaaaattagttgggcgtggtggcgggcgtttgtaattttagtttttcgggaggttgaggtaggagaatcgtttgaatttagtaggcggaggttgtagtgagtcgagatcgtgttattgtattttagttgggtaacgagagcgaaattgtgttttaaaaaaaaaaataaaaaaatggatttggtttattagttatttaaaggggttattattttttaagaatggtattaaggtttgttattatttgaataatgggaattgggaattatagtttttttttaaaggattgaggttggaatagttttttgataataaaggttaggtttattattattataatttggtgtttgtttattagggattatttatatatagtgaggggtttgggtttttggattatttagatgaagaggttaggttagtgtttttttttaattttaaagtattaaaaagtgagggttagggtattggtatttatagtaggagaggatatttatttttgttattaagaattagtaaagttattagttttataggggaggatttagaggttagtattttttaggttgtgagagaggttagtgtttttttaaagtaggagtattttagggttattgttttttgaagtggaagaggttcggttaagttttttttaaataggaggggttagagggtagtagatttagagtagatggagttaatatttgatgttttttagtattaagatggattagtgatttgttgttttttagaagtagaaatttggggttgttaatttttgaagtagagagatttaggtattaatatttttttatgtggaggggagtaggatttaagatttttagaaaggaagaggggaaaagttattgggaag

SEQ ID NO: 362 - DNA, 6250 bp, Artificial Sequence
  chemically treated genomic DNA (Homo sapiens)
aggcgtggtggtatatgtttgtaattttatttattggggaggttgaggtcggaaaattgtttgaatttgggaggtagaggttgtagtgagttaagattatgttattgtattttagtttgggcgaagaaacgagattttgttttaaaaaaaaaaaaaaaaaattagttaagtatggtggtacgtatttgtagttgttagttatttgggaggttgaagtaggaggattatttgaggttaggagttcgaggttatagtgaattatgattgtattattgtattttagtttggatgatagagtaagattttattttaaaataatattaatagtttaaggaatagattttgaagtttgatattttgtatggtgttattttagttttgttatttatttgttgtgtgattttgggtgaataatttaatttttttgggtttttgtttttttttttgtaaaatgattatttgtattttataggagtgttgtgagaattaaataagttaatataagtttttgggaagaattagtttttgttatggttgtgtgaagagttttatacgagtttttttgtaggatgtatggttgttggtttgtgtgtgtgtatatatatatatgtgtgtgtgtatgtgtgtatttatgtgtatatgtgtatatgtgtgtgttgtttttttgatttttgagtgttgtgtgtgtgttaatgtgtgagattatatatgtatttttagtaaagatttaggggtttttgtgtgttttgggggtttgtatttgtttttggttgtatatttgaattttacgtttttttgtgtgtgtagggatgtgtgttatgtgtgttgataattatatgatagtgtgtgtttttatatgttagtgtgtgtttgtgaagttgtttttatgtggttgtgggtgattgtttacgcgtgatttggtgagcggttgtgtggaagtttgtgttgtttgtgtcgggtgtggagtttttggttagttagggtaggtttttgtatgttttttttattttatggaggaggagatgaggggtttggatgagatagaagaatgaggggttattttttgtttgatgttggggtcgagttattgtttattagtggttgttgtgttattttttagtttttgttttttttttttggttggtggtagatagagggggcgtggaggaatagggtagggggtgggtttgaggttggatttttgtttggaaatttgaatttttatttatgttttttacgtttttttagttttttatatttttttatattttttttattattggggtagggaattaggattttttgaaaattaagaattatcgttttggttttgttataggtttgttgtgtagttcggagataggttttgttttttttttaatttgtgaaatttaatgttttaaaagtgtttttttttttgtgtttagggttgggttaggttgtgtattgggagggaagtgttgggttttttgaggtttgtgaaatagttggtagtattttttttagtgggtgtttaagagttgggggttgtagtatttgaaatatttaagttagtgtaggtatagtggtttatgtttgtaattttagtattttgggagatcgaggtaggcggattatttgaggttgggagttcgaaattagtttggttaatatggtgaaatttttatttttattaaaaatataaaagttaggtcgggtatagtggtttacgtttgtaattttagtatttaagaaggttaaggcgggaggattatttgagtttgggagtttgagagtagtttgattaatatggagaaattttgtttttattaaaaatataaaaaaattagttaggtatggtggtatatgtttgtaattttagttattcgggaggttgaggtaggagaagtattttaattcgggaggcggaggttgcggtgagtcgagatcgtgttattgtattttagtttgggtaataagagtaaaattttgttttaaaaaataaaatagaataaaataaaaattagttaggtgtggtggcgtatatttgtaattttagttattcgggaggttgaggtaggagaattatttgaatttaggagatgtaggttgtagtgagtcgagattgtggtattgtattttagtttgggtaatagagtgagattttgttaaaaaaaaaaaaaaaaaacgttagatttatgaattttatttgttaagaagatttgtttaggtagttatttgtatttttgtgagttaagattgtaatagtatatgttaagagtagtaagaaggagattgtaaagtttagaaagatttgataggttaggcgttgtggtttacgtttgtaatttcgatatttcgggaggtcgaggtaggcggattattaggttaggagtttaagattattttgattaatatggtgaaatttcgtttgtattaaatatataaaaattagtttgacgtggtggttcgcgtttgtagtttagtaattcgagaggttaaggtgaggcggaggttgtagtgagtcgagatcgttattgtattttagtttggcggtagagtaagatttcgttttaaaaaaaaaaaaaaaaaaaaaaaaaaaaagatttgataagtgaaagttattaatattgttattattatttaaaaaaattttagatataggttttttagggagttttatttaattaggtaggttttagaaattagaaaagaaatggaaagggtaggaaatttggagtttgataattttgagtttgaattttttgtgatgggattttgggtaagttatttaatttttttgagtattattttttttttttataaaatgaagattttttttttttaattttttagagttgttttaaggattataaattttttattgaaaggcgtagtataggagttgtgtttggtaagtgttaaatataaggtattaattattattattagaattaataataatatttttttttttttatatattttttgttttcgggtggattaaaaggtggaaggagaggttattaatattattagaagagaggtttttttttaagttttattttttattttttttaaattcgtattttttttaaacgtcggatttgtaaggttagtagggtttaagatatatattttttgtttagcggggaagattaaagttaaagtttagagagggaaaatattttttaagttcgtatagcgaattaggatagaaattaggacgagtttcggaatttttttattatttttatttttatttgagtattatagttcgttcgggatttagtttttttatttacgtgattatattatattaattagggtttttttttggagatttgttttttttttcgaatgggggcgttgtattatcggtagaatagggtaggtgggggcgttagaggtgaaggggatttgtaggttggggtttttttcgttcgggttagcggggtttttgcggggttagtttaagcgtttattattattagttttcggggcggcgttgtattgcgtaggcgcgggcggggcgcgggcgcgcgcgcgagcgagcgagggattttttttgacgttattgttaggatattaaataaatatttcgtcgcgtcggtcgagttttttatatggttaattgcgttataggaatttcgggaaggcggggtcgggattttttttcgtcgagtggttcggaacgtaattttcgagatttttagggtttcgagggttatgtaagtgattagatcgagtttagaatagattttttgttggatagtgcgggattcgatttggcggggtcggagatttggggaagtttgtttagtaaggggcgggtgacgtaagtaggggggcgggtttcgggtatataaatataggttggcgggtttgtgttttatttataagatttagagttacggttacggtagggatacgcggaattaagatttggaaatttgattgttgtggttttttttgggggttatgaaattttattaattttttttttttcggggagaaagtttttggaaagatttttttagatatttttttatttttttttggaggatcgatttattttttttggttttttttattattttttttttttcgtgggattcgtcggacgcgtggaggagatcgtagttgaagttgattttgtatagcgggatagcgttttttgtttttgggggagtaatttttttttcgtttttgggttttacggagtttgtatttttaagaggtatagcggtattttgtgggggtttgggtatcgtaggaagattgtatagaaattttgttattgttggaacgggacgttgtttttttttcgagttttttcggatagcgtattttgaggattcgtttagtttatcggggatttttacggtttatttcggatttgtattttatttttttaattcggttatagttttggtttttcggcgattttagcgtggttataggggtttttttgtgtttagggaaatgttttaggtttttttcggagattacgatttcggttttcggtgtagttttttattttttgtcgagttttaatatttgttttcggtggattttttcggtagtttatttatcgtcgtcgttttttaggtaagtttttgatagtaggggtgttgttttgtaggttttattttttaagttaagggtgaaaagaataaattttaatttttataaaaaggcgtattagaattttagatttgagatggaaaaggtttatagcgtattttgtaaattgtaaagagtcgggagatgtttgtaattggttgcgtgcgtggagcgtaaggagggaacgcggtagggagggtaggttttggggcgaggtgggggtggggtgggtaatgcgttgtttaatgtaacgtgtatgcggtagcggggttgagaattttgagtcggtttcgggattgttttttgttcgggttttagatttgaagttagcgtagttaggtaggtgggggaaatttcggggaagtttttagtagtttttttttttttttttttttttcggagcgtttatttcggtgtcgggtcgttttttatttatcgggaagaggggtttcgaatttttagtcgcgttgttttcgttttttgcgcggagacgtaacgggggattcgtgcgtaacggttgacgcgttggaatttttcgtttgacgcggggtacgtacggcgcgcggcgtttttttcgttcgtttcgtttttgacgtttcgggagcgttttattttggaacgtcggggttacgttgttaagggagggggtagttcggcgtttcgattggtcgtcggggcgtacgttttggttaattagttttttttttttatttgtagggtgtatttttttttttttttttttgttttcggaattcgtggttttttggcggttgggttttttttcggcgtttttagaggtagagggaggggatttttgtcgtgataagagcgtttgtttgcgatttaatggatttgcgaggtttttgcggggatttagtttttgggtttttaggagaagggggtgtttgtttgtgtgttggcgttttttggagagatacggtggttgttatttttttttttaggtatatatagatatatttttattttttttgttttttatgttcggttttttcggtgtgttttaagataggattagaatcgcgaatcgaagggtaattagttaggtggtttttaggagtttcgttttttttgggtttttaggattttgattggtcggcgagttagttttttttttattacgtttttcgagagagtagttaagtttttagagtagttttaggagtttatttacgggaggggggagatgagcgttgttgaggtttgggggtttaggtttcgtattatttttttttcgcgataatttgagagagttttagtggttatttttatttatttgttcgtttattttaaattgttattcgttagttttattttgagaagagatagtaatttgaaacgttgttttaaatttttaggttcgttttttaaatatttttttgattgggattttcgtttttgtatgggatttcgcgtagaggggggtgtgtatgtgtgtgagtgtagaggaaggtttggtttaaggtttttttttttttttttttttgtttttggggtgggggtggggtgttgtggttgtgtgtgtggttgtggtttcgtttcgggggttttgttattcggttgtgtttagttttttttttattttttatatttaagagttattaattcggggtgtgatttattattt

SEQ ID NO: 363 - DNA, 6250 bp, Artificial Sequence
  chemically treated genomic DNA (Homo sapiens)
gggtggtgaattatatttcgggttggtgatttttaggtatggggggtggagaggaggttggatatagtcgggtgatagaattttcgggacggagttatagttatatatatagttataatattttatttttattttagaggtaaggggagggagaaggagaggttttaggttaagtttttttttatatttatatatatatatatttttttttgcgcgaggttttatgtaggggcgggggttttagttaaaagggtgtttgggggacgggtttaggagtttagaataacgttttaagttattgtttttttttagagtgagattgacgagtgatagtttagggtgaacggataggtagataaaagtaattattggagtttttttagattgtcgcggagggggaatggtgcgggatttgagtttttaagttttagtagcgtttattttttttttttcgtaaatggatttttggaattgttttgaaggtttaattattttttcggggggcgtggtgagggaagggttggttcgtcgattaattagagttttgggaatttagagggggcggagtttttggagattatttggttggttgtttttcggttcgcggttttagttttgttttgggatatatcggaggaatcgggtatgaggagtagagggagtgggaatgtgtttgtgtgtgtttggagaagagggtgatagttatcgtatttttttaagaaacgttagtatataagtagatattttttttttttgagagtttagggattagattttcgtaagggtttcgtagatttattgggtcgtagataggcgtttttgttacgatagggattttttttttttgtttttagaggcgtcgaaaagagatttagtcgttaaggaattacgggtttcggggatagagaggggggaaggaaaatgtattttataaataggaagggaaagttgattggttaaggcgtgcgtttcggcggttaatcgaaacgtcgggttgtttttttttttagtaacgtggtttcggcgttttaaaatagaacgttttcgggacgttaggggcggggcggacgaagggggcgtcgcgcgtcgtgcgtgtttcgcgttagacggaggattttagcgcgttagtcgttacgtacgggtttttcgttacgttttcgcgtaggaggcggaggtagcgcggttgagggttcgaggttttttttttcgatgggtggagggcgattcggtatcgaagtgggcgtttcgaaggaggaggaaaggaaaagagattgttggaagttttttcgggattttttttatttgtttaattgcgttagttttaggtttgggattcgagtagggggtagtttcggggtcggtttaaagtttttagtttcgttatcgtatatacgttgtattgagtagcgtattatttattttatttttatttcgttttaaagtttattttttttgtcgcgttttttttttgcgttttacgtacgtaattaattgtaaatatttttcgattttttgtagtttgtaaagtgcgttgtgagttttttttattttagatttagggttttgatgcgtttttttgtgggggttggggtttattttttttatttttgatttaaaaaataaaatttataaagtagtatttttattattaaaaatttatttgggaggcggcggcggtgggtggattgtcgaaggagtttatcgaagatagatattgagattcggtagagggtgaggagttgtatcgggagtcggagtcgtagttttcggggaaagtttgaaatatttttttgggtataggggggtttttgtgattacgttgaggtcgtcgggaagttaaggttatggtcgggttggggaagtaaggtgtaagttcggggtgagtcgtgggagttttcggtgagttgagcgagtttttaaagtacgttgttcggggaagttcggggaaggagtaacgtttcgttttaataatggtaaagtttttgtgtagtttttttgcggtgtttaggtttttataggatgtcgttgtattttttgaaagtgtaggtttcgtaggatttaggggcgagggaggggttgtttttttaggggtagaaagcgttgtttcgttgtatagaattagttttagttacggttttttttacgcgttcggcgggttttacggggggaggggagtaataaagaagattaaaaaaagtaagtcggttttttaaaagaaaatgaagaaatatttggaagaatttttttaaaaatttttttttcggaaaaaaaaagattaatgaaattttataatttttaagaagaattataataattaagtttttaagttttggtttcgcgtgtttttgtcgtggtcgtagttttgagttttatgaatgaagtatagattcgttagtttgtatttatatgttcgggattcgtttttttgtttacgttattcgttttttgttggataaatttttttaaattttcggtttcgttaaatcgagtttcgtattgtttagtaagaggtttgttttagattcgatttggttatttgtatgattttcggggttttgggggtttcgggggttgcgtttcgggttattcggcgggaggggatttcggtttcgttttttcggagtttttgtgacgtaattagttatataaggagttcggtcggcgcggcggagtgtttgtttggtattttagtaatgacgttagagggaatttttcgttcgttcgcgcgcgcgttcgcgtttcgttcgcgtttgcgtagtgtaacgtcgtttcgggggttggtaataataggcgtttagattagtttcgtagggatttcgttgattcgggcggggaagattttagtttgtaggttttttttatttttggcgtttttatttattttgttttatcgatggtgtagcgtttttattcgagaagaagagtagatttttaaaaggagattttgattagtgtggtgtggttacgtaggtggggaaattgagtttcgagcgggttgtgatgtttaggtgaaagtggaggtaatggagggatttcgaggttcgttttggtttttgttttgattcgttgtgcgagtttaggaaatgttttttttttttgagttttagttttaatttttttcgttgggtaaaggatgtgtgttttggattttgttggttttataggttcggcgtttgggagggatgcggatttggaggagatgggaaatgaaatttagagagaagttttttttttgatggtgttggtagtttttttttttattttttaatttattcggagataaagaatgtgtaagagggaggggatattattattaattttaataataataattaatgttttgtatttggtatttgttaagtatagtttttgtgttacgttttttagtagaagatttgtaatttttaaaatagttttggaaggttaagagagaaaaatttttattttataaaagaaaaaaatgatatttagggaggttaaatgatttgtttaagattttattataagaaatttaaatttagaattgttaaattttagattttttattttttttattttttttttgatttttgagatttgtttggttggatgaaattttttgaaaaatttgtgtttggggtttttttaaatgataatggtaatattagtagtttttatttgttaggtttttttttttttttttttttttttttttttgagacggagttttgttttgtcgttaggttggagtgtagtggcgatttcggtttattgtaattttcgttttattttagtttttcgagttgttggattataggcgcgggttattacgttaagttaatttttatatgtttagtatagacggggttttattatattggttaggatggttttgaatttttgatttggtgattcgtttgtttcggtttttcgaagtgtcgagattataggcgtgagttatagcgtttggtttgttaggtttttttaagttttataattttttttttattgtttttagtatgtattgttgtaattttggtttataggggtataggtgattatttgagtaaatttttttagtaaatggggtttatgaatttgacgttttttttttttttttttgatagagttttattttgttgtttaggttggagtgtagtgttataatttcggtttattgtagtttatattttttgggtttaagtgatttttttgttttagtttttcgagtagttgggattataggtgtgcgttattatatttggttaatttttgttttgttttgttttgttttttgagatagagttttgtttttgttgtttaggttggagtgtaatggtacgatttcggtttatcgtaattttcgtttttcgggttgaagtgttttttttgttttagtttttcgagtagttgggattataggtatgtgttattatgtttggttagtttttttgtatttttagtagagatagagtttttttatattggttaggttgtttttaaatttttaaatttaggtgattttttcgttttggtttttttaaatgttgggattataggcgtaagttattgtgttcggtttaatttttgtatttttaatagagatgggggttttattatgttggttaggttggtttcgaatttttaattttaggtgattcgtttgtttcggttttttaaagtgttgggattataggtatgagttattatgtttgtattgatttgggtattttagatgttatagtttttaatttttaagtatttattgggaagggtgttattagttattttataaattttagagaatttagtattttttttttagtgtatagtttggtttagttttgggtataaaggaagaagtatttttaaaatattgaattttataggttgagagaggggtagggtttgttttcgggttatatagtaagtttgtggtagagttaaggcgatggtttttaatttttagggagttttgattttttgttttaatagtagggagggtgtagggagatgtggaagattagagggacgtggggggtataggtggaggtttaagtttttagataaaagtttagttttaagtttattttttgttttgtttttttacgttttttttgtttgttattagttaggagggagggatagagattgggagatgatatagtagttattagtaggtagtgattcggttttagtattagatagggagtgattttttatttttttgttttatttaagttttttatttttttttttatggaataaaggaaatatgtaaagatttattttggttggttagagattttatattcgatataggtaatatagatttttatatagtcgtttattaggttacgcgtgggtaattatttatagttatatagaaatagttttatagatatatattggtatgtggaaatatatattgttatatggttattaatatatatgatatatatttttatatatataagaagacgtagggtttaggtgtatagttaaggataggtatagatttttaaaatatatagagatttttagatttttattaaaggtgtatatatgattttatatattgatatatatataatatttagagattaagagagtaatatatatatatatatatatatatatagatatatatatatatatatatatatatatatatatatatatatagattaataattatgtattttgtagagggattcgtgtaaagttttttatataattataataagagttaattttttttaagagtttatattaatttatttaatttttataatatttttgtgaggtataaatgattattttataggaagggaaatagaagtttagagaggttaagttatttatttagagttatatagtaagtaagtagtaaagttggaataatattatgtagggtgttaggttttaaagtttgttttttgaattattagtattattttgagataggattttgttttgttatttaggttagagtgtagtgatgtaattatagtttattgtaatttcgaatttttggttttaagtaatttttttgttttagttttttaagtaattaataattataggtgcgtattattatgtttgattaattttttttttttttttttgagatagagtttcgttttttcgtttaggttggagtgtaatggtatgattttggtttattgtaatttttattttttagatttaagtaatttttcggttttagtttttttagtaggtgggattataggtatgtgttattacgttt

SEQ ID NO: 364 - DNA, 6154 bp, Artificial Sequence
  chemically treated genomic DNA (Homo sapiens)
aaattgtaattttaatgtaattgtgagaagtttttttttatagaaatagtataggaagaatagttaataaatattattttggtattatatttaaaaaaatgtatttattatattatatggttaatttatattatatattattttatattatatggttatagaaaaaaaattaggtaaatataaatggttagatgttaatgtttaatgttaaaagtataagtatatttatttgataaatatttaataagtattaattatttattagaatattttattttgagtatttataaagtattaatattataaatataggatgtgaaatttgtttattttttaatatattttaaagattaaaatttatattttatgtttaagatgtttgatggtagtaaaaaattaaaaataatttaatattttaaaaaaatgattagttaaataaattatagtatgtttaataatacgtagaaatttttgttttaagttttttaaaatataaaattatatagtgttataaaagtattaaaaaagaatagatggaatatattaaaatgtttatagtaataatattttagtggtaaaattattgatgattttttattttttgtatttatagttttttaatttttgataatgatttgttttttttttgaaattagattttttttttagatgaaatttttttttgggaaatttttatttaaaaaaaaaaaatttatattttattgttaggtaaaataaatttttagaataaaatgtgttattatatataagtaaatttttttattttttttatgtaatttgtagtaaaagatttttttaagtgaatgtaaggaagattttaaataaaagattatagtatattttagtttttattgaatattaattttaaatttaaaattattttttggaggaatttattttattatttgtaatattgatatttatatttaagagatatattttttaattaatgttatttttttagttaaatatatttattattagtttagaaaaaaatgtagagggaaaattattgtttattattaaatattaaaatttgggtaaagaggatagtaggaaatatttgttttttaattaagtaaaatgagagtatttttatagttttagaagatatgaatatgttttttaattattggtaatttatatttaaatttagttagtttagaggtttttaaggattggtatatgggaattgtttaagatatgtgttaaatatagaaatttatggttttcgtttttatttattaaattagattttttagggggtatagttttaaataatttggtttttttaaataaaatagaagggtagagattttattttataaaagttttttttatagaattgtaaacggttttaataattttgtagtaaagtttttaagataaataattttataattagagaattataattttataatttttatttattattttatttattgttttattttgtagtagtttttaaataagatataatttaataaaattatatatttattatagagtaaaataaaatttagaggtatttgtgtttggttaagataaaggtatattcgatttttggagaaaatagatagtagatgtgatttttagtatttatttattaaaaataatgtattttaaaaataaatttttatgttaaaggaaataaagatgtttataaataagaaggaacgtggaggtgtggagaagaaaagaggaagttttagaaagttaagtattaaaagttaggaaataaggtaaaatgaatggtaattggaaataagggaaatagaataaattaggaaattgaagtagagaagagttttttttttagaaattaagaagttgggggaaaggaatagatatgagaggaaattgatttaagtaaaaatgtatattgaaaagtggaatgattttaagaaatttaaaaatgagaaattttagaatagattaaatgatggtatagaatatattttgggtatgtaataaagatgatataaagagtagaaaataaatattattataaataagttgatgttgaataaagtaagtatattggatgaatttttaaagatgatgatgtaaaaaaaaaattgtagagagaatgagatgttatgagaattgagaaattagatgttaatagtaagtagtaaagagaatttcgagtaaagttaatagagtaagttatattatttaattaataattgtaaattataattattatattatattttatttgtaaagtataataaagtattattttttgtaataaaatattaaatatttgtaataaattttatgtaataaaaaaacgtaaataatttgatatagtgttaagaggttgattaatgtaaaaataggttgagagaagtaaggattggagaggaaaaaggaaaaggaaaaaaataggataaaaaggaggataatattaagaaattaattagatttataaaaatgggtaggaataaagaggtgtgaatgtataatggacgattagttaaaaagtgttagtagtgtaagcgcgaaaagagttaagtgaaatttgatggaattttgatagtttttgggtttagaaaataagtagttttaaagtgtttaggaggatttgtgaagataataatagataataatgttagggagtggtgagattaagtatagagttttaagaggattagggtaagagaagtgtaaaaatgtttttaagtgggagttggggttagaaggtaggtaggttcgataattggaaaatgagcgggcggtagatgggaatagaatgggggttattaattagcgatagagcgttgataaatattaggaatagaggattagagattagaaaaggtatcggaaattgcgatttaggattgaaaaagtaaagattaaattaaaataatttgttgggtaaaataggtgaagagaaatttttaaatagaaaagtgaaaaagggtagcggattgagaaggggggtagttcgggagaggagagaggaaatgatgagttttattatttttacgattatgtaagaattatacgcgatagtaattcgggttgttgttttagttttagtaattaatttatattttttacgtcgaggtcgtcgtcgtttttattttatagagatgtagagttggatattttagttaatcgtgattttttcggattaattttgagtttcgttttttattgatagtttttcgtttaattatcgttgttttaatttttatatttggggtgggggttagggaaatttttcgggttattgtgtgtgtttacgtaggaaggcgttgtatgacggagagggatacgggggcgatgtttattttttagttcgcggagttggttcgagaaggtggttgagggtattaagtttttatcgtcgtttttttttaaaataaatattagttagtcgtcgagttcggagtcgggagggcggtagggtggcgttagtatttatttttttcggaatggtagggttcgtagtcgaagaggtcgcggcgtcggcgtcggcgtcggtttcgggttttatgttttcgttgaatagagtttggttcggtttcgcgtcgttattatcgttatcgtttagcgtcgttattttataatcgagagtcggggttcgagcggtcgttgtcgggcggggagggggaagggaggcggagagttgggggaggcggaggcggaggcggaggcggaggagcggggggcgcggggggcgcggggaggagcggttcgggcggcgtcgcgggcggagggcgtttgggttattttaggtatcggttcgcggtttcgggcgtagtcgagtttgaggggattgggggaaggacgttaggcgggggtgcgggggggagcgggggaagggggcggagacgacgagaagtcgtcgcggtaacggcgttattcgcgtgttacggtcgtgacgttatttcggtgcgtgacgtaatttgaggcgcgttttcgcgtcgtcgttcggggagggtttttttttttttaattattcgcgtttttatattttgttttcgtttcgtcgtttttatggtttcggttttttattttttttttgtttttttcgtttttagtttgttttgtaatgtgggatttattagaagagtagggttggtgttcgaggaggagaagttgaaattttagagggaggaaggcggggaagttaatattatttgttatttttattgtaatgaacgtttttgtgttattaaaataagaattttaattttaaggttgaaatagttaagtagaatttgatggaaatatatttaggaatagttaaattagtagtgcgacgcgtgttttttttttattgaagaatttagttagttaaaacgagtttaaatggaagtttgaaagttttttttttattgttgaggaataaaatatttcgtgtatttttcgttttttagatttatttatttaataaatattagttgagtattttttatgtcgtagggtttgtataaggtatatagtattttagatatttgaagtattaaaattaattatttttattttgaagaaaattatttaaaatattttatgtattttgtgttttttatgaatagaatattttaagtattttttgtaaaatacgtatgaaaataattgggagagaagaggttaattatttttgagaagtttaattatagaatgaaatttaatttattattaaaaatatatggatttaataaagaataaataattggaaaagaaaagtttaaggaagagagaaacgggaatgagaaataattattgtgggtttttaatggtttggagtgaattattaaagtaatttaaatatgaagttatgaaaaattaagtggattttgttttttagtattttttattatgggggaagttattagcgatttttttattgtattttggatgatttaagaaatagaaaggtgttttattgatttttgaaatagggtgtttttatattgattagggttatcgtaagtttgggagttgatgtttatttttaggtaaaggatgttgtgtgaggttgtttgatgaatgagaatattaatatttttttgtattgaaaaaatataatttataagatgaatattgtaggtcgggcgtagtggtttacgtttgtaattttaatattttgggagtttgaggcggatggattatttgaggttaggagtttgagattagtttggttaacgtagtgaaattttatttttattaaaagtataaaaaattagtttggtgtggtggtgtatatttgtaattttagttatttaggagtttgaggtaggagaattatttgaatttgggaggtagaggttgtagtgagtcgagattgtattattgaattttagtttgggtaatagagttagattttgtttttaaaaaaaaaaaaatatgaatatggtatgttttgttaattttattgtatatttttttttaagtaggaaagtttttatgaggaaataaatttaaattaaaaagtggtttggtaaatgtagagtaaatgattataagggatgatgttattaagttaaattaatttgaagtattttttattataaggatatatttagaagtagattgaaatagtattattagttagttatggtattttttttttttttattatttttttattatttttttattagaaatataattggtaagatttttgttaattttttaattgttttattttatttttaaaaaattagttgttaaaaatgttatattattataatatttttttataatattaaaagttttaaaggtttttatttttatattggttttattttgaattttagttttatttgttagtattagtttgtagtttagattttttatgattatttttttataggatgattggttttatttatttaatattgattttttttagcgttttatttatttgatattttttgattttgttttaaaattttggatatattttgttttatttttttaggttattttaaagttttatagtatttagatgagaaacgagagaaagtataagttttggagtttaaagattaggattttagcgttagtattttatattttagttatataattttaaagtaggtaagtttaaatttttgtttgttgttttgttttttaatttataaaatgaaggttataataatgttag

SEQ ID NO: 365 - DNA, 6154 bp, Artificial Sequence
  chemically treated genomic DNA (Homo sapiens)
ttagtattattataatttttattttatagattaaaaaataaaataataaatagggatttaagtttatttgttttgagattgtatagttaaggtgtggagtgttgacgttaaaattttgatttttggattttaaagtttatgttttttttcgttttttatttggatattgtaggattttagaatggtttaaggaagtaaaataggatatatttagaattttaaggtaaggttagaaaatgttaaatgagtagaacgttaagaagaattaatattaaatggatgagattagttattttgtggagaaataattatggaagatttgaattatagattgatattgataaataaggttagaatttaaaatggaattaatgtgaggataaaagtttttaaaatttttaatgttataaggaagtgttataatgatataatatttttagtagttaattttttaaaaatgaaataggatagttagagaattaataaaaattttgttagttgtgtttttgatgaaagggtgatgaaagggtgatgaaaggggaaaaggtgttatgattggttaatggtgttattttagtttgtttttaagtatgtttttatagtaaagggtgttttagattagtttagtttgatgatattattttttgtgattatttattttatatttgttaagttattttttgatttaaatttatttttttatagaaatttttttatttggaggagaatgtataatgaagttaataaagtatattatgtttatgtttttttttttttggagatagagtttggttttgttgtttaggttggagtttagtggtgtaatttcggtttattgtaatttttgttttttaggtttaaatgatttttttgttttaggtttttgagtagttgggattataagtgtgtattattatattaggttaattttttgtatttttaatagagatgaggttttattacgttggttaggttggttttaaatttttggttttaggtgatttattcgttttagatttttaaagtgttgggattataggcgtgagttattgcgttcggtttataatgtttattttataggttatatttttttaatgtagaagaatgttagtatttttatttattaagtagttttatatagtattttttatttgagagtaagtattagtttttaggtttacggtgattttaattaatatgaagatattttgttttagaagttagtaggatatttttttattttttgaattatttaaaatatagtaaggaggtcgttggtgattttttttatgatgggaagtattaaaaggtagaatttatttagttttttatgattttatgtttaggttattttggtgatttattttaggttattgggagtttatagtaattgttttttattttcgttttttttttttttaaattttttttttttaattatttattttttattagatttatgtatttttaataatgaattgaattttattttgtaattgggttttttaaagataattgatttttttttttttaattgtttttatgcgtattttgtagagaatgtttggaatattttgtttatgaaaggtataaagtatataaaatattttgagtgattttttttaaaataaaaatgattagttttgatgttttagatgtttagaatgttatgtgttttgtataggttttacggtatggaaagtgtttaattgatatttgttaaatgaatgaatttggaaaacgaaaaatatacgaaatattttattttttaataatgaagaaaaagtttttagatttttatttagattcgttttaattggttgaattttttaatgaaaagaaaatacgcgtcgtattgttaatttagttgtttttaaatatatttttattaaattttgtttggttgttttaattttggggttgaagtttttattttgatgatatagagacgtttattgtagtggaaatagtaagtagtattggttttttcgtttttttttttttaggattttaatttttttttttcgaatattagttttgtttttttagtaaattttatattatagaataggttgaggacggaggagataagaggaaagtaggaaatcggagttatggaaacggcggagcggaggtaaagtgtgagagcgcgggtggttagaagggaaaaaatttttttcggacgacggcgcgaaggcgcgttttagattacgttacgtatcggggtgacgttacgatcgtgatacgcgggtgacgtcgttgtcgcggcgatttttcgtcgttttcgtttttttttttcgttttttttcgtattttcgtttagcgttttttttttaatttttttaggttcggttgcgttcggggtcgcgggtcggtatttgaggtggtttaggcgtttttcgttcgcggcgtcgttcgggtcgttttttttcgcgtttttcgcgtttttcgttttttcgttttcgttttcgttttcgttttttttagtttttcgtttttttttttttttttcgttcgatagcggtcgttcgggtttcggttttcggttataagatggcggcgttgagcggtggcggtggtggcggcgcggagtcgggttaggttttgtttaacggggatatggagttcgaggtcggcgtcggcgtcggcgtcgcggttttttcggttgcggattttgttatttcggaggaggtgagtgttggcgttattttgtcgttttttcgatttcgggttcggcggttggttggtgtttattttggaaagaggcggcggtgggggtttgatgtttttagttattttttcgggttagtttcgcgggttgggaggtgggtatcgttttcgtgttttttttcgttatgtagcgtttttttacgtaaatatatataatggttcggggggtttttttggtttttattttagatgtggggattggggtagcggtggttgagcgggaggttattaatagggggcgaaatttagggttggttcgagaaggttacgattggttgaagtatttagttttgtatttttgtggggtgggggcggcggcggtttcgacgtggaggatataggttagttgttggggttgagataatagttcgagttattgtcgcgtgtaatttttatatggtcgtggggatgatggggtttattatttttttttttttttttcggattgtttttttttttagttcgttgtttttttttatttttttatttggggatttttttttatttgttttatttagtaaattattttgatttagtttttatttttttaattttaaatcgtagttttcgatgttttttttggtttttggttttttgtttttaatgtttgttagcgttttgtcgttgattggtaatttttattttatttttatttatcgttcgtttattttttagttgtcggatttgtttgttttttaattttagtttttatttaagagtatttttgtattttttttattttggtttttttgaggttttgtatttgattttattattttttaatattgttgtttgttgttatttttataaatttttttggatattttggagttatttgttttttgagtttagaagttgttaagattttattaggttttatttggtttttttcgcgtttgtattattggtattttttggttagtcgtttattgtgtatttatatttttttatttttatttatttttataggtttgattgattttttagtgttgtttttttttttgttttatttttttttttttttttttttttttttagtttttgttttttttagtttgtttttgtattagttagttttttagtattgtgttaaattatttacgtttttttattatataaaatttattataaatatttggtattttattatagaaaataatattttattatgttttataaataagatatggtataataattgtggtttatagttattgattaggtaatgtgatttattttgttgattttgttcgaagttttttttgttatttattattaatatttaattttttaatttttataatattttattttttttgtaattttttttttgtattattatttttggaaatttatttaatatgtttgttttatttagtattagtttgtttatgataatgtttgttttttattttttatattatttttgttatatgtttaaaatgtgttttgtattattatttgatttgttttaaaattttttatttttaagttttttaaaattattttattttttagtatgtatttttgtttagattagtttttttttatatttgttttttttttttagttttttgatttttaaggagaaagtttttttttattttaattttttagtttattttgttttttttgtttttagttattatttattttgttttgttttttggtttttggtatttaattttttgaagttttttttttttttttttatatttttacgtttttttttatttataaatatttttgttttttttgatatggaaatttatttttaggatatattgtttttaatggataaatattaggggttatatttgttgtttgttttttttaggaatcggatatgtttttgttttaattaggtataggtgtttttggattttattttattttgtaatagatgtgtagttttgttgaattgtattttgtttgaagattattatagagtggaataatgagtgaagtaataagtaggggttatgaaattgtaattttttgattataaaattgtttattttgggaattttgttgtagagttattagaatcgtttgtaattttgtaaagaaggtttttgtgaagtaaaatttttatttttttattttatttgaaagggttagattgtttggaattgtattttttgaagagtttgatttagtaagtgagagcgagggttatggatttttgtatttggtatatgttttgagtagtttttatgtattaatttttgagaatttttaggttagttgaatttaagtataaattgttagtaattggaaagtatatttatattttttgaaattataaggatatttttattttatttggttaaaaaataagtgttttttattgttttttttatttaggttttaatgtttagtggtgaatagtagttttttttttatatttttttttgaattgataataaatgtatttggttgggagggtgatattgattaaaaaatgtattttttgaatgtaaatattagtattatagatgataaaataaatttttttaagaaataattttaaatttgaagttgatatttagtggaaattgaaatgtgttgtggttttttatttgaagttttttttatatttatttaaagggattttttattgtaaattatatggaaagaatgaaaaggtttgtttgtgtgtaatgatatattttattttgaagatttattttatttaatagtaaaatgtaggttttttttttttaaataaaagttttttagagggaaattttatttaaaaaaaaagtttgattttaaagggaaagtaagttattattaaaaattagaaaattataagtataaaaagtaaaaaattattagtaattttgttattaagatattattattatagatattttggtgtattttatttgtttttttttaatgtttttataatattatgtagttttgtattttaaaaaatttaaagtaaaaatttttacgtattattagatatattgtgatttatttaattaattatttttttggggtgttaggttgtttttaattttttattgttattaaatattttgaatataggatgtagattttagtttttaaaatatgttggggaatgaataaattttatattttgtatttgtagtattaatattttgtaggtgtttaaaatagaatattttggtaaatgattagtgtttattaaatatttattaaatgaatgtatttgtatttttggtattaaatattaatatttgattatttatatttatttgattttttttttatggttatatggtatgaaatagtgtatggtataaattaattatatggtataataaatatatttttttaagtgtgatattagagtgatatttattaattgttttttttgtgttgtttttgtagaagggagttttttataattgtattagaattataattt

SEQ ID NO: 366 - DNA, 6154 bp, Artificial Sequence; identical to SEQ ID NO: 364
  chemically treated genomic DNA (Homo sapiens)

SEQ ID NO: 367 - DNA, 6154 bp, Artificial Sequence; identical to SEQ ID NO: 365
  chemically treated genomic DNA (Homo sapiens)

SEQ ID NO: 368 - DNA, 6217 bp, Artificial Sequence
  chemically treated genomic DNA (Homo sapiens)
atgtttttatttatatatatgtggtagtttgggtgtttatgtatatggatagatgtatatatatagagtttttgtgttgtttagtaattgttttaaaatttggataattatttaatttttagggtaaggtataaattatggtagggaggtttattttaatttttttgtttttttttttttagtttgtagtttaataaattgatagttttaaaagtagaaaaattaaagaggatgagattttttgtttgattttaggtgaatttttttttgttagttaggtaggaagttttgatttgaaaattagttttgggtattgttttttttattgttttttgggtattaatttttgttttttaattttagttgaattagtggatggtgatattataggtttaagatagttgtatttaaatattagtgattataggttatattaaggaaatatttgtaggtaatttagggtttgggaaggagttatttttagttatttgtaagatagtaggatttgtagattatagtataattaaatttagataaaattttgaattagtgagaattattaggaaggaaaggaatagaaaatgaattaatttgagtgttaggagatttgtatttagttttgatttcggtattaatcgaatgtatgtttttggataggaaatttttttgagtttcgatttttttcgtggtaaaaaggagagggttaaattatagggtttcgagggttttttttagttgttatattttggagcgtatgagatgaggtaggtatataaagtggataagatgtggttaagaaaataagttatatattaagtttatttgtagtataggtgtttaagaaaattttgttgttgtgtaatattagaacggaaggttggtttttagtaaaatgtattaattttggtttaaattaagatgatgggtatcgggtatgggggtggggaggtagttgaagatttattgagttttgttttagggtagttttgtttatcgttttattttattttttattacggtgtttaagtttatattgagagagaaatttttagttgtaaaagggagaagagaaacgttggaatattagtatcggacgttaggatatggttgtggtgttttaaaaattattttattatttggagtttgatttcgaggggagtatttttattttttagttttttgaaagtatttattagtatttgaatattgttttgagtttgttggagtagtgaaatttggtgagagagaagggtggaggaaggaaggagttgttgtatttggcggttggatttaggtagaggaaattgttataatttcgggaaagaatagaaaagtagaaagggacgagtttttatacgtagttaatgtttatggttttaattgtgtttgggaaggaagattttgggttaggggtgtattttcgttttttaaaattaaacgtgtttgagatagttataaagtttattaagggatttgagagattagagttttttgttttttttttttaattttgagttttttttttatttttattgagggagagtttgagtttatgataagtgtcgcgtttatttttggttaatttttaaaagaaagacgttcgttttggttttttttttaggtttttagtttttttagggatggtagaaatttttgggttaaggttgagcgaattattgtttattgtttttattagtttttagtaaaggtacgtcggcgggggggcgtttagtttttttagtaaacgtttcgcggtttttttcgtagattacgaggtgggggtcgttggggagggtcgagttgggggtagttcgttatttcggtttttagcgagttgtcggcgattttcgcggttttttggtttaggtttcggtttttcgggcgaggagcgggagggaggtcggggtttaggcgtcgcggcgaattcgttaacgtagcgtcgggtttcgaattttaggtttcgttttaggttttcggtcgtttggttagtttgtttgttttaattttaattttttcgaggttagttagagtaggtttgttggtagtagtatttttttagtagttacgcgattagttaatttttcggcggcgttcggggaggcggcgcgttcgggaacgaggggaggtggcggaatcgcgtcggggttattttaaggtcgcgttcgttagtttcggcggggcggttttcgtcgtcgtaattaatggatttttttttttgtttaaatagattcgtcgtgttaattattttttttttcgttagttttttttttatcgttatattgggttattaaaaaaagggggttcgttttttcggggtgttttttttttttttttttgttttcgtttgtttacggttttgcgatttcgacgtcggtaaggtttggagagcggttgggttcgcgggattcgcgggtttgtattcgtttagattcggacgggttttgttatttttttcgtttgtttggttttttttttttttcgttttttcgttcgttagtttatttgattagcggagattcggcggtcgggtcggggttttttcgtagtttttgcgcgtttttagagttcgggtcgtggttcgtcggggtttgtgttttttggtttcgagggtagtcgttgggttttcgagaggggttcgggttgcgtaggggcgttttgttttgttcggttttgtttttttgagagtgcgagagaggcggtcgtgtagattcgggagaaagatgttaaacgtgcgagtgtttaacgggagttttagtttggagcggatggacgttaggtaggcggagtattttaagttttcggtttgtaggaattttttcggttcggtggattacgaagagttaattcgggatttggagaagtattgtagagatatggaagaggcgagttagcgtaagtggaatttcgatttttagaattataaatttttagagggtaagtacgagtggtaagaggtggagaagggtagtttgttcgagttttattatagattttcgcggttttttaaaggtgtttgtaaggtgtcggcgtaggagagttaggatgttagcgggagtcgttcggcggcgtttttaattggggtttcggttaattttgaggatacgtatttggtggatttaaagattgattcgtcggatagttagacggggttagcggagtaatgcgtaggaataaggaagcgatttgtaatcgacggtaatgatttttttttaattatagaatgtgtttggggtttcgttttgtttgttggagggtgttaattttagtttgtttttcggcgtattttgatttagttttgggagagttaattttattggttttaggtgtttagtgttatttggtttattgtttgtttgtttgtgatttttaagttagaaattggagatggtaagattcgataatttttttaatttaatatatcgcggttttttttattagtaatttttaggtatgtgataaagttgggatgtttattaacggttcgttttttggttagggaaagagttttggggcggagaatgtattttttgttttttgaaaataattttattttgtgtttttaaaagttattggggatgacggatttaggattgtgggtggaggtagtgggttttttattttttgattatggggttaatttttgttagttattgttttttttaataaagattgtgtgttttttttaaaaattttttttgcgtttagatttttttatttaaaataaaagagttaatagaatagaagaaaatgttttagacggttttttaaatgtcggttttgtggagtagacgtttaagaagtttggttttagaagacgttaaacgtaaatagttcggtgggttgattattaaaggagtacgtattggaattcggggtttttagattttacgatatttgattttattggttgttggtaaattaaaagtttatggggttttgttttgtttatatttcgtgaggttaaaaaagtagtaatggggaaggttggggatacggtaattttttagagtttttatgtttagagatattttttttttaaattgttgattagagtagttatttgtaatttaggttttatcgggtaggaaggtcgtttttttgtgagttttattaaaacgtgttgggagtaataggttttttgtttattcgaataagaattagggtatttttttagttcgaattaatgagaattaattttttagaggtttagtttgagtcggtaatagattttgagttatatatggaaaaatggtaaatatatgattaagttttaattttgagggggaatgtttggtagaaattgtttatttttggttatgtaagggattagagatgtgaataggatggtatgttgtgttttttgatattttaataaattgttattttttttgttgttttttaagtttggagagagaaggaattagtatttgtaaaaattaaatggaaagataaaaaagttattaaagtttttatagaatttttggtaatattgaagttgtaaagtagaagttaaattaatttttgttagtaagtaatttaggaatacgttagttagtgtatgttaattgtgtcgtaatagggtgatttggatatttgtaggggaaatgggtagtaaatattaagattggtgatcgtaggttagtttagtataaaggaagtggagatttttttatgtataagaatttgattattgtaaatagttaatttgaataatttagtttttagataattaatatgggttggttatttataataaattatatattttaatagtttattagttttttttagattaagattgtgatttttttattttttaaagtatatacgtagtttagtatatgaggcgataaaatattgatgttaattttttaaatttttagttataaaaattttaaaataatagggattaaggtgagatttaggtttgttgtgtttttaaattgtatatgtgattttatatattttttttagcgtttatataaaacggtattatagaatttttattttatagtattatatgaagtgggaaaattaggtgaaaatttttttgaagtaattttaatatgcgtagtttttgttggtttgtgatttgtggtttagtttattagatgagttacgagaattagatttggattttgatttggttttgttttgatatgtaatgaggtatttgtaggatttagtaatattgttagtttaaagaatattagaaatattagtaagaatttatttaaaagtatttatgagtattttttgtatatgaattaggaattagaatattttgaaaatgatgttaataaaatttttttttggaaggtttttataatttttatttttaattattttttaaatttagaaagtttaatttgttataggagaaaaaaaattaaaaatttttaaaaatttagaaaatttttattcgtaagtattatagttttttaattattttatttattttttatttgtttttgatttagattatttagagtagggttttttagtttttgtattaatgatattttgggtcgaataattttgttgtaggaggttgttttgtgtgttttagattgtttggaattatttttggttttttatattagatgttagtagtattttttttttttagtgtgataatttaaaatgtttttagatattgttaaatgttttttgtggggcgggggtaatattgtttattgttaagaattattgttttagattaaagaatatagtatagaggaaaggaaaaaaaaatttagttaagagaatgttaggtggagatgattatagttattaaatttttttttttattaagtatttttaagttaatatagtgataaaataatttttgtattttattggtaacgttaatttagtgttttttttttaattttttcgttttgtttttttttgtagaattaagaatatgtttttttgtttattagatatattattgtttgatgaagtaaggaagatatatatgaaaattttaaaaatatatatcgttgattttatggaatggatattttgtataagtattgaaaaataataatataataatattaaaattttaggtatttttaaatgatttgtttttaaaagcgttggatgtagtattatgtaattaggtttttttttatttgttttattgtattatttgtgtatatagtttttattttttatgtagtatataaattttggggaagggagggtaggg

SEQ ID NO: 369 - DNA, 6217 bp, Artificial Sequence
  chemically treated genomic DNA (Homo sapiens)
ttttgtttttttttttttaaagtttatgtgttatataaaaggtaaaaattatatatataggtagtataatgaagtaaataaggaaaaatttaattgtataatgttatatttaacgtttttagaggtagattatttaagagtgtttaaaattttagtgttattgtgttgttgttttttagtgtttatataggatgtttattttatgaagttagcgatatgtatttttaaaatttttatgtatattttttttgttttattaagtagtgatgtatttgataaataaggaaatatatttttaattttgtaaaagaaaataaaacggaagaattaaaggaagagtattagattaacgttattagtagagtataggaattattttgttattatgttagtttggaaatatttgatggggaaaaaagtttgatgattatagttatttttatttaatatttttttaattggatttttttttttttttttttgtgttgtgttttttggtttagagtagtagtttttaatagtaggtaatgttgttttcgttttatagggaatatttggtaatgtttggagatattttaggttgttatattgggggaggaggatattgttggtatttagtgtgagaggttagggataattttaaataatttaaaatatataggatagttttttataatagaattattcggtttaaaatgttattagtgtagaggttgagaaattttattttaaataatttaggttaaaggtaagtgggaaataaataggataattaggaaattgtaatatttacgggtaaaaattttttaaatttttgaaaatttttaatttttttttttttgtgatagattaaattttttaaatttgaaaaatgattgggaataaaaattataaaggttttttagaggaaaattttattaatattatttttaaaatattttaatttttgatttatatgtagaaaatatttatgaatatttttgaataggtttttattaatatttttagtattttttgaattagtaatattattaaattttataaatgttttattgtatgttagaatagggttagattaaaatttaggtttgattttcgtggtttatttgatgagttaggttataagttataaattaataagggttgcgtatgttaaggttgttttaggaaaatttttatttaatttttttattttatatggtgttgtaaaatggaggttttatagtgtcgttttgtataagcgttgaaaaagatatgtgaagttatatatataatttaaagatataataaatttgaattttattttaatttttgttattttaaaatttttataattggggatttaaaaagttaatattaatattttatcgttttatatgttaaattacgtgtgtgttttagaaaataaagaggttatagttttggtttaaaggaagttaataaattattaaaatatgtagtttattatgaataattaatttatgttggttatttggggattgaattatttaaattagttatttatagtgattagatttttgtgtatggaaaaatttttattttttttgtgttgggttgatttacggttattagttttgatatttattatttattttttttataaatatttaaattattttgttacggtataattagtatatattggttgacgtgtttttggattgtttattgataagagttaatttaatttttgttttgtaattttagtgttattagaaattttgtagaaattttagtaatttttttatttttttatttggtttttgtaaatattggttttttttttttttaaatttaggagataatagggaaagtgatagtttattaaaatgttaaagaatataatatattattttatttatatttttaattttttgtataattaaagatgagtaatttttattaaatatttttttttaaaattgaaatttaattatgtatttgttatttttttatgtatggtttaaaatttgttatcgatttaagttgaatttttaggaaattaatttttattaattcggattgagggagtattttagtttttgttcggatgggtaaagaatttattgtttttaatacgttttagtgggatttatagggaaacgatttttttattcgatggggtttgggttataagtagttgttttggttaatagtttgaagagaaagtatttttgggtatagaaattttgaggaattatcgtatttttagttttttttattgttatttttttgattttacgaagtataaataaaataaaattttataagtttttaatttgttagtaattagtaagattaggtatcgtgaggtttgaaggtttcgggttttagtgcgtgtttttttagtgattaatttatcgagttgtttacgtttgacgttttttgaggttaggttttttgggcgtttgttttatagaatcggtatttggggaatcgtttgaaatatttttttttgttttgttggtttttttgttttgagtagaagaatttaagcgtaggggaaatttttaaaaagaatatataatttttattagaaaaaataatggttggtagaagttggttttatagttaggggatgaaaaatttattatttttatttataattttggattcgttatttttagtggtttttaagggtataaaatgaggttgtttttaaaaaatagaaagtgtatttttcgttttagagttttttttttagttaggaggcggatcgttgataaatattttaattttgttatatatttaggagttgttagtgagagggatcgcgatgtattaagttagggaaattatcggattttattatttttagtttttgatttaaaagttataaatagataagtagtgggttaggtagtattgaatatttaagattaataaagttagtttttttaaagttaaattagaatacgtcgaaaagtaagttaaggttaatattttttagtaggtaaagcggggttttaaatatattttatggttgggaaagggttattatcgtcggttgtaggtcgtttttttatttttgcgtattgtttcgttaatttcgtttggttgttcgacggattagtttttgggtttattaaatgcgtgtttttagagttagtcggagttttaattaaaggcgtcgtcgggcggttttcgttgatattttggtttttttgcgtcggtattttgtaggtatttttggggggtcgcgggggtttgtagtagaattcgggtaagttgtttttttttattttttgttattcgtatttgttttttaggggtttgtgattttgaaaatcgaaattttatttgcgttggttcgttttttttatgtttttgtagtgtttttttaagtttcgggttaatttttcgtggtttatcgggtcgaagaggtttttgtaggtcgagggtttggggtgtttcgtttgtttggcgtttattcgttttaggttagggttttcgttagatattcgtacgtttgatatttttttttcgggtttgtacgatcgtttttttcgtatttttaaaaaaataaaatcgaataaaataaagcgtttttacgtagttcgaatttttttcggaagtttagcgattgttttcggagttaaaagatatagatttcgacgagttacggttcgagttttaggagcgcgtaggggttgcggggaagtttcggttcggtcgtcgagttttcgttgattaaatggattggcgagcgggagggcggagaggagaggggattaggtaagcggagagggtggtaaagttcgttcgagtttgggcgggtgtaagttcgcgggtttcgcgaatttagtcgttttttaaattttgtcggcgtcggagtcgtagagtcgtgagtaagcggggataggggagggggagaaaaatatttcgaaaagacgagttttttttttttagtggtttaatatggcggtggaagggaggttgacgaagaagaaaatgattgatacggcgagtttatttaaatagaggaggagatttattggttgcggcggcgggagtcgtttcgtcgaggttggcgagcgcggttttaaggtggtttcggcgcggtttcgttattttttttcgttttcgagcgcgtcgttttttcgagcgtcgtcgggagattggttggtcgcgtgattgttggaggggtattgttgttaataaatttgttttggttggtttcggagaaattaaaattaagataaataaattagttaaacggtcgggaatttggggcggggtttgaggttcggggttcggcgttgcgttggcgggttcgtcgcggcgtttaagtttcgatttttttttcgtttttcgttcgggaagtcgggatttggattagaggatcgcgaaggtcgtcggtagttcgttaggagtcggggtggcgagttgtttttagttcggttttttttagcggtttttatttcgtggtttgcgggggaggtcgcggagcgtttgttgggggggttgggcgttttttcgtcggcgtgtttttgttgggggttggtggaggtagtgggtaatggttcgtttagttttaatttagaagtttttgttatttttggggaggttgggggtttagggaagaagttaaagcgaacgttttttttttagaaattagttaggagtagacgcggtatttattatgaatttaagtttttttttaatgaaaataagaaaggaatttaagattaaaaaaaaaaaataaaaaattttagttttttaagttttttaataaattttgtagttgttttagatacgtttagttttgaaaaacgagggtatatttttggtttaggatttttttttttaagtatagttaaggttatggatattggttgcgtgtgggaattcgtttttttttatttttttgttttttttcgggattgtagtagttttttttatttgagtttagtcgttaaatataatagtttttttttttttttattttttttttttattagattttattgttttaataaatttagaataatatttagatgttagtgaatgtttttagagggttgaagggtgaaaatatttttttcggggttaaattttagatgatgaaatgatttttaaaatattataattatgttttaacgttcgatattagtattttagcgtttttttttttttttttgtagttggaaattttttttttagtgtgggtttgagtatcgtggtggaaggtaaagtaggacgatgagtagggttgttttgagataaagtttagtggatttttaattgtttttttatttttatgttcggtatttattattttggtttgagttaaagttaatgtattttattggaaattaatttttcgttttaatattatatagtagtaaagtttttttaagtatttatgttatagatgagtttgatgtgtagtttgtttttttagttatattttgtttattttgtgtgtttattttattttatacgttttagaatgtgatagttggaagggattttcgggattttgtggtttaatttttttttttttattacggaggaaatcgagatttagagaggttttttgtttagggatatgtattcggttggtatcggagttaggattagatgtaagttttttaatatttaggttggtttattttttgttttttttttttttaatggtttttattggtttagggttttgtttgagtttgattgtgttgtagtttgtaggttttgttgttttataagtgattgaaaatggtttttttttaggttttgggttgtttgtagatgtttttttgatgtggtttgtggttattgatatttaaatgtagttgttttgagtttgtggtattattatttattagtttaattaaaattgaaggataggggttgatatttagagaatagtaaagggggtagtgtttagaattagtttttaagttaggattttttatttaattgatagaaaagaatttatttaggattaagtaagaggttttattttttttagtttttttatttttaaggttgttaatttattggattgtagattgggggaaaaggaataggaaaattagggtaggtttttttattataatttatattttattttagaaattagataattgtttaaattttaaaataattgttagataatataggaattttatatatgtgtatttatttatatgtataaatatttaaattattatatgtatgtaaatggagatat

SEQ ID NO: 370 - DNA, 6196 bp, Artificial Sequence
  chemically treated genomic DNA (Homo sapiens)
tttgtatttttagtagtgatggggttttattatgttggttaggttggttttaagttttcgattttaggtgtttttatttgtttcgttttttaaagtgttgggattataggtatgagttattatattcggttagaaaaattttaattatatttgaaatttatttatattattataagaaatttatatatattaatgaaaaaaaaaagagatattgaatttttagaatttaattttaaattgtttataatttaagataataataatagttgtaaatgtattatttacgtgtttgtatagttttttatttgaaagttattattaaaagtataaagaagttgttgttgaaatttttaatttgtatagttgttttaatatgaaattataaagaaaaagttatgattatgaaattaggtttaagttttttttaattttaaaaatattttatttaaagttttatttaaattatttatttttaatattttgtattttattgtttttttttaataaaaaataatatattttcgttaagtgatttatagttatgtttttaatttattgtagttattttatttataaaattttatattttatgaatataaaaaattgagaaataatgttttatattatattaattagtttagagtataattgtggttatatcggttaatgggttaatagggttatttatttattgttaataattttttttttgtgagtaaaataatttggatttttaaattataaattataaatttattaatgttttaatttatgagatggagtaagtttttttaggtaaattgtaatcggttatagttttatttgtaaatgtattttgtttgttttaaatagtttttagagagttgtttcgtaatgtgttttaggattatttttagaataattttttatggttgtgtgtattgtggtttaagggattttttattggtaggtttaaaatttatttagttcgtttttagaagagtaggattgtttttgtaagtttgtataaaaaataaaaagttagattagaaaaatgtaaggagtttaggtaaggtggtttacgtttgtaattttagtattttgggaggttgaggcgggtagatcgtttgagtttagaaatttgagattagtttgggtaatatggtaaaatttcgtttttaacgttatttaaaatataaaaattagtcgggtgtggtggtatgcgtttgtagttttagttatttgggaggttgaggtgggaggattatttgagttagggaggtggaggttgtagtgagttgagatcgttttattgtagtttagttagggcgatagatttagaatttgttttaaatatattatatatatatatatatatatatatatatatatatatatatatatagggagtttatagattttttttttttttttagttgtttttttttttttggtttttttgttaaaaattttatatacgtttttaagtaaaattttttaatttattttaatagatgaatttgttttggattaagttagaagtaagagagaattttgttagattagttattttattagttttttaaaatgtagttatatttgggagatttttgtgtaggaagtaaggttaataatgtagtttttagaagattaggtgtggttttaatgagtttatataaggcgggtggggaggggagtggttttatggttttatttttaaaattcgtgtaaagattattttttgttgtttaaatacggtagtagagaaagagacgtttttgttttttacgttataattagaggtaataatttgtgttaatttggtttttagcgaaaaggttaaaagtgtattgataatttcggttttagttgagattgggataattcgtttgagttagtgttaaattttatttattcggcgcgtaagcgagcggggttttttttttttaatttcggtttaggttgtttttgtcgggttagtgttgtcgggttggtggaagttgttttttttttttttaagattagaaaggcggagggtttaggaaggggtttttttttaggtgtaagggattgtttggatatttggagggaatggtaaagttttgttttatgaggtgaatgaatataaattaaatcgttttcgtatttaaaataatttgacggatgatagtgtttatttagttaatcggttttcgacgttggatttgttatttgggtttgttgtttgcgagttaaggttttgtaaaaagtttttggtttgttattttaattaatttattttttttagtaatttttttaatatattttcgggttgtattgtaatttattttttatagtagaaatgtggagggttttagagaaggtataaggtaaattttttttttaaattttatttttggttggtcgcggtggtttacgtttgtaattttagttttttgggaggttgaggcggacgaattatttgatatcgggagtttgagattagtttgattaatatggagaaattttatttttattaaaaatataaaattagtcgggcgtggtggcgtatgtttgtaattttagttattcgggaggttgaggtaggagaatcgtttgaattagggaggcggaggttgtggtgagtttagatcgttttattgtattttagtttgggtaataagaacgaaatttagttttaaaaatttttttgttttattttattttttaaatttgagataaggtttcgttttgtcgtttaggttggagtgttatggcgtaattatagtttacggtagattcgaattgttgggtttaagggatttttttattttagttttcgaggagttaggatgatacgcgtgagttattatgtttggttaatttttagattttttgtagagacggggtagttatgttgtttaggttggtttttaatttttgattttaagtgattttttcgtttcggtttttaaagcgttgggattataggcgtgcgtaatcgcgcggaggtaatttagaaattgtagagggagtacggatttgggtattgggaagaatagggcgtggatttggagtgtgatcgcgtttgaatttgggttgtgtttgggatattttattttttgggtcgtaggtggggggggagagagagagagagagagagagagagagaggatgtcgattttatatggtttttagtttttcgcgttttagtcgaatgtttggtttttagtgggtgtttgatacgtgggaaatgtagggggagggggtggcggggtattgggaatgtttcgtagagtggatttcgggagagtggcgtttttttttagaattttttttcggttatatttggagtaaaagtttgatattttagaaggaaaattttagatgagtagttaggattgagggttagcggtaggcgggagcggggagatagtataagtacgttttttaatgaggcggtgtcgtaaaataattaattttaataaagattgtagagaagaaaattaggttttgttggcggagtgtataggtttttagtcgagcgtttaataattaggtttcgggtttattttgtcgtagttttttggaaatttttaagttggaatgtgtgcgtgcgtattacgggttattgttttttttgtgtgtgaatttgaagcgaaatttgggcgaggcggggtcgtgttattagtaatcggatttatagtcgcggttttaagaagtttcgaagttttttcggtttttcgtagtattgttgggagggtatacggcgtttttgtttttattttagagcgtggggcgcgcggaaaaaggtttggtgattgtttttttcgtcgtttttcgggagcgtgttttttcgtcggattttgggattttagagaagcgtcgagggcgcgagtatattaagatatacgattttttttggggatcgggaagggtataattattttttgtaatttcgttattaagacgttttgggttattaggttcgggggaaaattcgttttcgttttaggttttcgattcgggtcgtagtttacgtttcgcgtttttttttgcgcgtcgttttgtttttttttagtttcgtttttagtttcgttcgggcgtttagagggtaaatgaggggcggcggggtggcgggtgggggggagacgcggaattttttagcgcgggggttttggtttattttgtaatcgggtagtttttttttgtttacggagagaaaggggaaatggaaaagtcggggaggcggtggttggcgttcgttgcgtcgtttttgggtaggtttagacgtcgtgagttaggggtagagtagggcggtttgagcgtgcgggcgacgcgggttttattcgttcgtttcgttttggattgcgcgttacgttttggggttcggcgttttggtttttgtttttgtcgttgtcgtcgtcggattttagtggttcggcgtgttcggtttttataggtttgtagttagtatcgtatcgaattttcggggggtcgcggttggagcgttcggtcggcgtgggagcgttaaggtcgtaggtaatttagggttgggggttttcggcgtgtttttcgggtcgcgtttcgtttgggtgtttcggggatttttatgtagaaatggagggtgtttttagtagaggggaaaattttggcgtgggaagaggtgggggcgtgtttatagttgcgttcgcgggtcgtcggttgtattaggtatagttggaaagtattttgcgtaagggttttacggggtgtagattcgcgattttttttttttttttttttttttcgtattcgtagcgttagggtagtgttggtttgggtagtgcgcggggaagcggggattcgttgttattgcgtttttcgttgtcgacgtcgtttggacggtcgtattttttttgttcgagattcggtgagtgtagttcggaggttggaggattcgatttttttaaatgttgggtgttttgataatttataagttttttaggtttttttgatttagagaattaggaggaaaggagtgggagtgtgggttggcggagtttagagatttgtgaatggttggaattaaatttaagtttgtaattcggattttattttatgattaaagaggttatagtagaatacgaaggttgggtttttggtttaagaaagaatattaggagaaaaaaaaagttatttttacggaagttgttttcgagcgatagtgtatgattaggattttgaaatttttttagttttgggcggagaaggacgtttagggattgtttttatagttaataggggaaggttatcggttgtttgtaagagagaaacgttgcgatgtttgtttattttatttttgggaagataagattaaaggttgtttttgataaaaaatagggatagaaaggtttttgtagttgttttatatatttgtggtttgagtcgtttgtgttaaggagagtgtaatttatttttagttgacgtttttagttttttgcgacggattgaggtttgtgtgtaggacgtttggtatacggtttatgaggattttgtcgtgtaaagtaaatgggaacgttgaggtatgtagaggttttgaagtagagtgtcggtttttttttttatacgtttgaaacgtataattcggggttttttgagagtaaaaatatagttagaaatgtgttttgagggagaatgtattattttggtatatatatgtatatatgtatatataatttttaaattttttttgagagggggttttatttttgtcgtttaggttggagcgtaatggcgcgatttcggtttattgtaatttttatttttcgggtttaagcgatttttttgttttagtttttcgagtagttgggattataggcgttcgtcgttacgttcggttaatttttgtagagatagggttttattatgttggttaggttggttttgaatttttgattttaggtgatgtattttttttggttttttaaagtgttgagattataggtatgagttattgtgttcggtttaaaaaaatattttaaatgagaaataatataagtaatagttattttttgttaggtagaagtatatgttgttatgttggttatttttatttatatttgttaggaaatatttatattttgtttttgtatatggaggtagttaagagtattatgttaatgtttaggaagagaattttttcgtgattttattgttgatttttgaaataatttagtgtaattaattttgattgtat

SEQ ID NO: 371 - DNA, 6196 bp, Artificial Sequence
  chemically treated genomic DNA (Homo sapiens)
atatagttaaaattagttatattgaattattttagaaattagtaataaaattacgaggaaattttttttttaaatattaatataatatttttggttgtttttatatatagaaataaaatgtgagtgttttttggtaagtgtgaatgaaaatggttagtataatagtatatgtttttgtttaataaagaatgattattatttgtgttattttttatttaaaatatttttttaggtcgggtatagtggtttatgtttgtaattttagtattttgggaggttaaggagggtgtattatttgaggttaggagtttaagattagtttggttaatatggtgaaattttgtttttataaaaattagtcgggcgtggcggcgggcgtttgtaattttagttattcgggaggttgaggtaagagaatcgtttgaattcgggaggtggaggttgtagtgagtcgagatcgcgttattgcgttttagtttgggcgataagagtgaaatttttttttaaaaaaaatttaaaaattatatatatatatatatatatgtgtgttaaaatagtatatttttttttagggtatatttttgattatgtttttgtttttaaaaagtttcggattatgcgttttaggcgtatggaaggaaggatcgatattttgttttaaaatttttatatgttttaacgtttttatttgttttatacgataaagtttttatgggtcgtatgttagacgttttgtatataaattttaattcgtcgtagagagttgggggcgttagttggaagtggattatattttttttggtataaacgatttaggttataggtatgtaaagtaattgtaagagtttttttgtttttgttttttattaagagtagtttttaattttgtttttttaaaagtgaaatagataagtatcgtaacgttttttttttataggtagtcggtggtttttttttgttaattatggagataatttttaggcgttttttttcgtttagagttagaaaaattttagagttttgattatgtattatcgttcgaaaataattttcgtgaaaataatttttttttttttttagtatttttttttagattaaaagtttagttttcgtgttttgttatgatttttttagttatgggatagagttcgggttataaatttgaatttagttttagttatttataagtttttgggtttcgttaatttatatttttatttttttttttttggttttttaagttaagggagtttaaaaggtttataaattattaaagtatttagtatttgggaggatcgggttttttagttttcgagttgtatttatcgggtttcgggtagggagagtgcggtcgtttaggcggcgtcggtagcgggaggcgtagtgatagcgggttttcgttttttcgcgtattgtttagattagtattgttttggcgttgcggatacgggaaggaggaggaagggggaggagtcgcgagtttgtatttcgtgagatttttgcgtaaggtgttttttagttgtgtttggtgtagtcggcgattcgcgagcgtagttgtgggtacgtttttatttttttttacgttagagtttttttttttgttgggggtattttttatttttgtatgggaattttcggggtatttaggcgggacgcgattcgaaagatacgtcggagatttttaattttggattatttgcggttttggcgtttttacgtcggtcgagcgttttagtcgcggtttttcgaaggttcggtgcgatgttggttgtaggtttgtgggagtcgagtacgtcgggttattgggattcggcggcggtagcggtagaagtaggaattagggcgtcggattttagagcgtggcgcgtagtttagagcggagcggacgagtgagattcgcgtcgttcgtacgtttagatcgttttgttttgtttttgatttacggcgtttgagtttgtttaggggcggcgtagcggacgttagttatcgttttttcgatttttttatttttttttttttttcgtaaatagaaagagattgttcggttgtagggtaagttagagttttcgcgttgggaaatttcgcgttttttttttattcgttatttcgtcgttttttatttgttttttgggcgttcgggcggagttggaggcgggattagggaggagtagagcggcgcgtagggaggagcgcgggacgtgagttgcggttcgaatcgagagtttgggacggggacgagttttttttcgggtttggtgatttaaggcgttttagtggcggagttgtaagaggtggttgtgtttttttcggtttttagggaaggtcgtatattttagtgtattcgcgttttcggcgtttttttggagttttagggttcggcgggagggtacgttttcggggggcggcggggagggtagttattagattttttttcgcgcgttttacgttttggggtggggatagaggcgtcgtgtgtttttttagtagtgttgcgggaagtcggggaagtttcggggttttttggaatcgcgattgtgggttcgattgttagtagtacggtttcgtttcgtttagatttcgttttaaatttatatataaagagggtagtgattcgtggtgcgtacgtatatattttaatttagagatttttaagaggttgcggtagggtgggttcggaatttggttgttgggcgttcggttgggagtttgtgtatttcgttagtagaatttggtttttttttttgtagtttttattaaaattggttattttgcggtatcgttttattaggaagcgtatttgtattattttttcgttttcgtttatcgttaatttttagttttagttgtttatttggggttttttttttagagtgttaagtttttattttaggtgtaatcggaagagagttttagagaaaagcgttattttttcgaaatttattttgcgggatatttttaatgtttcgttattttttttttttatattttttacgtattaagtatttattaggaattaggtattcggttagagcgcggagagttaggagttatgtaaggtcgatattttttttttttttttttttttttttttttttttttttttatttacggtttaggaggtggggtgttttaggtataatttagatttaaacgcggttatattttaagtttacgttttattttttttagtgtttaggttcgtgttttttttgtagtttttagattgttttcgcgcggttgcgtacgtttgtaattttagcgttttggaggtcgaggcgggaggattatttgaggttaggagttggagattagtttgggtaatatagttatttcgtttttataaaaaatttaaaaattagttaggtatggtggtttacgcgtgttattttagtttttcggaagttgaggtagggggattttttgagtttagtagttcgagtttgtcgtgagttatgattgcgttatggtattttagtttgggcgatagagcgaggttttgttttaaatttaaaaaataaaataaaataaaaaaatttttgagattgagtttcgtttttgttgtttaggttggggtgtaatggagcgatttgggtttattataattttcgtttttttggtttaagcgatttttttgttttagtttttcgagtagttgggattataggtatgcgttattacgttcggttaattttgtatttttagtagagatggggtttttttatgttggttaggttggttttaaattttcgatattaggtgattcgttcgttttagttttttaaagggttgggattataggcgtgagttatcgcggttaattaaaaataaaatttaaaaaaaaaatttgttttgtattttttttagagttttttatatttttgttatggaaaatgaattataatataattcgaggatgtattgagagaattgttggaggagataggttagttgaggtgataagttaggggttttttgtaggattttaattcgtagataataagtttaggtagtaaatttaacgtcgagggtcgattgattgaatgggtattgttattcgttaagttattttaaatacgagagcgatttaatttatatttatttattttatgaagtagggttttgttattttttttaaatatttaggtagttttttgtatttagaggagaatttttttttgaatttttcgtttttttgattttggagggagggaaggtagtttttattaattcggtagtattgattcggtagaagtagtttgggtcggggttggggaggagaagtttcgttcgtttgcgcgtcggatgggtggaatttggtattggtttaagcgggttattttagttttagttgaagtcgaagttattagtatatttttggttttttcgttggaaattaggttagtataggttgttatttttgattgtaacgtgagaaatagagacgtttttttttttattgtcgtgtttagataataaaggatgatttttatacgagttttaaaaatagaattatggaattatttttttttttattcgttttgtgtgagtttattaaaattatatttaattttttgggaattgtattattagttttattttttatatagaagttttttaaatatagttgtattttagggagttggtgaaatggttggtttagtagggtttttttttgtttttggtttaatttagagtaggtttatttgttggggtaaattagaaggttttatttgaaaacgtatgtagagtttttaataaggaggttaaaagggagagagtaattgaaaagaaagaaaaagtttgtggattttttgtatgtatgtatgtatgtatgtatgtatgtatgtatgtatgtatgatgtatttgagataggttttggatttgtcgttttggttggattgtagtggggcgattttagtttattgtaatttttatttttttggtttaagtgatttttttattttagttttttagatagttggaattataggcgtatgttattatattcggttaatttttgtattttgggtagcgttagagacggggttttgttatgttgtttaggttggttttaaatttttgagtttaagcgatttgttcgttttagttttttaaagtattgggattataggcgtgagttattttgtttagattttttgtatttttttggtttggttttttgttttttatgtaggtttataaaaataattttgtttttttaggggcgagttaagtgagttttaaatttattaatgagaagttttttgagttatagtgtatataattatagggggttattttggaagtgattttaaagtatattacgaaatagttttttagaagttgtttgaagtaagtaaaatgtatttgtaaataaggttgtaatcgattgtagtttatttgaagaagtttgttttattttataggttgggatattaatgggtttgtaatttgtagtttggaaatttaaattattttatttatagaaagaaaattattaataatgggtaggtaattttgttggtttattaatcgatgtaattataattgtgttttagattaattaatatgatatggggtattgttttttagttttttatatttataaaatatggaattttgtgaataaaataattgtaataaattgggagtatagttataggttatttggcgaaaatatgttgttttttgttaaaaaaaaataataaaatataaagtattgaaagtagataatttgaataaagttttaaatgagatatttttaaagttaagaggaatttgagtttgattttatgattataattttttttttatggttttatgttgaaatagttatatagattaagagttttaataataatttttttatatttttgataataatttttaggtgagaagttgtatagatacgtaggtaatatatttataattattattattgttttaaattgtgaataatttgaaattggattttaaaaatttagtatttttttttttttttattgatatgtgtaagttttttatgataatgtgagtggattttagatataattgaagtttttttggtcgggtgtggtggtttatgtttgtaattttaatattttgggaggcgaggtaggtgggaatatttgaggtcgggagtttgagattagtttgattaatatggtgaaattttattattattaaaaatataaa

SEQ ID NO: 372 - DNA, 6191 bp, Artificial Sequence
  chemically treated genomic DNA (Homo sapiens)
ttagtatatatttgttaatatagtatatatgaaggttttatttataatttttttggttaagtagaaattttggtattatttattttaataaatttttaagatattatgaaatagaattttaggttttgatattattatttgttttaggttttgaagcgttgttggataagaggggtaaaatacggttttgttttggatttaaagttggttttttatattagtaagtatattttggtattttggttatttttttcggttatagtattatattgttataaaaggtagatataagtattaattagtttataggttattagataagtttagtttgattaatgtttaatatagtaattgggttattattgttatttttgtggtggtggtatatatatttagtttttgttcgggttatggtttaggattattttttatagaggttgtgagttagagttttaattgtgtagggttttaattatgttaggttatttattttttttaagaggattttattagtgtttgttcggttatatagttttttatttattaagtaatatagttattagtatattttaggtattagttaaggattataaaattaacgtgaatgttagtttttgtattaaaagtttaaaggagaaatttaaattttatatagatgttttatgaagatgtttagtaaatttatttttttttgttttttggaatttattttagtattgtgttatgtgtgtgtttagtaattttttataaaaagttttgttttttgtgatgttattagattatattgaagaatatataagtcgtattatgaaggttgttgttttatatagttttaacgtagtgagaattgatgtttttatatgttgtttttttgggtatttaaagaaatttttgtatagttttataaattagttgtagtttaaattgatttgtgttgtgatttgtatatataggttatatttttttgatagaaaatatagtttaaaattaaatttgtagtttttgttaagtgaatgtataggattttattgtatttaggttttttattgtaagatttatttttgtttttattttatgttttattgttgtgttttttatttgtttttttttagttttgttttttgtgtttttacggattgtttttagtttaggtgtgtaggaagtatatatatgtttgtagagtttttatggtttttgtatttagggtatgattttaacgtatagtggttgtattgatttgttaaaataaaggaatagattattttttttaatttatagggaagttttaggttgtgcgggtagtgagtagatttgtgtttgtttgcgtttgttttggtgaaaaattttatcgtttaggttgtagggtgcgagatttaggtataaatattttgttggatgaggaggaaagatgtaaggttgtttttttttagagatagtaaagggtaggtttgtagttttatttattttaggattgtgatttttgatagagtcgagagattagggttgttgaattaggtttgaaggttttagtgaatttcgtgaagagaggaggggtttggttgtaatatggatttagaggatatttttattgtaggagaaggaatagtggggatggggtggatttgttaaaggaatatagtttaagtttttgtagtttaaaaaagtttagttttttttggttaaagttttcgcgagtttttttggtattttttttgcgggagttataggggtagtgggatatttagtttttttaaaagtatttttacggttgtttgtgttaagtttttattttaagagttttatttttgcgaagtaatgtgttttatatattggttttaaagtatttatggttggttgtaataaatattaaggaggtttgtttttgtattcggagttgggtgtttttattttagatgatttcgagggtgtttgataagatttgaaggattttcggattttagagtattatttcggacgtttggtatttttgtcgcgcgggtacggcgatttttttagttgttaggttagtttttgattttcgagagggtttcgtagtgttgtaggggaggtggggattcgaataaaggagtagttttttcgtcggtgttattattcgacgttggttttaaggttcggttagtttgtttaaagttggtataagtttgttttgtaaaataaaagaagggaaagggggaaggggattttggtatagatttggttcgatttggatataggttgggtttgtaagttcgcggggatcgggtttagaggggtagtgttgggaacgtttttttcggaaattaattttttagggtattcgttttttttttatgcgtcgttttattttcgtcggagattaggtttcgcgggggttatcgttgtttatcgttttcggcggtcgttggttttgggttttcgttgttggtttttttttttttttttcgtatttttttttttttttgtttttttcgatttttttttcgtcgtttggtttttttttttttcgttttgttttttcgcgtttcggttcgcgcgagttagacgttcgggtagttttcggcgtagcgcggtcgtagtagttttcgtttttcgtacggtgtgagcgttcgacgcggtcgaggcggtcggagtttcgagttagtttcggcggtcgtcgtcgtttagatcggacgataggttatttcgtcggcgttcgttcgagttttcgtttcgtcgttaacgttataattatcgcgtacggttttttgatttcgtttagtattgatcgggagagtcggagcgagtttttcggggagtagcgatgcgatttttcgggacggtcggggtagcgtttttggcgttgttggttgcgttttgttcggcgagtcgggttttggaggaaaagaaaggtaagggcgtgtttcgtcggttttcgcgtcgttttcggatcgcgtttcggatttcgtagttcgtttaatcgcgtatcggcgtatcggttcggcgttcgcgttttcgttcgtttttttttgtttttttgagattagttgcgtcgtcgatcgggatcgcgggaggaacgggacgtttcgtttttcggtcgggagagtttggggcgggcggaggaggagacgcgtgggatatcgggttgtaggttaggcggggaacggtcgtcgggattttcggcgtttcgaatcgtttttaattttttttttttatttttttcgtttagttgcgtaggatcggcgttagtgggcgaaagtcgggtgttggtgggcgtttggggtcggggtttcgtacgtgcgtttcgcgttgtttttttagggcgcgacggggttttggcgcgtattcgaggggcgggcgttgtttattcgtcgagattgtattgtttagggaagttgaggaaggaatttaaaaatatagttttttttcggatttcgcgggataggcggttttttgagaggattttttcgttttcgtttttcgcgtaggttttaaattgaagtcggcgttcgttagtttggtttcggtttttttttaggttttcgcgattttcgttttttagtgtggagtcgtagtttcgatttgggagttgggagaattcgtttattattatttgcggttttcggggaggggtggtgttggcggcggttagttttttcgttggtaaaaggtaggtggggttcgattcgttttttgggcgtagatttcggtcgttcgtttcgttcggtgcgttttcgttttgtttatttaagagtgttttttatttttcggggattttagtttttttttgggcgttcgcgtcgaaagttttaggttttttttcgatggtcgtttcgcggagacgttcgggtttgttttatttgtagtttttcggtcgcgtttgggtttcgcggtggagcgggacgcggttgttcggttattgtagggggggatcgcgggatttttgagcggaagtttcggaagtagagtttattttggttaatattatggtgttttaaaatggggtttatagtaaatttttttttaaaattcggagatttttttttttggatgtttttttttgttgtttgaagaatttgagttaattaaaatattaaatttgttttatatatatatatatatatatatatatatatatatcggattgttgtttttggtttaagtgtgttaagtgtgtagatagaatatgagcgagtttggtttcgtgattatcgattataaatttatttgataggggaaatatgttttggaaggtttaattgtataattttaattttgagttgcgcgggttttaagagttaggttcgtatttgttgttgatgttattggtttggggagttggggtttggtgtttagcgcggtcgttgggggaggggtaaggtatagaatagtggtttttagattttgttgtatattggaattatttgggattaaaaaaaaaaaaattaaaataaaaattagtgtttggttttcgtttttagatattttgatttaattggtatggggtaagatttggatttgggattttttttaatgttttttatgtgatttgttgggtagttagatttggggattattagacggaagaaggattgttaaagttttcggagatgttatttgttaatgttaagagttttttgaggatatttggaattgttataatattgttaaatataggaaagagggaaaaggtagagtgtgattttaataataaaggatttcgttttttattgaaggaattggtggaaaggttttttttttgttgagtttgtaggttcgttttgtttgtttggggtgttcgggagacgcgggtttgtttcggagattgttgattgtcggttttgttagttaggtgttagttttgtttttgtcgaagagatttttttttttattttaaattaaatttttagagtattattaaagtattatttttttttttttattggtgtttttattttttgatgttatttgtttgaatattattattagtagttggagatttgtttttgagaaaaatataaatattatttaatttgtttgtttgtttcgtatttatttaaaatagaatgtttttgaagataagagagagagtaggagaatagacgttattttattatagtaatataaaagattggatttttaggggtaaattattaaaataggagatgagtttttttaatagaaatttgtttaaggtttgtgtttattaaatttagtggattttatttaagatgtattttgtttagtgggagttttgtttggttttgggatatgttaatttttagatttgttgtttttagaggtaatgattgttagatattattttatgagttttaatttttatattaagtataagaggtgtatattttttttttatgggggaaattgaggtacgaagaattaaagtgatttttttatagttggtgggaggtagacgggaaatttatattaggggtttttaattttagattttttttttaatttttaaattttattgttttgttcgagttttggttttaggagatttaaattaggtgtgtgtaaatgtttaatgttagagttggtaaggggaaagggtttagggagtcggtttatgacgatgagtttgtttgaagttttaacgcgggttgttcggtagtttgtatttttgtcgagttttttagttttttgttgggttattttttatagaggtagtttagtttttagtttagtgagtatggagtggagattgtttgaggggtgttgagtaaagttttgttttttataggatgaaggtgttttttagaagggatattggaaagtattttaaggcgagtcgaatttttaattgagggagttttgtggaaataagttcgtttagttttatttttggagacgtttttatttagtaggttcgagttgttttaaagagaaattaaagtggggatattaatggtatttaaagtgagatttattttattttttttttttaaaggaggttagattaagaaagtttaagttcggtttggtaattgggatttttttttttattttagtttagggtgaaggtggataagttattttgattttttaggtttttgagttgttgtttttgaatttagtgaatatttattgagtgtatagaatatgttagatattttgggttaaaggttgaagggggggtgagttttaagggtttttgtttttgtttttagattgtttttaaatttggaaag

SEQ ID NO: 373 - DNA, 6191 bp, Artificial Sequence
  chemically treated genomic DNA (Homo sapiens)
ttttttagatttgaaagtaatttggaagtaagagtagaaatttttaaaatttattttttttttaatttttagtttagaatatttagtatattttatgtatttagtaaatatttattgaatttagaaataatagtttagaagtttgaagggttaaagtgatttgtttatttttattttgggttggagtgagaagaaaggttttaattgttaggtcgggtttgggtttttttgatttgattttttttgaggagggagggtggggtagattttattttggatattattaatatttttattttggtttttttttaagatagttcggatttattgaatgggaacgtttttagaagtggggttgggcgggtttatttttataaagtttttttagttgggaattcgattcgttttggaatattttttagtgttttttttggagagtatttttattttgtaagaggtagggttttgtttagtattttttaagtagtttttattttatgtttattgaattgaggattaagttgtttttatggaaggtgatttaatagagggttgaggaattcggtaggaatgtagattgtcggatagttcgcgttgaagttttagataggtttatcgttatgagtcggttttttgggttttttttttttgttagttttgatattagatatttgtatatatttgatttggattttttgaaattagaattcggataaggtagtggagtttggaagttgagagagggatttggagttggaagtttttggtgtgaatttttcgtttgttttttattagttgtgggaaagttattttagtttttcgtattttagttttttttataggaggagagtgtgtattttttatgtttaatgtggggattaggatttatgaaatggtgtttggtagttattatttttaagagtagtaagtttagaagttagtatgttttagaattaaataaaatttttattaaataaagtgtattttgaataaaatttattgaatttgatagatataggttttaaataaatttttgttaaaagagtttattttttattttaataatttgtttttgaaaatttagttttttatgttattgtaatggaatagcgtttgtttttttatttttttttttgtttttaggagtattttgttttgagtgaatgcgggataaataggtaaattaagtggtatttatattttttttaggaataaatttttaattattaatagtggtgtttaaataagtaatattaaagaatgagaatattaatggagggagaaaagtgatgttttggtggtgttttgagggtttaatttaaaataaagagaagagttttttcggtagagatagggttgatatttgattaataggatcggtagttagtagttttcggagtaggttcgcgtttttcgggtattttaggtaggtaggacgggtttgtaggtttagtagagaagaaatttttttattagtttttttaatgaaaagcggaattttttattattggaattatattttatttttttttttttttttatatttggtaatattgtaataattttagatgtttttaaagagtttttagtattggtaagtaatattttcggagattttaataatttttttttcgtttagtgatttttaaatttggttgtttaatagattatatgaagagtattaaaaaaaattttaagtttaggttttgttttatgttaattaaattagaatgtttgggggcgggagttagatattggtttttgttttgatttttttttttttaattttaggtaattttaatgtgtagtaaggtttgggaattattgttttatgttttgttttttttttaacgatcgcgttgggtattaaattttaattttttaagttaatgatattaatagtaagtacgggtttggtttttggaattcgcgtagtttaaggttggaattgtgtaattaaattttttaaggtatgttttttttgttaagtgggtttatggtcggtagttacgaagttagattcgtttatgttttgtttgtatatttggtatatttgaattagggatagtaattcggtgtgtgtgtgtgtgtgtgtgtgtgtgtgtgtgtaagataggtttaatattttggttggtttaaattttttaaatagtaaaaagagatatttaagaaagaaagttttcgggttttgaggagaagtttgttgtgagttttattttgaaatattatggtgttggttaggatgagttttgttttcggggttttcgtttaagagtttcgcgatttttttttgtagtggtcggatagtcgcgtttcgttttatcgcgaagtttaggcgcgatcgaagggttgtaggtggagtagattcggacgttttcgcgaggcggttatcgaaggagagtttggggttttcggcgcgggcgtttaggagggagttggggttttcgggaggtggggggtatttttggataggtaagacgagggcgtatcgggcgaggcgagcggtcggggtttgcgtttaaggggcgggtcggattttatttgttttttgttaacgaggaaattaatcgtcgttagtattattttttttcgggagtcgtaggtggtggtagacgagtttttttagtttttaggtcgaggttgcgattttatattggggaacgaggatcgcggggatttggagaggggtcggggttaggttggcgggcgtcggttttagtttgagatttgcgcggagggcggaggcggggaggtttttttagaaagtcgtttgtttcgcggggttcgaggggaggttgtatttttgggttttttttttagtttttttaaatagtgtagtttcggcgggtgggtagcgttcgtttttcgggtgcgcgttaggatttcgtcgcgttttgggaagatagcgcggggcgtacgtgcgggatttcggttttaggcgtttattagtattcggttttcgtttattgacgtcgattttgcgtagttgggcggggaaagtgagggaagaaagttgggagcggttcggggcgtcggaggtttcggcggtcgtttttcgtttggtttgtagttcggtgttttacgcgttttttttttcgttcgttttagattttttcggtcgaagaacgaaacgtttcgtttttttcgcggtttcggtcggcggcgtagttgattttaaggaaataggaaaggacgggcgggggcgcgggcgtcgagtcggtgcgtcggtgcgcggttgggcgggttgcggggttcggggcgcgattcgggggcggcgcgggagtcggcgagatacgtttttatttttttttttttttagagttcgattcgtcgggtagagcgtagttagtagcgttaggagcgttgtttcggtcgtttcggagggtcgtatcgttgtttttcgaagagttcgtttcggttttttcgattaatattggacggagttagggggtcgtgcgcggtggttgtggcgttggcggcgaggcggggattcgggcggacgtcgacgaggtggtttgtcgttcggtttgggcggcggcggtcgtcggggttagttcgggatttcggtcgtttcggtcgcgtcgggcgtttatatcgtgcggggggcggaggttgttgcggtcgcgttgcgtcgggggttgttcggacgtttagttcgcgcgggtcgaggcgcggggaggtagggcgggaggaggagggattaggcggcggaggagggatcgggaggagtagaggaggaggagaatgcgaggaggagggaggagaattagtagcggggatttaaggttagcggtcgtcggaggcggtggatagcggtggttttcgcgggatttagttttcggcgggagtggggcggcgtatgggaggggagcgggtgttttgaggagttaattttcgagaggggcgtttttagtattgtttttttggattcggttttcgcggatttgtaggtttagtttatgtttaggtcgagttaaatttgtgttagggtttttttttttttttttttttttttgttttataaagtaaatttgtattagttttagatagattggtcgagttttagagttagcgtcggataatggtatcgacggggaaattgtttttttattcgggtttttattttttttgtagtattacgggattttttcggggattagaggttggtttggtagttgaggaggtcgtcgtgttcgcgcggtaggggtgttaggcgttcgaggtggtgttttaaagttcgagggttttttagattttgttaagtattttcgaaattatttgaaatgagggtatttaatttcgggtgtagagataggtttttttaatgtttattgtaattagttatgggtattttgaagttaatgtgtgaagtatattatttcgtaaaagtgaagtttttggaataaaggtttgatataaatagtcgtggaggtgtttttagagaggttaagtgttttattgtttttgtagttttcgtaggagaaatgttagggaaattcgcggaagttttggttaaaagaaattgagtttttttgggttgtaggaatttgagttatatttttttggtaagtttattttatttttattgtttttttttttgtagtaaaaatgttttttaggtttatgttatagttagattttttttttttttacgagatttattaggatttttaggtttggtttaataattttgatttttcggttttgttaaaaattataattttgaagtaagtgaagttatagatttgttttttgttgtttttgaaggggagtaattttatattttttttttttatttagtaaaatgtttgtgtttgggtttcgtattttgtagtttgaacggtggggttttttattagggtaagcgtagatagatataggtttgtttattgttcgtataatttggaatttttttgtgaattaggagaagtaatttgtttttttgttttaataaattagtatagttattgtgcgttgaagttatgttttgaatgtagaggttatgaaggttttgtaggtatgtgtgtgttttttgtatatttgggttgagagtagttcgtagaaatatagaaaataaaattagagaaaggtaaatgggaagtataatagtggaatataaaatgaagataggagtgagttttataataaaagatttgaatataataaagttttgtgtatttatttaataagggttgtaaatttggttttaaattatattttttgttaagggaatgtgatttgtgtgtataagttataatataaattaatttaagttataattgatttgtaagattgtataggaatttttttgagtgtttaaaaagatagtatgtaagaatattagtttttattacgttaggattatatgagataatagtttttatagtacggtttgtatattttttaatgtgatttgatagtattataagaaatagagttttttgtaaagaattattagatatatatatagtataatattgggatggattttagggaatagagaagaatgggtttgttgaatatttttatgggatatttatgtaaagtttgagttttttttttgagtttttgatataaaagttgatatttacgttgattttgtagtttttggttagtatttggagtgtgttgataattgtgttatttggtaagtaaaaaattgtatggtcgagtaggtattaatgaagtttttttaagagagataagtagtttggtatagttagggttttgtatagttagggttttagtttatagtttttgtggagggtggttttagattatggttcggatagaggttgggtgtgtgtgttattattataggaatgataatagtggtttagttgttgtgttaagtattggttagattaagtttatttgataatttgtgagttggttaatatttgtatttgttttttatagtaatgtgatgttgtggtcgggagaagtgattaggatattaaggtatatttgttagtatgagaggttaattttgaatttaaggtagagtcgtgttttattttttttgtttagtaacgttttaaaatttgagataaatggtgatgttaggatttaaaattttattttataatgttttggaaatttgttagggtgagtaatattaaaatttttgtttggttaaaaaaattatagataaagtttttatgtatgttatattagtaagtatgtattaa

SEQ ID NO: 374 - DNA, 6171 bp, Artificial Sequence
  chemically treated genomic DNA (Homo sapiens)
tttagttatattggtcgttttgatgttttttgaatatggtaggtattattttattttagggtttttgaattggtatttttttttgtttggtatgtttttttcgtagatattaaggtttttttcgtttttatcgtgaggttttaatttaagagttattttttttatgtttaagattttaattatttttaatattcgatttttatttgttttattttattatttttttttagtatttgtttattatgttaattttatttatttattttgtttatatagtttgtttttttagtttgggtttttttttttttttttttgagatagagtttcgttttgttatttatgttggagtgtatggtgtaattttggtttattgtaattttcgttttttgggtttaagtaatttttttgttttagttttttaagtaattgggattataggcgtacgtcgttatatttagttaatttttttgtattttagtagagatggggttttatcgtgatgtttaggttggttttgaatttttgagtttaggtaatttatttattttagttttttaaagtgttaggattattggtgttagttatcgtgtttagtttttttaatttttaataaatgttagttttataagtataaatatttcgttttgtttcgttttttgttatattttagtatttagaagagtgtttggtatttataaggggtttagtaaaggttggttgtaggaatagttttaattaattagtttttatattttttttttttttttatgtgatttttatattggtgttttaaattattttttttttatttatttatgggataaatttttattgagtatttgttgtttatttggtatatttttagttgttggagatatagcggtgaatgagtagataaaaattgagtttttatgggatttatattttaatgaggagagatagataataaataagtaatttatatagtgtgttagatagtgataaagggtaacgggataaattagggatttggtttgagttttgttgggtgtgtagttttagatggttagggaggggttgattttttttgtttttataagtagtattgttaggaattttttttttatatatgtgtttttgtatagtatattttaagtattatggtgtgataattaatttttaatgaaataatattatttaggtataataaaattaaattatttttagaaatattttttacgtttgtgtttttaagagagtgtattatatatattatagtggttgttttttgggttttttttttttagaaaaagggatttcgttatattgtttaggttggtttggaatttttgggtttaagttatttttttattttagtttttcgagtagttgggattataagtgtatatttttgtgtttagttatatattatagttttgtgaatatatttttttaatgtaataatatagtttttatttatatatataattagtatttttagaaatagtttttatatttatgtttttatagagtatattacgtattttagttttgtgaatatatttttttgaaaaggaggaaaatttttatttatatataaattggtatttttagaaatattttttatatatgtatttttttatattgtattttatatattatagtgtggtaaatattttttgggggttggtatttgaatagagtgttgaaaggaattatgtagagatttgggggtggtgtttaaggtataaagaatagttaatgtaaaggttttgaggttggtttatgtttgttatgtttgaggagttgtgtggtggaattagtgtggttggagtatagtaagggggtgggaaggtataggcggtaatgttagaaaggttatttgttttattattaatttatagttaatatttatttatattggaagggattttagttttgattttttattttataaatgaagaaaaaggtatagagaggaagtggttaaattatttatttaaggttatatagttgttgggattggggggtgggtgggtgttgagagaaggtgaggaatgaagattgttttgtaggtagagggaatagtaagaataaaagtttggaggtgagaattaatttggtttttaaggattgaggttttacgtggggtgggatgagatttaagaggggagttttaaaaattattttgtgttttgagtattttttgggttatttttgagtaaggaatttaatttttttatggtttaatttttttattatttattttatggggttgtggtgaggattaaaggaatttatttatatgaaatattttgtttgatatacggtaggtgtttaataaacgttagtttttattggtattattattattattggcgttaatgtatttatttattgtagtgaggtagaacgtttttgtggttacgagtgtgattaggttgatttattattaagaggtggaggatagggaaggtcgtatagtgttttattataaggaaaagaggattagtacgtttttttttgggaagggaaaaaaaaagagaaggaaattgaaagtatacggtcgatttttttttaattataaagtattggatttacgggagggtatgcgggggattgtgtaagtatataggggtgtgggggaggaaggttaatgaatagatttattgtaaagggaggggtgatgaggtttatcgtttgaggggaaggggagtagaaaattttatagatttttgtattatagtgagaggagagaaaagttattatatagattgatttaaagtagagagggaaaaggttatggattgagttattgaaaatagggagatgtaaagtattaaattaatttattattaaaaaggagagaattttaagcgttagagcgatagtttacgaaaaagaggagatagggtaatggattgatagttaaagggacgtgaatttaaatatgaagattgatttattataaaatggtggtggtggtggtggggggggggggtggttttgaaaaaagttatggattgatgtattgggggattggaggaggtaggaatataaatttaggtagatttattgttaaagagggatgcggaggagtgcggcgttacggattgattcgttacgatgtataggaagggtggaataaataaggttacggacgggttttttgaaagttgaggttaggagaaatttaaatatttagatatatttattattaagggggttgaatattgttataggttagttttttataagtgggggtgggtggggggcgggtgggggtaggggtagggggaaagtttatggacgagtttattttaagttggcgtggggaaaaatataagtacgtagatcgatttattatataacgggagggggaggttaggttacggttagatttattataagggacgaagggtttgagtaatgttatacgtaggtttattagtcgtggtggtggcggcggggagtcgaatattagtaggttatcggttaagttatattttttgcgcgggggcgggaaggatacgtggggttacggattgggttttttattttttaggtttagagtttatttgtgtgtagcgtggcggtggcgttggtaatgttggtagtttcggggggcgggggttttatacgcggttttatcgttttttaggtttgggtttcgaggcggcggtggaggtggtggtggcggtggcggcggtagtatttagaagtcgtttttgcgtttttttatagtttacgtgggttcgaggaggaggagtttaatgtttcgtcgttcgttgattggttaaagcgttattaatcggtcgtaaggtttcgaggggttgggggacgggtttttttttatagagttgtgtcgtgattggcgtaaggggaaatgatggaacgtttacggtttttggagtttcgaggaggcgcgttcggtttttacggtgttttacgtcgattggtttaaggattgacggattgtgagtaattgaaaaggttcggggtttgtgtcgggggggcgggggtttgttttatattgattggtttatatgggattgatggaagatagtttttaaggacgggggtgggtggttttgtttttttttgattggcggacgagggatttttagatttttgttaaaatattaagggggcggtgtcgtacgttatgttgtttagcggaagtagggtttgtatagaaatgggcgtagtagtcggcgggagtgggtcggattgggtttcgcgtaggcgggtagggtagttttacggttagataagattatagagttgggtaaagacgaatttagaatatagcggaggtaggagggtaggatggttgttaggtatacgaaagagtattgagtggtagaaacgaaatgtttttagagggtagggttgaattgcggttagagttaaaaaggggaggaatttggttttgtattgattggcggtggttggatttaatttagaataggggttcgattagggagagcgggatttaggtttgtgtttattggaagttggaatatttataagtaggggttaagataaggtagggttgagttagggtttgggtgtaatttggggtatttggggaatgattgggtgtgtgaaagcgtaaattttagggttttttgattgttgtgggaatgaataaatttttattatgaattggtttattttttatggtaatttaaagggtggcgtttaggaaaaggaatggaagaaagggtgaggtggggggtttaggttgttaagatgatagaagagagggtagtgtataaggttaattggtaaatattgttaggtaataggttggaggtaggattgttggggtattttggaggttttatagagagattggatttttgggttttttagtaattttgtgttttaggaataggttttcgtggtaattagtagggtttatggggaaaaagaagggttatgtgatttaaaggtatttaggttttttaatgtttgaggatggggggaagaagttaatggtgaggtttttttgggaaattttgtaggttttgtagttttttaagtttttgaaaaagaggatagaagagattgaataaagattgggtttgggttacgtttttaggtttgttttgattttttttttttgattttagtttagagggaaagatggttttttttttttttcgtttttttttttttttaggttattattttaaatatagagtttggtagtggggtgagttgtttttatttttagtaatatgtggatatgggttttgatatttatggagtttttggtgaggttgttgttgagtttagagaaaagaaataagaaagggtaaaatgggttttatatgattatgatgatttttttttattattttaagatttatttatattttggatgatttttatttggtttatttttatgtggaaatgttaagttattatttggtttttattgatttaaagattattaaatgtttattgtatgttaggtaattttaggtattgggagatagtagtaaatataataaataaaattttcggtttgatggattttaaatttttgtaaagaaagatataataaaaaattaatggaataaaagttatgtgttagatggttttaattataataataaaaattaaaaatgagagataataaggagtataggagtggggggttgtaattttaaagagggtttagggatggttttacggagaagtatttgagtaaagatttaaagatagtgaattttgagtagtgtggttatatggaggatgtgttttatatataaggggtagtaaatataaaggtattgaggtgggagtgtgtttggtatgtttgaggtgtagtaaagaggttattttggttggagaagaataagtgaagggggaatgtaagaggtgaggttagagaggtaatgagggagataaattgtgtgaagtttataaggttatggtaaggattttggttttgattttaagtgagatgggagttaagggaaggttgtagtagaggaaggaggttgaattatatgaattagttagttgattttttttttttaagttagtttggattagatttcgtttaaaagaattttaattgatataaagggttaaggaaggttttttttaagaatgaagaatgagaaggaatcgaagaatgtttaatggttaagtagtaggaaggttttttttataaaa

SEQ ID NO: 375 - DNA, 6171 bp, Artificial Sequence
  chemically treated genomic DNA (Homo sapiens)
ttttgtggaaaaggtttttttattgtttaattattaggtatttttcgatttttttttattttttatttttgagaaaggttttttttgattttttatattaattaggatttttttgggcgagatttgatttaaattggtttagagaaaaggagttaattgattggtttatgtaatttaattttttttttttgttgtaatttttttttggtttttattttatttaaggttaaagttagggtttttattatggttttgtaggttttatatagtttgttttttttattatttttttgattttattttttatattttttttttatttatttttttttagttagagtggtttttttgttgtattttaaatatgttaggtatatttttattttagtgtttttgtgtttgttgttttttgtgtgtggaatatattttttatatagttatattatttaaaatttattgtttttaagtttttatttaaatgttttttcgtgaagttatttttgagttttttttaaaattgtagttttttatttttgtattttttattgttttttatttttaatttttgttattgtagttagaattatttgatatatagtttttattttattggttttttgttatgtttttttttataagaatttgaagtttattaggtcgggagttttgtttgttgtgtttgttgttattttttagtgtttaaaattgtttggtatatagtaggtatttaataatttttgaattagtgaaaattagatggtggtttggtatttttatataggaatgagttaggtggaaattatttaggatataagtagattttgaagtgataaggaagggttattataattatgtggggtttattttgtttttttttgttttttttttttaggtttagtaatagttttattaaggattttatgaatattaaagtttatatttatatgttgttagaggtgagagtagtttattttattattagattttgtgtttagggtggtgatttgaagaaggaagagagcgaaagaagggaaggattatttttttttttaaattggagttaagggagggaggttagagtaagtttgggggcgtaatttagatttagtttttgtttaattttttttgtttttttttttaggggtttagagaattataaggtttgtagaattttttagagaagttttattattgattttttttttttatttttagatattaaagagtttgaatgtttttgagttatatggtttttttttttttttataaattttgttagttgttacgggggtttgtttttagggtataaagttattgagagatttagagatttagtttttttgtggaatttttaaaatgttttagtagttttgtttttagtttgttgtttggtagtatttgttagttgattttatgtattgtttttttttttgttattttggtaatttgggttttttattttatttttttttttatttttttttttagacgttattttttgaattgttatagagaatgggttaatttatggtggaggtttgtttatttttataataattaaagggttttaaggtttacgtttttatatatttaattattttttaggtattttaaattatatttaaattttaatttagttttattttgttttagtttttgtttgtaagtgttttagtttttaatgggtatagatttggatttcgttttttttagtcgggtttttattttaggttgagtttagttatcgttaattaatgtagagttaggttttttttttttttaattttggtcgtagtttaattttgttttttgaaagtatttcgtttttgttatttaatgttttttcgtgtgtttgatagttattttgtttttttattttcgttgtgttttaaattcgtttttatttagttttatggttttgtttaatcgtagagttgttttgttcgtttacgcggagtttagttcgatttattttcgtcggttgttacgtttatttttatataagttttgttttcgttgagtagtatggcgtgcgatatcgtttttttggtgttttggtaggggtttagaagtttttcgttcgttaattagagaaaaatagggttatttattttcgtttttgggggttgttttttattaattttatgtaagttaattagtgtgaggtagattttcgttttttcgatataggtttcgagtttttttagttgtttatagttcgttagtttttgagttaatcggcgtggagtatcgtgaaggtcgaacgcgttttttcgggattttaggggtcgtgagcgttttattatttttttttacgttaattacggtatagttttgtagggaagggttcgttttttaatttttcgaggttttgcggtcgattaatagcgttttggttaattagcgagcggcgggatattgggtttttttttttcgggtttacgtgagttgtagggaaacgtaggggcggtttttaggtgttgtcgtcgttatcgttattattatttttatcgtcgtttcggaatttaggtttggggggcggtggggtcgcgtatggagttttcgtttttcggagttgttaatattgttaacgttatcgttacgttatatataggtgagttttgggtttggagggtggagggtttagttcgtgattttacgtatttttttcgttttcgcgtagaggatgtggtttggtcggtggtttgttggtgttcgatttttcgtcgttattattacggttggtggatttgcgtgtggtattgtttaagtttttcgttttttatagtggatttgatcgtggtttaatttttttttttcgttgtataatggatcggtttgcgtgtttatgtttttttttacgttaatttagggtggattcgtttataggttttttttttatttttatttttattcgttttttatttatttttatttatagggagttagtttgtgatagtgtttagtttttttaatagtaggtgtatttgagtgtttggattttttttagttttaatttttaggagattcgttcgtggttttatttattttattttttttgtatatcgtagcgaattaattcgtggcgtcgtattttttcgtatttttttttaatagtgagtttatttgagtttgtatttttgttttttttagttttttaatgtattagtttatggttttttttaaaattattttttttttttattattattattattattttatagtggattagtttttatgtttggatttacgtttttttagttattagtttattgttttgttttttttttttcgtagattgtcgttttagcgtttggggtttttttttttttaatagtgggttagtttagtgttttatatttttttatttttagtagtttagtttatagttttttttttttttgttttgaattagtttgtgtgatggtttttttttttttttattgtggtgtaggagtttgtaaggttttttgttttttttttttttagacgatgagttttattatttttttttttgtagtggatttgtttattggttttttttttttatatttttgtatgtttgtatagtttttcgtatattttttcgtgagtttagtgttttgtaattgggggaagatcggtcgtgtatttttaatttttttttttttttttttttttttttagaagagaacgtgttgatttttttttttttgtgatggagtattgtacggttttttttgttttttattttttaatagtgggttagtttggttatattcgtaattataaagacgttttgttttattataataagtgaatatattagcgttagtgatgatagtaatgttaataggagttagcgtttattgagtatttgtcgtatattaggtagagtgttttatatgaatgagtttttttaatttttattataattttatgagataggtagtgagggaattgggttatagggaggttaaattttttatttaaaggtggtttaggaagtatttaggatataggataatttttgaggttttttttttagattttattttattttacgtgaggttttagtttttaaaaattaaattagtttttatttttaagtttttgtttttgttgttttttttgtttgtagagtagtttttattttttatttttttttagtatttatttattttttaattttagtagttgtgtgattttagatgagtgatttaattattttttttttgtgtttttttttttatttgtgaaatgggggattagaattagaattttttttagtgtaaataaatattaattgtgaattaatggtaaaataagtaatttttttagtattatcgtttatatttttttatttttttattgtgttttaattatattggttttattatatagttttttaaatatagtaggtatgggttagttttagggtttttgtattggttgttttttgtgttttgaatattatttttagatttttgtatggttttttttagtattttgtttaaatattaatttttaaaggatgtttattatattgtggtgtgtggaatgtagtataaaaagatatatgtatgaaagatgtttttaagaatgttagtttatatatgagtaagggttttttttttttttaaaaggatgtgtttataagattgaggtacgtaatatgttttgtaaaggtataggtataaaagttgtttttaagagtgttagttgtatatgtgaataaggattgtgttgttgtattgaaagaatgtgtttataaaattgtggtgtgtagttgggtataggggtgtgtatttatagttttagttattcgggaggttgaggtgggaggatagtttgagtttaggagttttaggttagtttgggtaatatagcgagatttttttttttgaaaaaaaaaaatttaaaaaataattattgtggtgtgtgtaatatatttttttaaaggtataggcgtaaaagatgtttttaagagtgatttgattttgttgtatttgggtagtgttattttattaaaggttgattgttatattatggtatttagaatatattatataaaggtatatgtataaaaaagaagtttttaataatgttatttgtaaaaataaaaaaagttaatttttttttgattatttgaagttgtatatttagtagggtttaagttaggtttttgatttgtttcgttgttttttattattgtttgatatattgtgtgggttatttgtttgttgtttgtttttttttattagaatgtgagttttatgaggatttagtttttgtttgtttatttatcgttatgtttttagtaattgaaaatgtattaggtaaatagtagatgtttaataagaatttattttatgaataaatgggaaaaagataatttgagatattagtgtaggggttatatgaggaagaagaagggatatgagagttaattagttgggattgtttttgtaattaatttttattgagttttttgtgagtattaggtatttttttaggtgttggaatatggtaaggaacgaaatagggcgaaatatttgtgtttgtggagttgatatttattaaaagttggggaggttgggtacggtggttaatattagtaattttagtattttgggaggttgaggtgggtggattgtttgagtttaggagtttaagattagtttgggtattacggtgaaattttatttttattaaaatataaaaaaattagttgggtgtggcggcgtgcgtttgtaattttagttatttgggaggttgaggtaggagaattgtttgaatttaggaggcggaggttgtagtgagttaagattgtattatgtattttagtatgggtgatagagcgagattttgttttaaaaaaaaaaaaaaaaaaatttaagttggggagatagattatgtgaataaaataaataagtaaaattagtataatagataaatgttgagaagaaataatgaaatagggtaggtaggaatcgagtattgggggtggttgaaattttaggtatagggaaggtgatttttgaattagggttttacggtagagacggagagagttttaatgtttacgggaagagtatattaggtagaaggaagtgttagtttagaggttttgaggtgggatggtgtttgttatgtttaaggaatattaaggcggttagtgtggttgga

SEQ ID NO: 376 - DNA, 6249 bp, Artificial Sequence
  chemically treated genomic DNA (Homo sapiens)
aatgataatatttgttttttttggagttttggggatttagtgttttgaggaacgtggttgtaggttagagtggtatagagtagggtttaatgaagtatggcgtttatagtagtttttttgattggattaattttttcggatataatagtagggtaggggtggggtttggggagaaaggatatttttaattttgattttaatatttcgatggtttttaaggttgtttgtatatttatttaggtgtaagttttttaaggtgtggtgtgatgaattagtgatttttggagttaggttagcgtatttttttttcgtagggttgtaagttgtaggattgagaggtaggttgattaggttttgggttggatgatggggtgagagtaaggggttagttttgatatatgtttaatttttttttttagttttaagatattttgggtaaattgtttattttagtttttttgatttttattttaattttaatattagtttaagagaaaatagggatattgatggttatttagaagggttgttgtgttttatatatagtaatatttttcgaatgtttgtgatagcggtttaaggaataagttaattttatattattattttggatatttgtataaaattttattttatttttattatatgaatgtgttagggttgtttttttgttttgttttttttttttttttttgagatagagtttcgtttttgttgtttaggttggagtataatggcgcgattttggtttatcgtaattttcgttttttaggtttaagcgatttatttgttttagttttttcgagtagttgggattataggtatgcgttattatgttcggttaattttgtgtttttagtagagatagggtttttttatgttggttaggttggtattaaattttcgattttaggtgatttatttgttttggttttttaaagtgttgtaattataggtatgagttatcgtatttagtcgtgttagggtttttttttgtttaattttttttttttttttgtttttttttttttttttaatggagttttattttgttatttaggttggagtgtagtggtaagattttagtttattgtaatttttgttttttgagtttaagtaatttttttgttttagtttttcgagtagttgggattataggtgtttgttattatatttagttaatttttgtatttttagtagagatggggttttgttatgttggttaggttggtttcgaatttttgatttcgtgatttgtttgttttggttttttaaagtgttgggattataggtatgagtcgttatattcggttaattttgtattatttttttaaagagagttttttaaattatataagttttaggttttataaaatttagatttgttttagtataattaaatttgggattatttattgagtaattattatgtgttaagtattgcgttgagtgtttttagagtattattttttttaattttagtatagtatgttagatgttgttttatagatgagttaattgagattagagatgtttagttatttgtttaaggtgatatgattgatatggaatagagttaagatttttttttttttttttgatacggagttttattttgttttttaggttggagtgtagaggcgtaattttagtttattgtaagttttgttttttaggtttacgttatttttttgttttagttttttgagtagttgggattataggtattcgttattatatttggttaattttttgtatttttagtagagatagggttttatcgtgttagttaggatggtttcgattttttgatttcgtgatttgtttgtttcggttttttaaagtgttggaattataggtgtgagttatcgcgattggttagatttaagatttgaatttaggtttttttggttttagaggtttttgttttttaattttttaggatggtatagtaatttgttttataagaggtgtttgttttaagtgtgtttagtatatggaagtaagtttagaaatgtaagtgtatatttgtaaagaggtgtgggagatgggggggagggaagagagaaagagatgttggtgttttttattttttagtttttgataggtgtttttgatttttttttgattagtatagttgtatttttggttggggtattttaattagaattgttaaatttagtatataaaaataaggaggtttagttaaatttgaattttagataaataatgaataatttgttagtataaatatgttttatgtaatattttgttgaaattaaaaaaaaaaaaaaaagttttttttttatttttatttttattattaggtttaaggaatagggttaggggttttaaatagaatgtggttgagaagtggaattaagtaggttaatagaaggtaaggggtaaagaagaaattttgaatgtattgggtgttgggtgtttttttaaataagtaagaagggtgtattttgaagaattgagatagaagtttttttgggttgggtgtagttgttcgtggttgtaattttagtattttgggaggttgaggcgggaggattatttgaggttgggagtttaagattagttttattaacgtggagaaattttgtttttattaaaaatataaaaaattagttggttatggtggtatatgtttgtaattttagttgttcgggaggttgaggtaggagaattatttgaattagggaggtagaggttgtggtgagtagagatcgcgttattgttttttagtttgggtaataagagtaaaagttcgtttaaaaaaaaaaaaaagttttttcgatgtgattgtttttttttaaatttgtagatttttttaagattatgttttttagatattttaaagattttagaagatatgtttcgggggttttggaagttataaggtaaatataatatatttttttttttgattattaattttattagaggatgtggtgggaaaattattatttgatattaaaataaataggtttgggatggagtaggatgtaagttttttaggaaagtttaagataaaatttgagatttaaaagggtgttaagagtggtagtttagggaatttatttcggatttcgggggagggggtagagttattagtttttgtatttagggatttttcgaggaaaagtgtgagaacggttgtaggtaatttaggcgtttcggcgttaggagggacgtatttaggtttgcgcgaagagagggagaaagtgaagttgggagttgttatttttagatttgttggaatgtagttggagggggcgagttgggagcgcgtttgtttttaattataggagaaggaggaggtggaggaggagggttgtttgaggaagtataagaatgaagttgtgaagttgagatttttttttattgggatcggagaaattaggggagtttttcgggtagtcgcgcgtttttttttacggggttttttattgcgtcgcgcgttcggtttttatttttcgtagtatttcgcgtttcgcgtttttttagtcgggtttagtcggagttatggggtcggagtcgtagtgagtattatggagttggcggttttgtgtcgttgggggttttttttcgtttttttgtttttcggagtcgcgagtatttaaggtgggtttggtgtggggaggggacggagtagcggcgggattttgttttgtggatgtttcgtcgaggtttcgcggtcggcggggttagaggggttcggacgagtttttttatttcgaagttgtggatagtcgagacgtttagggtagtcgggttttggggttttcgggcgggagggggtagttatacggtagcggttcgagatggtttatttaagagattggcgttttttaggtttcgaggggtttcgggaatttgttaaagaagttttttgaaattgtttagaaagttttttcgtaaagggtgtattgcgtagagcgcgcgcgcgcgttttttttttttttgagtttttttaagtttttttaaagtttttttagttggtagttttcgttttcggattggtttgggttggattttttgggggggttttttgttttgttttttttttagttttttttcgtttttttttagacgattttggtttggttgtttttgtttttggcggggtcgggtgtgtgtgtgtgtggtggagtggagggtggtatagtaatttgttttaattagagtcggggaggaaagggtggttcggagggtggttttttgttggggtttgggttgggggcgggggagacgtttgttttgaatagatttttggggttagtttagggattgtgttttgtgatttttggagcgcgtggattatggaggggtgggggtgggttttttggggtgtaaagtgggagagtttttagagaaggaagttaagaaataaggttagatgggagtttagggagggttgcgttgttttgttgttttttttttggtgttgtgcgtggggaagggtgagtgggggtagtgtgtattttgatttatttgtttatttgtgtgtattaattataaaagttaatatatagtttgggttaggtatattttgttaggaattgtttgtggtgttttgtatgtatttttttttaattttagaatatttttatagtggaagttttgttagtattttggattgagtagtagtttagaggttgagtagtagttagtaagtggtggggttaagatgggattttaggtagtgcgatttttaattatgtattcgaaatcgttatatggatgagtgtatttggagtaatgagggatattgttttttgagttattgggttgtaggggagataaaatgaaagtgttttgggagtcgtgggtggtttttataggttagagggtttggggagggagtgggtgttatcgtggttgtgtgttgttcgaggggttttttgtgagtgagtgtatggtcgtgttatttttgtaggtttacgttagggtgttttttagttgtgtggtttttgtatttgtgtgtttgggttttgtgttgttaaatagtagtttttttgttgatttggggatataggttgaattttgttttttgtaggaatttttttaaggtgttgggttagatttgttataaatagagggaggtagttttttatggttacgtttttttgttgaggaagaaggttttttttttttagggagtatatttttgttttttttgttttttagataagtatttttattttttattttttgatgagaagggtgaggttatattgagttgttaggttgagttgttgtttttttttattttgggttgggagttgattagggaatggtagttgttgtagagttggatttgagggttgggttttttggatggggtttttttatgtttttattttttaatttgtattattgattgtgttgtgtaggagttagttaaaaagttattgtatagtttgggtaataaggtaaaattttgtataaaaaatataaaaattagttggatgtgattatacgtgtttgtagttttagttatttcggaggttgaggtaggaggattatttgagtttaggaagttgaggtttgtagtgagttgtgattgtaaatgttttttagtttgggtgatagtgtgagatttcgttttagaaaaaaagtatattatttagttgtttttagtatttagattttatttaaggggtgaggtttggggtaggaatgtgggggaaggggaggtttagggggagttttagaggggttaggatttttttgaaatttttttttagaggtatgggttttataaattgtagtaaatatatttttttaattttgtagaatttttttatattttaattttagtatgatttttttaatagttttttttttttattatatttggggaaagtatttattttatttgttaagaaaaaaataattgaaaagatagggattaaatgtaaaaagaaaaaatacgtggtattttaaagttaaatataaagtatgtttaattttttcgtggtttgggattatttatatttttgttgtatgaatttgttttgttttaatttttaagaaatgtacggtgtattttttatatgttaggtttttatttatgtttttatttaatttttgtgatagttttgtgaagtaggtgtatagatgagaaaatggaagtttagagaaatgaagtaatttatttaaggtttttagttatttagtaatgtttagggaatttttggattttgaagaggaggtattaagaggtggttagagttt

SEQ ID NO: 377 - DNA, 6249 bp, Artificial Sequence
  chemically treated genomic DNA (Homo sapiens)
agattttaattattttttaatgttttttttttagagtttaaaaattttttggatattattgggtagttgggagttttggataagttgttttatttttttgaatttttatttttttatttgtgtatttattttataggattgttatagagattaaatgaaagtatggataaaaatttagtatataggaagtatatcgtatattttttaaaagttaagataagataggtttatatagtaggaatatgggtaattttaaattacgagaaaattaaatatgttttgtgtttgattttggaatgttacgtattttttttttttatatttgatttttatttttttaattgttttttttttgataaataaaatgagtattttttttaagtatagtaaagagaggaggttgttggaagaattatattggaattaaaatatgaaggagttttgtaagattaaaaggatgtatttgttgtaatttgtaaaatttatatttttaagaaaggattttagaaaaattttgatttttttggggttttttttaggttttttttttttttatatttttgttttagattttattttttgggtaaaatttgggtgttggaggtagttgggtggtatattttttttttgaaacggagttttatattgttatttaggttggagagtatttgtaattatagtttattgtaagttttaattttttgggtttaggtgatttttttgttttagttttcggagtagttgggattataggtacgtgtaattatatttaattaatttttgtattttttgtatagagttttgttttgttgtttaggttgtgtaatgattttttaattaatttttgtataatataattaatagtgtaggttgaggggtgaggatatgaggaggttttatttagagaatttagtttttaaatttagttttgtagtaattgttattttttgattaatttttagtttaaggtgaggaagggtagtagtttagtttgatagtttagtatggttttattttttttattagaagatgagaggtgaagatgtttgtttgggaaatagggagggtaaggatgtattttttggaagagaggaatttttttttttagtaagaaggcgtggttatagaaggttatttttttttgtttatggtagatttggtttagtattttaagggagtttttgtagaggatagagtttagtttgtgtttttaagttagtagagagattgttgtttggtaatataaagtttagatatataaatataaagattatataattgaggaatattttggcgtagatttgtagagataatacggttatgtatttatttatagagggtttttcgggtaatatatagttacgatgatatttattttttttttagattttttgatttatggagattatttacgatttttagaatatttttattttgttttttttgtagtttagtgatttagggagtagtgttttttattgttttaggtgtatttatttatatagcgatttcgaatgtatggttgggggtcgtattgtttggggttttattttgattttattatttattagttgttatttaatttttggattgttatttagtttagaatgttggtagaatttttattataggggtgttttaggattaaaggagaatgtatgtaaaatattataaatagtttttggtagagtatatttggtttaggttatatgttagtttttatgattaatgtatataggtggatagatgggttaggatatatattgtttttatttatttttttttacgtatagtattaaggaaaaggtagtagaataacgtagttttttttaggtttttatttggttttattttttagtttttttttttgggaatttttttattttatattttaagaaatttatttttatttttttatggtttacgcgttttaaaagttatagagtatagtttttaagttggttttaagaatttgtttaaagtaaacgtttttttcgtttttaatttagattttagtaagaggttatttttcgggttattttttttttttcggttttggttgggataggttgttatgttattttttattttattatatatatatatattcgatttcgttagaagtaggagtaattaaattaaaatcgtttgaaggggagcggggaggggttggaggaggggtagggtagaggatttttttaaggaatttagtttaggttagttcggaggcggaggttgttaattggaaaggttttgagaaagtttgagggggtttaagaaggggggaaacgcgcgcgcgcgttttacgtaatatattttttgcgggaaaattttttgaataattttagagaatttttttgataagttttcggagtttttcggagtttggaaagcgttagttttttggatgggttatttcgagtcgttgtcgtgtaattgttttttttcgttcgagggttttagggttcggttgttttgagcgtttcgattgtttataatttcgggataggagagttcgttcgggtttttttggtttcgtcggtcgcgggatttcggcggggtatttatagggtagggtttcgtcgttgtttcgttttttttttatattagatttattttgggtgttcgcggtttcggggggtaagagggcgaggaggagtttttagcggtataaggtcgttagttttatggtgtttattgcggtttcggttttatggtttcggttggattcggttgggagggcgcggggcgcggggtgttgcgaggggtgggggtcgggcgcgcggcgtagtaaagggtttcgtgggaaggggcgcgcggttgttcggggggtttttttggttttttcggttttaatggaggggaattttagttttataattttatttttatatttttttaagtagttttttttttttatttttttttttttttgtgattgggagtaagcgcgtttttagttcgttttttttaattgtattttaataagtttgggagtggtaatttttagttttatttttttttttttttcgcgtaggtttgggtgcgttttttttagcgtcgggacgtttgggttgtttgtagtcgtttttatattttttttcggagaatttttaaatgtagaggttggtgattttgttttttttttcggagttcgggataaattttttaggttgttatttttaatatttttttaagttttaggttttattttaaatttttttggggagtttgtattttattttattttaagtttatttgttttaatattaaataatggtttttttattatattttttagtaaaattgatagttaaggagggggatgtgttgtgtttattttgtggtttttaggattttcggggtatattttttggaatttttgaagtatttgaaaagtatgattttaagagggtttataaatttgggaggagatagttatatcgaaaggatttttttttttttttaaacgaatttttgtttttgttgtttaggttggagagtaatggcgcgatttttgtttattataatttttgtttttttggtttaagtgatttttttgttttagtttttcgagtagttgggattataggtatgtgttattatgattagttaattttttgtatttttagtaaagatagggtttttttacgttggtgaggttggttttgaatttttaattttaggtgattttttcgttttagttttttaaagtgttggaattataattacgagtaattgtatttagtttaaaaagatttttattttaattttttaaaatgtattttttttgtttatttaaggaggtatttagtatttaatgtatttaaggttttttttttgttttttgttttttattagtttgtttaattttattttttaattatattttatttggagtttttgattttattttttaggtttagtggtaggggtggggatggaaggaagatttttttttttttttttaattttaataagatattgtatgggatatatttatattaataaattatttattgtttatttgaaatttaaatttaattgggtttttttatttttatgtgttaaatttggtagttttagttggaatgttttagttaagaatgtagttatattggttaagaagggattaaaggtatttattagggattggagaatgaaggatattagtatttttttttttttttttttttttttattttttatatttttttataggtatatatttgtatttttaaatttgtttttatgtgttgagtatatttaaagtaggtattttttgtgggataggttgttatgttattttagggagttgagaaataggggtttttgggattaagaggatttgggtttaaattttgaatttggttagtcgcggtggtttatatttgtaattttagtattttgggaggtcgaggtaggtagattacgaggttaggagatcgagattattttggttaatacggtgaaattttgtttttgttaaaaatataaaaaattagttaggtgtggtggcgggtgtttgtagttttagttatttaggaggttgaggtaggagaatggcgtgaatttgggaggtagagtttgtagtgagttgagattgcgtttttgtattttagtttgggagatagagtgagatttcgtgttaaaaaaaaaaaaaaaaattttgattttattttatattagttatgttattttgggtaagtgattgagtatttttggttttagttggtttatttgtaaaatagtatttgatatattatgttggggttaaaggagataatgttttggaagtatttagcgtaatatttggtatataataattgtttaataaatggttttagatttagttatattggggtagatttaggttttgtggggtttgaagtttatataatttgggaaattttttttaagaaagtaatataaagttggtcgagtatggcggtttatgtttgtaattttagtattttgggaggttaagataggtagattacgaggttaggagttcgagattagtttggttaatatgataaaattttatttttattaaaagtataaaaattaattaggtgtggtggtaggtatttgtaattttagttattcgggaggttgaggtaggagaattgtttgaatttagagggtagaggttgtagtgagttgagattttgttattgtattttagtttgggtgatagagtaagattttattgaaagaaagaaagagagtaagagagagaaaggaattgaatagaaaaagattttagtacggttgggtgcggtggtttatgtttgtaattgtagtattttgggaggttaaggtaggtggattatttgaggtcgggagtttggtattagtttgattaatatggagaaattttgtttttattaaaaatataaaattagtcgggtatggtggcgtatgtttgtaattttagttattcgggaaggttgaggtaggtgaatcgtttgaatttgggaagcggaggttgcggtgagttaagatcgcgttattgtattttagtttgggtaataagagcgaaattttgttttaaaaaaaaaaaaaaaaaataaaataaaaaaataattttagtatatttatatagtaaggataaggtggagttttgtataggtatttagagtgataatgtaaaattaatttattttttggatcgttgttataaatattcgagaaatattgttgtgtatggaatatagtagtttttttggatggttattaatatttttatttttttttgagttggtgttagggttagggtgaggattaggggaattgaggtaagtaatttgtttaggatgttttagggttagagagaaaagttgggtatgtattaaaattgattttttatttttattttattatttagtttaggatttggttaatttgttttttagttttgtagtttatagttttgcgggaagaggatgcgttgatttggttttaggagttattggtttattatattatattttggagggtttgtatttggatgagtgtgtaggtagttttagaggttatcgggatgttaggattagggttagaggtgttttttttttttaggttttatttttgttttgttgttgtgttcggaaaggttagtttagttaggaaagttattgtggacgttatgttttattggattttattttgtgttattttgatttatagttacgttttttagaatattgagtttttaagattttagaggaggtaggtgttattatt

SEQ ID NO: 378 - DNA, 6171 bp, Artificial Sequence
  chemically treated genomic DNA (Homo sapiens)
ttttttaatgtgggggagggtaggtaggagtggagatttttaagtagtattagtattgttgtttgatgggagtgtgaatttgaatatatgaagttttagttttagtagaatagtaagaaattttaagtaaggttaggtatggtttatatttgaaattttaataatttgggtaaattgaggtggaaggattgtagaggttaggagtttaagattagtttgggtaatatagttagatttttatttttattttcgtatttttatattatataaaaataataaagaaattttaggtaaggttagatggtaaggttaggtgtggtggtttatgtttgtaattttagtattttgggaggtcgaggtgggtggattgtttaaggttaggagtttaagattagtttggttaatatagtgaaatttcgtttttattaaaaatataaaaattagttaggtgttgtggtaggtatttgtaattttaattatttaggaggttgaggtaggagaatagtttgaatttaagaggtagaggttgtagtgagttaagatcgagttattgtattttagtttgggtattaaaagcgaaatttaggagaatgttttgaatttaggaggtagaggttgtagtgagttgagattacgttattgtattttagtttgggtgatagagcgagattttattttaaaaataaataaataaataaataaagtagttagatattttggtgtttatttgtagatttagttattagggaggttgaagtgggagaattatttgagtttgggaagttgaggttgttgtgagttatgattgtattattgtattttagtttgggtgatagagggagattttgttttaaaaaaaggaaaaaaagttaggtgtggtggtttatatttgtaattttagtattttgggaggttgaggtgggtggattatttgaggttaggaattagagattagtttggttattatagtgaaattttatttttattaaaaatataaaaaattagtcgggtttggtggcgtacgttttgtagttttagttatttggaagtttgaggtaggagaattatttgaatttagtagtgagttgagattaggttattgtattttagtttgggtgatagaaatagaataagatttcgtgttaaaaaaaaaaaagtaatagattagaaggttatgaggttaaataaaataatgttttgtttttgttttgagatggcgttttattttgtcgtttaagttggagtgtagtgatgtaattttagtttattgtaatttttatttttcgggtttaagcgatttttttgttttagttttttaagtagttgggattataggtgtttattattatgtttagttaatttttgtatttttagtagagacggtgttttattatgttgattaggttggtttcgaatttttgattttaagtgatttgttcgtttcggttttttaaagtgttgggattataggtatgagttatcgcgtttagtcgaatgttttgttttttaagatggaagatattttagtattttggtaggttgaagtaggtggattattttagtttgggtaataagagcgaaattttgttttaaaaaaaaaaaaaaagaaaagaaaaaaaaagagagaaagaaattttaggtaaaagtttgagttttattttttaattatttgattattttaattattgttattaggtggatgattttggagaggttatatatttttagttttgtaaaatggggagttatattgtttaaattatataatttttatgttaagtgatatattttttaaggtattaagtttgaggatatattttgtaaatgaaatgatatatggaaatgtttgtatatgttaatggttttgttgttgttattattattatgattattatatatatggtttggagaaagttaatttttttaaagcggagattttttagtagagaataggttttttaggttgtatattaatagggagtatgtttaaggaatgttagtcggtagtttttgttaggtgtgaggggtgaaatttttttttattaaggtttaattgttttcgaagtttttaggtttgaagttttggagaaaataattaggtttttcgggcgagatttcgaatattagtttaagggatttgaaatgtaaggtcgtttgggattttattgttacggatgggtattaggcggcgtcggtcggattcgtttcgggattagtagggttttgggtagtaattcgtagggagttcgatcgtttttggttaggttcgggtagttggtgggggaggttttagaggtttacgttattcgtggacgtagtttttagtgtttttttcgcgttttattttattgttttatttttttttttgcgagagtttggatttggaaggtatttgggagggtgtaagcgttttggtgtgtgtttatttgggtttttagaagagcggcgggaattgcggtcgttcggacggtgcggttagattttagtgtggaaggggaggtagttgtttttttaggcggtcgtggggggtagtagaggggacggcgataggtgcgggagtttttttcggggtagaagtggaaaggcgggtttcggggtttgtttttaggttggaaattattttcgttttttatttaaattttcgggagaggttcggtcggcgtcgggtttggaggaggaagcggttagagatagtgtaattttacgcggtttttgtggttcgggtttttgggttgggtggatgaattatggggtttcgagtttgggagaaattgaggtggtttggacgtgaggtaaaaaatatttttttttttaaaaatatatagagagaaatatttatattttgagagaaaatttattaagtgaattaatcggttaggggagttgagtgatttggttaatgggcgaggttaatttttagggggtagggttttggagagttttttatttttttatttattatttttttttggatttgggggttttcggaatttcgatttttttttggtttattttttgtagaaaaattagggtgagttttattttcgatttgtttcgttaagttgcgggatcgcggggcgtggtacgttcggggtaggcggttcgaggtttcgtaatttttattttagtttcgcgcgggagggggcgcggtcgtgatttatttttttttttttgcgttttttttttttttttttttttttttttatatatatatattttttttttgttattttttttcggatttcggtttcggtttcgattgtaatttgtaattttcgttgtcgtcgtcgtagtagttattaattcgttagcggtttaggtggtttttgtttcgatgttttagtttaggggttttcgggtcggatttggttgggttttttttattttttgcggagttatgagggcgaacgacgttttgtaggtgttgggtttgttttttagtttggttcggggtttcgaggtgggtaatttttaggtaggtaagtggcgcgagagtatcggcgggttcggtatttgggagtcggaatttagtgcgcgtagtttcggagggtatgggtacggttttaggcggcgcggggttgtgggtgttgttttcggtttgttaggattatttgggagaggggcggttaggttcgggttatcggcgtggttcggtcgagggcggtatttcgggatttttacgttatttttttttagagcgtcgtcgattttttaattggtttttttagaagaggttgaggtcgaaatagtagtttatatttttgaggggttttgtagggaggggagtagggaattttattttgtaaataggaggtgtttggaggtgggggttttggcgggaagggtttcggtttgttcgttaattttttgttttttattcgcgtcgattttagttatttttagtttcgttgttttgtcgatagggcggagttatagaaggttggagggggttgttgttttttggtgttggaaaaataggagcggtattttttttttcgtgagtgagtttgttttggggaggtttgagattaattagagggttaagtttaggtgatattaggtaggaggtttaatagaggttggcgttttttttttttagtatagtagagtttaagtaatatttttttgttaagatttaggttaatataatttatatttattgagtatttattatatataaggttttgggttaggagttgtaagggtaaggatgtttagtttttggttttttttttttttaatttgaggattaagagggtatttttgttattttttaagttttttgttttggggagttttttttgggtttagtttgtgtttttcgtttttattttgtttattgtttgatattgtttttaggattttagatagagtttcggattgtttttttttagttttttttcgatttttatgttatttgagtttatttttttggggtgtttttgggatcgtggatatttgaggattgaagttttgtggatttttttttttttttttagattttagtttggggtttggtatagttagggttttttttttagtgtgggagtggaagaaattatttgtgttttttttatagttgttgggtttaaatttagattttgggatttttagatgtgaatatttttagttggtggaggggggtggtttggggattggcgtgggagggagtagtggagtgattgtataattgttttatttagatttttgtaatttttatttagaaatttaggagtattagagtttggttattttttttggggaggtaggaggtaggtatggttgggtttttttattttttatttgggttttgtagtttttgggtattcggttttgttttagtttttttatagtttttttgttttggttgtgatgggggtgggggatgttggaggggaggtttttggttgaggaggggttggagattttggttttattttatttttagtgttttttattaaaggagggtttgtgatattgtttttttttatgttttcggtttttgggtatagtagggatttttatgattttttttttttgttttgttttttaagttgtttagtttttttttagaggtgttgtttgtgttttttttttgtttaggttttttgttttttgtttgtgtaatatggattttatttttagggtagtagggaattgggttatttttaatattgtagttttttaagtatagatataaagtttgtataaatatttatgggtacgtgggatagatggggttatttgaaatattttttgtaaggaaatttaattatagatttttgagttagtaggattaatgtgtacgtgttcgtgtgtatattgtgtgtgtatgtgtgtgtttatattattatttttttgtgtagaaagtttggttttttttttatttggggagaagtgttggtattataatttgggaaagggggtattttgttaggaaggggattggggtggggttgttttagaaatgattaatttttttagttttttttattttaatttaaggattttggagtttttagtttttttggaattagttttttttgttgggattagttaatttttatggggagtgataaggagttttttaaggttaagaagttagattaggggtgtatgttataggagggattggggttttattagtttttttttttttatttttattgttgttttttattgagttattatcgttttagggaagggtggttggaataggtggtatttattttttattttttattttatatatggtttttttttgaattagaggaaagagattggggtagggttttagagtttaggattttttatagttcgttgtttattatatttgtaaagaagagtgaatttttaaggttgatatgttatgtatttttagtttaggtttttttttagtgtgggtgaggattgttatggtgaaaggtttttttatgaattttttttaataatgaaattgtgtggaggtttaatatggggtatttgttattatttttttttaggtttttttgtatttgttgaaaaatattttagggttggaaagtgatgttgaggttgttagagtgtgttgggatgggggagagagtgagaaggaaattttgagtttaggaaggcggggaggtaattagttttttattttttagttttaaagataaagtttttattgatttt

SEQ ID NO: 379 - DNA, 6171 bp, Artificial Sequence
  chemically treated genomic DNA (Homo sapiens)
ggggttaatgggagttttgtttttaaagttgaaagataaggagttagttgttttttcgtttttttaaatttagggttttttttttatttttttttttattttaatatattttagtaattttagtattattttttagttttagagtattttttagtaaatatagaggaatttggagagagatagtagtagatgttttatattgagtttttatataattttattgttagaagaggtttatgaaaaagttttttattatggtaatttttatttatattaggggagagtttagattagaggtatatggtatgttagttttgggagtttatttttttttgtaaatgtggtggataacgggttatgggaagttttggattttgaagttttattttagttttttttttttggtttagggaaagattatgtgtggggtggggagtagggggtagatattatttgttttagttatttttttttgaggcggtggtagtttagtgggaggtaatagtgggaatggagggagggagattggtgaggttttaattttttttataatatatatttttagtttgattttttgattttggagggttttttattattttttatgaaggttggttagttttagtaaagagagttagttttagaggagttgggaattttagggtttttgggttgaaatgaaagagattaggaaggttagttatttttggaatagttttattttaattttttttttggtaggatatttttttttttaagttatagtgttaatatttttttttagataagggaggagttaagttttttgtatagggaagtagtagtgtgggtatatatatatatatataatgtatatacgaatacgtatatattggttttgttggtttaggaatttatagttgggtttttttgtaggaagtattttaggtggttttatttattttacgtgtttataagtgtttgtgtagattttgtgtttgtgtttggaaggttatagtgttagaggtagtttagttttttgttattttgagggtaaagtttatattatataaatagggggtaaagggtttgggtaggaagggagtataaataatatttttggggaggagttaggtagtttggggagtagggtaggggaagggaattataaaaatttttgttgtatttaggaatcgggagtatagggaggggtagtgttataggtttttttttggtagagagtattaggggtgggatagagttagaatttttagtttttttttaattagaggttttttttttaatattttttatttttattatagttaggataaaggggttatagaaggattgagatagggtcggatgtttagaggttgtaggatttagataaagggtaaagagatttaattatgtttgttttttgtttttttagggagggtggttagattttggtatttttgggtttttgggtgaagattgtaggagtttggatgggatagttatatagttattttattgtttttttttacgttagtttttagattatttttttttattagttgggagtgtttatatttaaaaattttaggatttaaatttaggtttagtaattgtgagggaagtataggtggttttttttatttttatattggggaaggggttttggttgtgttaaattttaagttgagatttgaggggaggggaggagatttatagaattttagtttttaggtgtttacggttttagagatattttaaaggggtgggtttagatagtatgggagtcgggggaggattggagaagagtaattcggggttttgtttagggttttagagatagtgttagataataagtaaaatgggggcgggaggtataagttgagtttaggaaggattttttaaggtaggaggtttagaaagtagtagaggtgtttttttgatttttaggttggggagagaaaagattagaggttggatatttttgtttttatagtttttggtttagggttttgtgtatagtagatgtttaataaatatgagttgtgttgatttgggttttgataaagagatgttgtttaagttttgttatattgaggaaagggggcgttagtttttgttgggttttttgtttgatgttatttgaatttggttttttggttaattttagatttttttagggtaggtttatttacggaagaggaggtgtcgtttttgtttttttaatattagagaataataattttttttaattttttgtagtttcgttttgtcggtaaaataacgaaattaggggtagttgaaatcggcgcgggtggggggtagggggttggcgagtaaatcgagatttttttcgttaaggtttttatttttaagtattttttgtttatagaatgaagttttttgtttttttttttgtagggttttttagaagtgtgaattattgtttcggttttagttttttttggggagattaattagagggtcggcgacgttttggagaagggtggcgtgagggtttcggaatgtcgttttcggtcggattacgtcgataattcgagtttgatcgttttttttttaggtggttttggtaaatcgggggtagtatttataatttcgcgtcgtttgagatcgtgtttatatttttcgaggttgcgcgtattgggtttcggtttttaggtgtcgagttcgtcggtgttttcgcgttatttatttgtttgagagttgtttatttcggagtttcgggttaggttgaaaagtaagtttagtatttgtagagcgtcgttcgtttttatgatttcgtagagggtgaagggagtttagttaagttcggttcgggggtttttaggttaggatatcgaggtaagagttatttgaatcgttggcgaattggtggttgttgcggcgacggtagcggaggttgtaaattgtaatcggagtcggagtcggagttcggggagggatggtaggggaggggtgtgtgtgtgtgagagagagagagagagggagggaggaacgtagagggaagggggtgagttacggtcgcgttttttttcgcgcgaggttggagtagggattgcggagtttcggatcgtttgtttcgagcgtgttacgtttcgcggtttcgtaatttggcggagtagatcgaggatggggtttattttaatttttttgtaggagataggttaaggggaggtcgagatttcgaaagtttttagatttagggaagggtaatgaatgagggagtggaaagttttttaaagttttgttttttgaaagttggtttcgtttattaattaaattatttaatttttttagtcggttggtttatttggtggatttttttttagaatgtgaatatttttttttgtgtgtttttgagggggagggtgttttttgttttacgtttaggttattttagttttttttagattcgaaattttataatttatttatttagtttaggaattcgagttatagagatcgcgtgaaattgtattgtttttggtcgtttttttttttagattcggcgtcggtcgggtttttttcggggatttggatggggggcgggggtggtttttagtttgggaatagatttcggagttcgtttttttatttttatttcgggaggggttttcgtatttgtcgtcgttttttttgttgttttttacggtcgtttgggagaatagttgtttttttttttatattggagtttggtcgtatcgttcgggcggtcgtagttttcgtcgtttttttggggatttagatgggtatatattaaggcgtttatatttttttaggtgttttttaagtttaggttttcgtaggaaaggggatggggtagtgaagtgggacgcggagaggatattagagattgcgtttacgaatggcgtggatttttggaattttttttattagttgttcggatttggttagaggcggtcgggttttttgcgggttgttgtttaaagttttgttagtttcgggacggattcgatcggcgtcgtttggtgtttattcgtggtagtggagttttagacggttttgtattttaaattttttaaattggtattcgggatttcgttcggagagtttagttgttttttttagaattttaagtttgaagatttcgaaaatagttgagttttgataaagaaaaattttattttttatatttagtaaagattatcggttaatattttttaaatatgttttttattgatatgtaatttagagggtttgttttttattggagaattttcgttttggggaggttggttttttttagattatgtgtatagtagttataataataatagtaataataaaattattaatatatataaatatttttatatattattttatttataaagtatgtttttaaatttagtgttttagagaatgtgttatttaatataaaaattatatgatttaggtaatataattttttattttatagaattagaagtgtgtgatttttttaaggttatttatttggtgatagtggttgaggtgattaggtgattgggaggtggggtttagatttttatttagggttttttttttttttttttttttttttttttttttttttttttgagatagagtttcgtttttgttgtttaagttggaatgatttatttgttttagtttgttaaagtgttgggatattttttattttaaaaaataaaatattcggttgggcgcggtggtttatgtttgtaattttagtattttgggaggtcgaggcgggtagattatttgaggttaggagttcgagattagtttagttaatatagtgaaatatcgtttttattaaaaatataaaaattagttgggtatgatggtgggtatttgtaattttagttatttaggagattgaggtaggagaatcgtttgaattcgggaggtggaggttgtagtgagttgagattgtattattgtattttagtttgggcgatagagtgagacgttattttaaaataaaaataaaatattgttttgtttgattttatggttttttggtttgttgtttttttttttttgatacggaattttgttttgtttttgttatttaggttggagtgtagtggtttgattttagtttattattgagtttaagtgatttttttgttttaggtttttaagtagttggggttataaggcgtgcgttattaagttcggttaattttttgtatttttagtagagatggggttttattgtgatggttagattagtttttaatttttgattttaggtgatttatttattttagttttttaaagtgttgggattataggtgtgagttattatatttggtttttttttttttttttgagataggatttttttttgttatttaggttggagtgtagtggtgtaattatggtttatagtagttttaattttttaggtttaggtgatttttttattttagtttttttagtaattgagtttataggtgggtattaaaatgtttggttattttgtttatttgtttgtttgtttttgagatggagtttcgttttgttatttaggttggagtgtaatggcgtgattttagtttattgtaatttttgttttttgggtttaaggtatttttttgagtttcgtttttggtgtttaggttggagtgtaatggttcgattttggtttattgtaatttttgttttttgggtttaagttatttttttgttttagttttttgagtagttgagattataggtgtttgttataatatttagttaatttttgtatttttagtagagacggggttttattgtgttgattaagttggttttgaatttttgattttgggtaatttatttatttcggttttttaaagtgttgggattataggtatgagttattatatttggttttattatttggttttatttaggatttttttattatttttgtatgatatggagatgcgggggtgggggtgggggtttggttatgttgtttaagttggttttgaatttttggtttttgtaatttttttattttagtttatttaaattgttaggattttagatgtgaattatgtttggttttatttaggattttttattgttttattgagattggagttttatgtgtttagatttatatttttattagataatagtgttgatattatttaagggtttttatttttatttatttttttttatattaaaggg

SEQ ID NO: 380 - DNA, 6214 bp, Artificial Sequence
  chemically treated genomic DNA (Homo sapiens)
ggtggaagatggggaaaattagagtatattttttagagagattttgtgaggattaaatgagatagggaaattgagattgagggagtagttgaagggaatttttttgtttttgtttttttttagataatataagcgttttttttatgtatgttagtaggtggagatttttttattatttcgtgtgcgtattttatatgtttttgttttcgtttttatttttgtttttgttattttcgttatttggaatgtttttttttttttttttgtttttgttagttttatttatttttttaggttaatatgttattttttttaggaagttttttttgatttggaagtgattgttgtattttttgggtttttcgtggggtttttattatttttagttttgggtagtagttatttgtagtttattttatttttttttaagtttgtgtttttttttttggtaggagtttttttgtattttagtatttttgggcggggtcggaattattgtaatgtttttgtgttttatttgtttataaggttttcgacgtatttttggaggcggttttagggttcggatgatttttggtcggggttgtggggggttgtattgagggtaggttagaggtttggggtaattgttgggttttaggaaatgaggttgtattatttattgtagtttttgattgttatttatggtgttgatgtttggtattaggtggaatttttaaggaataagaaatggaaggttatagatgaggttcgtgtggattgaggggtttttattgggtagaggttatattgttgtttatttttaatgtataggttagttttgggaatagaaagagtatagtttggtagttagagattgatttggtggtaaatttttgtttataagttgtgtggttttggggtaggttatataatttttttgtgtttttatttttttattagaattaatatttataaagtataaattgttaggaattgttttaattattttataaatattgatttatattattggtatagtaatatttttattttttttttttttttttttttttttttttttttttagatggagttttattttgttgtttaggttggagtgtagtggtacgattttagtttattgtaatttgcgttttttaggttcgagtgatttttttgttttagttttttgagtagttgggattataggcgtgtattattatgttcggttaatttttgtatttgtggtagagatagggttttattatgtttgttaggttggtttttagtttttaattttaggtgatttattcgtttcggttttttaaagtgttgggattataggcgtgaattatagcgtttagtttagtatttttatttttagacgggagaatagttgttcgtagatatagagttaatgagtttagtagttgggtttttatttatttttgtatttgtttgtacgaagaggataattatagtttttagtttaaggggaggttgtgagaattaggtgagagaatgtgtgcgatagtttggtaagtggtaggtgtttagtgtagaggggttgaggtaggaaagagttattgttttgggtttaggttattttattgttttttttttttttttttttgagatagggttttatttttttatttaggttggagtgtagtgatttgcgggtttaagtaatttttttattttagttttttaagtagttgggattatcgacgtgtattattatatttggttaattttttttttttttttcgttttttttttttttttttttttgagatatagttttgttttgttatttaggttggagtgtagtagttcgatttcgttttattgtaatttttattttttggatttaagtaatttttttgttttagtttttcgagtagttgggattataggcgtttataattgtgtttagttaatttttgtatttttagtagagatagggttttattatgttggttaggttggttttgaatttttgatttttggtgatttattcgttttggttttttatagtgttgggattataggtatgaggtatcgcgtacggtttggttaattttttttaaatttttttgtagagatagggttttattaggttgtttagggtggttttaaatttttgagttgaagtagtttatttattttagttttttaaagtgttgagatgataggttttagttatttggtatggtaggttgttttaattttaattttagtttttagttgtttattggttgtgtgattatgggtaagttatttaatttttatgtgttttagtttttttatttttaatattgttataggtgaggattataggattttattgatgttaagaagtattttttaatagttttgaaattatagtttaattggtaatttaaaaaattttagtggattaggtatggtggtttatatttagtattttgggaggttgaggtagaaggattatttgagtttaggagtttgaggttatatcgggtaatatagtgagattttatttttataaaaaaattaaaaaattagttgggtgtggtggtgcgtgtttgtggttaggtcgttttttagttaggattttagtaggattgtttgagtttaggaggttgaggttgtagtgagttgtgattgtattattgttttatagtttgggtaatagagggagattttgttttagaaaaaaaaaaaaaaagaaagagaaggaaagaaaattagtggtataaagttatagtgggttttttttttaatcgatgaggttttcgatttcgtgaaatatggtaaatgatgtagtaagcgtttagtataacgtttttgtttttattttattagttagttatttgaggagtgggttgggatggggtttagtgttttgggagaagtgggttttagttttgtcgttgggttttgggtgtgggcgtttaatcgttcgggaagcgtttataagtttaggtaagtttcgatagcggtagttcgagtttaagcgttgcgggttcggcgttttagtgattttagtttcgggttcgaggtatcgtcggcggtattttttattttcgggttcgggtcgttttaggttaggaagggagggacgtttcgggtgatttagtcgtcgtgattcggtcgtcgtgattcggcggaacggacgttttttttttttttttttgtcgatacgtgttcgtagtttttcgataggaaatgggtatttgtagtttttcgggtgtttttcggcgggtagcgggcgtcgttaggggttgagagtggggtcgcgagagtcgttcgtagtttgatttcgcgtacgtttcggaatttcgaggtttttattcgtcgtattcggtaaagggatcgagggtcggttttcggggatttggtaggttttattgttcggatttttttggattttttaggtcgagaaacgatagggatttggcgacggaggggcgaaggatagatagacggacggatacgcggagggtcgtagatcgggtcgggatttttattttggtttagttgttttttcgacggatttcgtttttttttcgtgtggggatttttattttagtttagattttagattttaggaatttagttcgaagcggagagatttttttagttttcgaggcgattattttaggcgtttacgttttttttgaagtagggtggacgtagaagttagaggtgggtaggaggagagaaagcgggtacggagacggagggacggacgcggacggcgagggagaagggggcggttgggagaaggggagttcgcgggtttttgttgttcgttgcgcggtgggggtaattggtttcggacggcgaggggtaggattttcgttttagtttttagttcggtttcgatttcggtttttcgttttagtttcggagcgtgcgggagttgatttcggttttttacgcgcggttttttcgtgggattatcggcgtcgggttttatttatttgttgggttgtttgcgttgcggtcgggggttgcgcggggtcgtcgtattcgtcgtcgttttcggagttcgggtcgggtttttcgaagtttcggaatatgttcggggttggcggttttgcggggtatacggttgttgggttttgatttattcgcgtcgtgcggagttttttttttttatgaatgaaaagttttcgggttgaattattgcgatcgcggggggtgggggcgttgtagcggcgcggttatttttaggttttattttcgagacgcgtcgttttggttcgtcggtttcgaatttggcgacgtttttttaagttcggttgtagtttttttatcgggatgggttcggttcggcgtttttcggcggttgcgggttcgtttttttgacgtagttgtttatatatggtgtaattttttcgtcgcgtttaggtggagtttcgggtttttttgcggattgacgtatttgttagagttcgcgtttcgttttagttttttcgaggtttgggttaattttcgtttttgtttttataaaatagtacgaaagaattatatttttaggagttacgttaatcgttatttaaagtttcgtggagtgaggtttttttattggttttgttttaaggtttcgagtatatgaaaagtgaataaatgataaattagggttataaaaatggtggtatattttattttattttatatttttgagatcgggtttttgttatttaggttggagtgtagtggttcgatttcggcgtattgtaggtttaattttttgagttaaagggatttttttgttttagcgttttttttaagtaagtgggattataggcgcgcgttattatatttaggtaatttttgtgttttttgtagggattgggtttcgtcgtattgtttaggttgggtggtatattttaaatgtttgcgataaggtaatgttttgaattaattttatataaaatgtaatataatagtattatttaggataattttaggagttataacgagttttaatttagggttattataggtgttttgaggtttgataaacgttatttttattacggttagtgtttttcggaggtttgtggttattagatttgtttggagagtatgttaaaggtgagtgaatgtgaggtaggtattatttttatttttgttttatagatggggaaattgaggttgggagatgttgaaatgaattgtttgaagtcgttaagtgagtagttggtataggttgttaagttatagtcgtgggtattttaagtttaggtttagttaagatttttaaagtttttatatttttatagatattttgtcgtatatttagaatgttagtgttgggtattattttaaagtttttttttgattatttttattatagatgaggaaattgaggtttagatggagtattgagttgttagttgttatacgattatagaaagagggttggggttaggtgtggtggtttatgtttgtaattttagtattttggaaggttaaggtagaaagaattatttgagattttatttttataaaaaattataaaattttttggatatggtggtacgtttgttttgtggttttagttgttttggaggttgaggcgggaggatggtttaagttagggaggttgaggttgcggtgagttgtgattgcgttattgtagtttagtttgggggatagagtaagatttaaagtaaatagattaagagagggttgggtttttttgtttttttatcggtttttttattttattagttttagttttgttttttgggttattttttttgggaatataggttagaagtttgtgggtgtatttaggatttagagttaggaagtttagattgtttttggggttttagttttagagttattattttttgtttgtgtgatattgggtaggttatttttttttaattgggtttttttgttgattttatagagttgttgtgggattaagtgagattatagatgtgaaaatgttttgtaagttataaagtgttatgtatttagaaagtggttattagtttggtgttttttttttgtttttgagcgatttaatgtttgttatttttttgttattattatttttgtgtgtgtgtgtgtgtgtgtgtgtgtgtgagagagagagagagagagagaaagagagagagaaaggagaggagagtgtttttgaggtagtatgattcgtggatagaatattcgtgttggggttagatagttttggggtttgggtttgaatgtggttaggttgttt

SEQ ID NO: 381 - DNA, 6214 bp, Artificial Sequence
  chemically treated genomic DNA (Homo sapiens)
gagtagtttaattatatttaaatttagattttagagttgtttgattttagtacgggtgttttgtttacggattatattgttttaaaaatatttttttttttttttttttttttttttttttttttttttttttttttatatatatatatatatatatatatatatagagatgatgatgataagagggtgataagtattgggtcgtttaaaggtaaaggagaggtattaggttggtaattattttttgagtgtataatattttatagtttataaagtatttttatatttgtgattttatttgattttataatagttttgtgagattagtagggaggtttagttgaaggaaggtgatttgtttagtgttatatagatagaaaatggtagttttgggattagaattttaggggtaatttggattttttggttttaagttttgagtgtatttatagatttttggtttgtgtttttaaggaaagtagtttagagggtaaagttagagttgatgaaatggaaggatcgatggagaagtaggagagtttagtttttttttgatttatttattttgagttttgttttgttttttaggttggattgtagtggcgtagttatagtttatcgtagttttaatttttttggtttaagttattttttcgttttagtttttagaatagttgggattataaggtaggcgtattattatgtttagaaaattttataattttttgtagagatggggttttaaatggttttttttgttttggttttttaaagtgttaggattataagtatgagttattatatttggttttagttttttttttgtagtcgtgtgataattgatagtttagtattttatttgggttttagtttttttatttatgatggaagtaattagagagaagttttgggatggtgtttagtattaatattttggatgtgcgataaggtgtttgtgaaggtgtaagggttttgaaaattttggttgagtttgggtttggagtgtttacggttgtgatttggtaatttgtgttagttatttatttagcgattttaagtaatttattttagtattttttagttttagtttttttatttgtaaaatagggatgaggatgatatttgttttatatttatttatttttgatatattttttaaataagtttggtggttataagttttcgaaaggtattgatcgtaatgaagatggcgtttattagattttaggatatttgtagtggttttgaattaaaattcgttatagtttttgaaattattttgagtaatattattatattgtattttatgtggggttagtttaaagtattattttatcgtaaatatttaaaatatattatttagtttgggtaatacggcgagatttaatttttataaaaaatataaaaattatttgggtgtggtgacgcgcgtttgtagttttatttatttggagggggcgttgaggtaggagaatttttttagtttaggaagttgagtttgtagtgcgtcgagatcgagttattgtattttagtttgggtgatagagattcggttttaaaaatataaagtaaaataaaatatgttattatttttgtaattttggtttgttatttatttattttttatatattcgaagttttaaaataaggttagtggaaagattttattttacgaagttttgggtggcggttggcgtggtttttagagatgtgattttttcgtgttattttgtgggagtagaaacggaggttagtttaggtttcgagagggttggggcggggcgcgggttttggtaggtgcgttagttcgtaggggaattcggggttttatttgggcgcggcgaggaagttatattatgtatgggtagttacgttaggggggcgggttcgtagtcgtcggggaacgtcgagtcgggtttatttcggtgaaaaggttgtagtcggatttggggaggcgtcgttaagttcgggatcgacgggttaaggcggcgcgtttcgggggtggagtttggaggtgatcgcgtcgttgtaacgtttttatttttcgcggtcgtagtggtttagttcgagaattttttatttataaaaagaaaagatttcgtacggcgcgggtgagttagaatttagtagtcgtgtatttcgtagagtcgttagtttcgggtatgtttcgagatttcggggaattcggttcgagtttcgggaacggcggcgggtacggcggtttcgcgtagttttcggtcgtagcgtaggtagtttagtaggtgagtggggttcgacgtcggtggttttacgggaggatcgcgcgtgggaggtcggggttaattttcgtacgtttcgggattggagcggggaatcggagtcggggtcgggttgggggttggggcgaggattttgtttttcgtcgttcggggttagttgtttttatcgcgtagcgggtagtagagattcgcgaatttttttttttttagtcgtttttttttttttcgtcgttcgcgttcgttttttcgttttcgtgttcgttttttttttttttgtttatttttgatttttgcgtttattttgttttagaaggggcgtgggcgtttagggtggtcgtttcgaaggttaggagggttttttcgtttcgggttgaatttttgggatttggagtttgggttggggtgagggtttttatacgggagggaggcgggattcgtcgggagagtagttgggttagggtgggagtttcggttcggtttgcgatttttcgcgtgttcgttcgtttgtttgtttttcgttttttcgtcgttaagtttttatcgtttttcggtttggggagtttaggggggttcgggtagtggaatttgttaggttttcggagatcggttttcgatttttttgtcgaatgcggcgaatagagatttcgaggtttcgggacgtgcgcggggttaggttgcgggcgattttcgcgattttatttttagtttttaacggcgttcgttgttcgtcggggggtattcgggaggttgtaggtgtttattttttgtcgaggggttgcgagtacgtgtcgataggggagggaaggaggggcgttcgtttcgtcgagttacggcggtcgagttacggcggttgagttattcggggcgtttttttttttttggtttggagcggttcgggttcgggagtgggagatgtcgtcggcggtgtttcggattcggaattggggttattgggacgtcgggttcgtagcgtttgggttcgggttatcgttgtcgggatttgtttgggtttgtgggcgtttttcggacgattgggcgtttatatttagggtttagcggtagagttagaatttattttttttagaatattgagttttattttaatttattttttagatagttggttgatagaatgggaatagggacgttgtgttgggcgtttgttatattatttattatattttacggaatcgaagattttatcgattgaaaaaaaaatttattataattttatgttattaattttttttttttttttttttttttttttttttttttgagatagggtttttttttgttgtttagattatagagtagtggtgtaattatagtttattgtagttttagttttttgggtttaagtaattttattgagattttagttgggaagcgatttggttataggtacgtattattatatttaattaattttttaatttttttgtagaaatgaagttttattgtgttgttcggtgtgattttaaatttttgagtttaagtgatttttttattttagttttttaaagtgttgggtatgagttattatgtttagtttattaaaattttttaaattgttaattaaattatgattttagagttattaaagggtattttttaatattagtgaaattttgtaatttttatttgtaataatattaaaaatgaggaaattgaggtatatggaggttaaataatttgtttatggttatatagttagtaagtagttgagagttgagattagaattgggatagtttgttatgttaggtggttaaagtttgttattttaatattttgggaggttgaggtgggtggattgttttagtttaggaatttgagattattttgggtaatttagtgagattttgtttttataaaaaaatttaaaaaaaattagttaggtcgtgcgcggtgttttatgtttataattttagtattgtgggaggttaaggcgggtggattattagaggttaggagtttaagattagtttggttaatatagtgaaattttgtttttattaaaaatataaaaattagttgggtatagttgtgggcgtttgtagttttagttattcgggaggttgaggtaggagaattgtttgaatttaggaggtggaggttgtagtgaggcgagatcgggttattgtattttaatttgggtgataaagtaagattgtgttttaaaaaaaaaaaaaaaaaaaaaacggaaaagaaaaaaaaaattagttaaatgtggtggtgtacgtcggtagttttagttatttgggaggttgaggtgggaggattgtttgagttcgtaggttattgtattttaatttgggtgaaagagtgagattttgttttaagaaaaaaaaaaaaaaaagtaatggaatggtttgaatttagagtagtgatttttttttgttttagtttttttgtattgggtatttgttatttattagattgtcgtatatatttttttatttgatttttatagtttttttttgagttgggagttgtaattatttttttcgtgtaaataggtgtaggagtgggtaagagtttagttgttgggtttattggttttgtgtttgcggataattgttttttcgtttgaaaatgaagatattaggttgggcgttgtggtttacgtttgtaattttagtattttgggaggtcgaggcgggtggattatttgaggttgggagttggagattagtttggtaaatatggtgaaattttgtttttattataaatataaaaattagtcgggtatggtggtgtacgtttataattttagttatttaggaggttggggtaggaggattattcgaatttgggaggcgtaggttgtagtgagttgagatcgtgttattatattttagtttgggtaatagagtgagattttatttgaaaaaaaaaaaagaaaaaaaagaaagaaaagaaaatgaagatattattgtgttaatgatatgagttagtatttgtaaagtggttagaatagtttttggtagtttgtgttttataaatgttagttttaatggggaaatgggggtatagagaggttatgtgatttgttttaaagttatatagtttatgagtagggatttgttattaggttagtttttgattgttaagttgtgttttttttgtttttagagttagtttgtatattgaaggtagatagtagtgtagtttttgtttagtggaagttttttaatttatacggattttatttgtggttttttattttttattttttagaagttttatttggtgttaagtattaatattatgagtggtagttaggagttgtagtggatggtatagttttattttttggggtttagtagttattttaggtttttgatttatttttagtatagttttttataatttcggttaggagttattcgggttttggggtcgtttttaggggtacgtcgaaggttttgtgaataggtaaggtatagaggtattgtagtggtttcgatttcgtttaggagtgttagggtgtagagaagtttttgttagaaaggagagtataggtttaggagggggtaaggtaggttataggtgattattgtttaaggttgaaagtgataggagttttacgggaggtttagagggtataatagttatttttagattagggaaagttttttggaaaaggtggtatattagtttagaaggatgggtaggattggtagaggtagagaggaaggaaaggatattttaggtagcgggggtggtaggagtaaggatggaggcggaggtaagaatatgtaaggtgcgtatacggaatggtgagggggtttttatttgttgatatgtatagagggggcgtttatgttgtttgggagagaataggaataagagggttttttttagttatttttttagttttagtttttttgttttatttaatttttataaaatttttttggggaatgtattttggttttttttattttttatt

SEQ ID NO: 382 - DNA, 6167 bp, Artificial Sequence
  chemically treated genomic DNA (Homo sapiens)
attttttggagataaggtagggtgttgaggggcgggtaagatgttatcgagggagaggggagggttttttaagtgtgcggaaggcggttattttgttttagtttgatggaattttttgtttatatatttgttagttttttttttttcggttagttttaggttagttaggagtttttttttgtggttttcgagtatttttttgatatttgaggagattttgtttaattttttttttcgtttttaggatttttggggattagttattgtttttagaagttaggtcggatagtggttttttttatttttttttgatttttttaagggggtttagtggttagtgttttttaggaggttttatttttaatttaatttaagtaatagggatagatgaaaaataaaatttaattagggcgataaatggcggggggtaggacgtggtggtttttaggttggtttcgtgcgtttttgtttttgttattgtttttttgttatatggggggggggtttaatttggtttttgagcgtataaagttaaggaggggtaaaaaaaaaataaaaaaaaaaaaaaaaggaaaaatgttttaagaaataaagagggggaatagattaattgatatgaaatttgggggtttttaatttttttatgtaattttgtaagtttgttgttaatttttttgatttttttatttaaaatttttcgggattattttttattttagaatttttttcgtttagtttttattgttttttatttatttttttaatcgttagattttttatatttttcgtattagtgtacggttttcgaggattttatattttttggggggtttttaggagacgggtaaagatgatttttaggtgtgtttcggtgggggggtttttaagattttttttttaggagtatattagggagttaggttattcgtgggggtatgtttgtttagttatcgttatttttaatgtggttaaattttttttttattttggttgggttaatatatagtaagtaaggtgtatcgggaatgggtggggtatggggagtatcgtggtttacgttgcgggggtcgtggggataggcgttaaggaggttagttttataagggtatttttgttatggtggaaagatggaattaggtttgggatatatttcgtttattttacgggtgtattttaaatgtcgtcggtcgtatatttaggtcgtattatttgagtttttttttttgagaggtagggtatagatagggtcgaggggtagtggagatgggaataggagcggggtttagattatgaaaatattggagaattttagcgggattttggtttgatttatatagatatcgtagttgtttagatatgtttattgtttttatttaattttgtgggggtgtgcgtgtgtgtgcgtatgtgtgtgtgtaggtgggtgtttgcgtgtgtaacgtgtgtgttgcgtgtttgtgtgttgtgagttgtgtttatgtatgtgttgcgtatgagtgtgtgtgttgtgtgtgtatgtgtgtgttgtgtgtttgtgtgtgtgttgtgtttatgtgtgttgtgtatgcgtgtgtgttgtgtgtgtatgtgtgtgttgtgtgttgtgtttatgtgtgtgttgtgtgtgcgtgtgttgtgtgtatgtgtgtgttgtgtttgtgtgtgtgttgtgtgtgttgtgttcgtgtgtgttgtgttcgcgtgtgtgtgttgtgtgtgtatgtgtgtgttgtgtttttgtgtgtgtgttgtgtgttagtgtgtgtgttgtgtgtgtatgtgtgtgcgtgtgttgtgcgtttgtgtgttgtgtgttcgtgtgtgtgttgtgtgtgcgtgtgtgttgtgcgtttgtgtgtgttgtgcgtttgtgtgtgtgttgtgtgtgtatgtgtgtgcgtgtgtgtgtcgtgcgtttgtgtgttgtgtgtgtatgtgtgtgcgtgtgtgtgttgtgcgtttgtgtgtgtgttgtgtgtttatttgtgtgttgtgtgtgttgtgcgtttgtgtgtgtgttgtgttcgtgtgtgtgttgtgtttatgcgtgtgttgtgtgttgtgtgtgtgtagttgcggggatgtataaagtatgagtgttttttaggatgggaattgagatgtaagatttgggggtgagggtcgtgttaattatattttatttgtatggattttggtttttatgttttgttttttttttttttggttttattgggtttttttgattgttttgtgatttttagtgatggaaaagggagtgaggagttagtttgggttgttgttattttcggatggttagtttattttgaaaattttcgtgagaagggagatggcggtagtagcgacgtgtttatttgtgatttttggggttttttttttttttttgttggtttagggatttaagtttaggttaatttgatttaaagtttaagggagaagagaaagaggggggtggggagtgttaaatttttttattttgttaattgttttttagttaattcgtttttaatattttttttttttagttaattgattttttttggtggttgttttttttaaagttaatttttgagtttttgtggggtgtttttaaaaagttaattagttttaagagggttgttgtgggggggggggaagggggttagtttaatgttttgattttttatgtgtggggataattggggataatttggggggagggtatgtgaagggtgtttaaagttaatcgattttgtatatgtttgaagatgttgttgtgtttttttagttcgatggagggggtcgaggagagtagtttgtttcggggaggcggggtacggggattgggttaggagaagttttagggggacgtggaatcgagagattttcgggatggaatttgatggaaacgttcgtggttaggaggaggttgtaggatggtggcgtcgggttgtagatttgcggtagttttgtttattttcgattgttggttatttttgggggggcgttttcgtgggcggggttttgggtgggtagagtaattaggggacggtgacgtttggtttttttgaacgtttcgagttttttggcgagtacgtgatttcggcgggtacgtaggagggtaggtaggtttttgcgtaggcgttgggtggattgtttttaggtgttatattggaagaatttgtttacggggtatttggggaagttgttttgggaggggaaggggttggttagtaggtgtttgttttttacgttttttcgtttgagtcgttcgtttgatttgataggttatttttgtgattgattagtgatttgagttaatgtttacgggtagagggatagaaggagttagcgtttgagttgttttcgggttatatagtaagtaaggaagttacgggtttttgtttttggttaagaggttttagaggttataggaaacgttgggcgttcgaagttttatttttttgtttttagagagtgggaaaggggtttaggatttttatcggaagtacggtcggaggggtcgatacgtttttttcggatttggcgggggtagtatagtacgtttttaggagggttaggttatagttgcggaaatagtattttttaacgatgttacggttgcgacggtttatacggtttgcgggtttgtttggaagttttatagtatagagagagtcgtgttagtatcgtattgattttagttttcggaggttgaagggggagtaaattatttttgtttttaggttaggttttggaaggacgtagttattttgcgggttaggggagggaagtgagagttggtaggtagaggcgttttaggaagaagagaggtgagaggggaggtgagtgggatttagattagttcgtggtttttgttgtttttttttttagatgaaaaatgggtataagtttttggttttataattagagggatattattaggattaaaggtttataatgggagtggtttggaaaatgtgtgggatgtgagtttagtttaggggtttttataggagggattgttgtttttgagtttggattttggtttggtattatttaggaggttggaggggtttatattatttttggagttgttgagatagggagataagggtaggagaggagaagacgggaggagaggagtgaggaggcgtgatggaattattttttttttttttttcgtttttttttttttttttatagtaatgtttagttggaaggggaaggtcgttgggggttttattttggggtgttaaagggtaggtgttattagtcggaggagggagtaggagttttattacgggggttttttaagtgggggtttggtttttttttttttttaggaaagtttggtgtagggaagtttttttttgggtaaggattggttggtattaggttttgtagtgttattttttatttttaaatggggtaggtaagagagagggtataggagaggttagggcgggtaggggtttttagagttaagtagtaggaattttttagagagaagttttgaagtgtatttgtattttgtgagtttattttatagcgtgagtaagtagtggtggtaaagatgttacgtggtgagtgttaggtggaataagtcgtgcggtttttgttagtaaggagcggttttttttttgttttattaggtatgtttaggtattatgtttgtttttgtatttatttagtttttttatttgggggtggggttttaaggataatgggttatgtatttatttgttagtttttaggttggagaattaagagagaaatatgaggaaaggttgaagcgtttttgaggttagtaggtgggtattttttacggtagttttggggtttaaggaggcgtatgtatcgtttatttttgttatttattaattgtatttgttttattgattttaattatataaattattttattgattttaattttgattatttatcgaacgtacgttttttgttagaatgtttaaaaggtgtaggaagaaaggtaggttttttttttagagtttgaagttttgtattaggcgtgcggtgttttaggagtaggagttttacggtttttaatagaaattttgatgtttagggagatttttgtgagtgtttttgacgtttagggggtatttttggtttatttttcgaaggaggcgtgtgatgggaaaggtagttggtgtggatgttttgggatatcgtacgtgtttagaaacgcggcgggaaggttaaagttttagagtaagcggttgggttgttgatttaggagtgtgtttttttggtttgaggttgggcgtttttatcggttattttaggggtttgattaggtttgaggaagttttttttagttatttattgaagtagaagtcgcggtttttatagacgaattggagggtgtttattagtttttcgtcgtatagggttttattggggcggtaagtagtaatgtagtacgaggcgaaggttaagaaggtgagaagtattagtatcgatttttttattgggatttttattggtgtttgggggcgggagagaagtggcgtgagcggggtagttaggttaagttttaggttagaggtgttttttttaaattaaatttgttaatttataaatttagttgaaaattgaaagtacggtttttttataaatattatttttattataaaagtaatatataggttataatgtcgaggtgagggcgtagggttatgtgtagaatgaagcgtttagaagtatatagaaaaggtttagttttttttatttgtaagaagtattagtaattttatacgaggggtgattatttttacggttattattgtaggagtttagcggtatttatagttgtaggggtttaggttggatattcgatttggttttcgttttatgatattatgggggtagggttagtttagcgttatatcgttattttttaggtttttagcgttagttaagatggtagatagttttatttttatagagtatgtgtatttaggaggattagtttttttttttttataatttttagttgagtagggggggtttaggaggattatcgtttttaaagtagtaggttagttttgttgggttagtttcgtttttttttttggtttttttatttttttagtttgtagttgagttaggtttgggttaaggattttaatggttaatataattacgttatttatgtttta

SEQ ID NO: 383 - DNA, 6167 bp, Artificial Sequence
  chemically treated genomic DNA (Homo sapiens)
tagagtatgggtggcgtggttgtgttaattattggagtttttgatttaggtttggtttagttgtagattggaaaggtggaaaagttagggggaggggcggggttggtttagtaggattggtttgttgttttgagggcgatggtttttttggattttttttgtttagttgggggttgtggggaggaagggattggtttttttggatgtatatgttttgtaggggtggggttgtttgttattttggttggcgttggaggtttgagaagtggcgatgtgacgttgggttggttttgtttttatggtgttataggacggaggttaggtcgggtgtttagtttgggtttttgtagttgtggatgtcgttgagtttttgtaataatgatcgtggagatggttatttttcgtgtaaaattattagtgttttttgtaaatggaaggaattgggttttttttgtgtgtttttggacgttttattttgtatatggttttgcgtttttatttcggtattatgatttgtgtgttatttttgtaataaaaataatgtttataggaaagtcgtgtttttaatttttaattgaatttgtaggttggtaaatttggtttgggaggggtatttttggtttggggtttggtttggttgtttcgtttacgttatttttttttcgtttttagatattaatgggaattttaatggggaagtcgatgttggtgttttttatttttttggttttcgtttcgtgttgtattgttgtttatcgttttagtgagattttgtgcggcggggagttggtggatattttttagttcgtttgtggggatcgcggtttttattttagtaagtagttgggaggggtttttttagatttggttaggtttttagagtgatcggtgaggacgtttaattttaagttaggggagtatatttttaggttagtagtttagtcgtttgttttgagattttgattttttcgtcgcgtttttgagtacgtgcggtgttttagggtatttatattagttgttttttttattatacgtttttttcgaagggtgggttagaggtgttttttagacgttaggggtatttataggggtttttttgggtattagaatttttgttgggggtcgtgaggtttttgtttttgaggtatcgtacgtttagtgtagggttttaggttttggaggaagagtttgtttttttttttgtattttttggatattttgataagggacgtgcgttcggtgaatgattagaattaaaattaataaagtgatttatataattaaaattaataagataagtgtagttggtgggtggtaggggtgagcggtgtatgcgtttttttgggttttaaggttgtcgtggggggtgtttatttgttgattttaaggacgttttagtttttttttatgttttttttttggttttttagtttgggggttggtaggtgggtgtatggtttattgtttttgagattttatttttagataggggggttgggtggatgtagaggtaggtatggtgtttgggtatgtttgatggggtaggggaggggtcgttttttattggtagaggtcgtacggtttattttatttgatatttattacgtgatatttttattattattgtttatttacgttgtgaaatgggtttataggatgtaaatgtattttaaagtttttttttgaaaagtttttgttgtttgattttggaagtttttgttcgttttggttttttttgtgtttttttttttgtttgttttatttgggggtaggaagtggtattgtagggtttggtgttagttagtttttgtttagggagaagtttttttgtattaggtttttttgagaggaggggagggttaagtttttatttgggggattttcgtgatggggtttttgttttttttttcggttgatggtatttgttttttggtattttaaggtggagtttttagcgattttttttttttagttgagtattgttgtgggggagagggggaagacgggaggaaagaagggagtggttttattacgtttttttattttttttttttcgttttttttttttttgtttttgtttttttgttttagtagttttaggggtggtgtgggtttttttagttttttaggtggtgttaggttagagtttaagtttagggatagtagttttttttgtgggggtttttgaattgggtttatattttatatattttttaaattatttttattgtgagtttttggttttggtggtgtttttttggttgtgggattaagagtttgtgtttattttttatttgaggaaggaggtagtagaggttacgggttggtttgggttttatttatttttttttttattttttttttttttgggacgtttttgtttgttagtttttattttttttttttgattcgtagggtggttgcgtttttttagggtttggtttgagggtaggggtggtttgttttttttttagttttcgggggttggggttagtgcggtgttaatacggttttttttgtgttgtgggatttttaggtaggttcgtaagtcgtgtgagtcgtcgtagtcgtggtatcgttgaggagtgttgttttcgtagttgtgatttggtttttttggagacgtattgtgttattttcgttaagttcgagagggacgtgtcgattttttcgatcgtgttttcggtgagggttttgggttttttttttattttttagagatagagaaatagggtttcgggcgtttagcgttttttgtggtttttgggattttttggttagggataaggattcgtgatttttttgtttgttgtgtggttcgggagtagtttagacgttggttttttttgtttttttgttcgtggatattagtttaagttattgattagttataggggtggtttgttaggttaggcgggcggtttaggcggaagagcgtggagagtaggtatttgttgattagttttttttttttttaggataatttttttagatatttcgtgggtaagtttttttaatatgatatttggaagtagtttatttagcgtttgcgtaggggtttgtttgtttttttgcgtgttcgtcggggttacgtgttcgttaaggagttcgaggcgtttagggaggttaaacgttatcgttttttgattgttttatttatttaagatttcgtttacgggggcgtttttttagagatggttagtaatcggaagtgagtaaaattgtcgtaagtttgtagttcggcgttattattttgtagtttttttttgattacggacgtttttattaggttttatttcgaaaatttttcggttttacgtttttttggggttttttttgatttagttttcgtgtttcgttttttcgaaataggttatttttttcggttttttttatcgggttgaggaagtatagtagtatttttaaatatgtataaaatcgattggttttaaatattttttatatattttttttttaaattatttttaattatttttatatataaaaaattaaaatattaaattaattttttttttttttttttataataatttttttaaaattaattggttttttagaaatattttataaaagtttagaaattggttttaaaaaaaataattattaaaaaaaattaattggttaaaaaaaaaaagtattaaaaacgaattggttgagaaataattggtaaaataaaggaatttggtattttttatttttttttttttttttttttttggattttgagttaaattggtttggatttgagtttttgaattagtaaagagaaaagaaggattttagaaattataggtgggtacgtcgttgttatcgttatttttttttttacgggaatttttagggtaaattggttattcgaaaatagtaataatttagattggttttttatttttttttttattattaaaaattatagagtagttagagggatttagtaagattaaaggaggggaggatagagtatgaaaattaaaatttatgtaaatgaaatgtaattggtacgatttttatttttaaattttatattttaatttttattttaaaaagtatttatattttatgtattttcgtagttatatatatataatatatagtatacgtatgaatatagtatatatacgagtatagtatatatataaacgtatagtatatatagtatatagatgagtatatagtatatatataaacgtatagtatatatacgtatatatatgtatatatagtatataaacgtacggtatatatacgtatatatatgtatatatagtatatatataaacgtatagtatatataaacgtatagtatatacgtatatatagtatatatacgagtatatagtatataaacgtatagtatacgtatatatatgtatatatagtatatatattagtatatagtatatatataaagatatagtatatatatgtatatatagtatatatacgcgaatatagtatatacgaatatagtatatatagtatatatataaatatagtatatatatgtatatagtatacgtatatatagtatatatatgaatatagtatatagtatatatatgtatatatagtatatacgtatgtatagtatatatgaatatagtatatatataaatatatagtatatatatgtatatatagtatatatatttatgcgtagtatatatatgaatatagtttatagtatataaatacgtagtatatacgttgtatacgtaagtatttatttgtatatatatatgcgtatatatacgtatatttttataaaattggatgaaaataataagtatatttaagtaattacgatatttgtatggattaggttaaagtttcgttaagattttttaatgtttttatggtttgagtttcgtttttgtttttatttttattgtttttcggttttgtttgtgttttgttttttagaggagggggtttagatggtgcggtttgagtgtgcggtcggcggtatttgggatatattcgtagggtgggcggggtgtgttttaggtttaattttatttttttattatgatagagatgtttttgtgaggttggtttttttggcgtttgtttttacggttttcgtagcgtgagttacgatgttttttatattttatttattttcgatatattttatttattgtgtgttggtttagttagagtgaggaaggagtttggttatattggagatggcggtagttgagtagatatgtttttacgagtagtttgattttttggtgtgtttttggaaggaagattttggggatttttttatcggagtatatttagggattatttttgttcgttttttggggattttttaagaaatgtggagttttcgggggtcgtgtattgatgcggggagtgtgggaagtttggcggttggaggggtgggtggggggtagtgggggttgggcggggggagttttggggtaggaagtggtttcgggagattttggatggaaaagttaggaggattgatagtagatttgtagaattatatagagaaattaggaatttttaaattttatgttaattgatttattttttttttttgttttttggggtatttttttttttttttttttttttgttttttttttatttttttttagttttatgcgtttagaaattaaattaaattttttttttatgtaataggggggtagtgataaaagtaagaacgtacgaagttagtttggagattattacgttttgtttttcgttatttatcgttttgattggattttgttttttatttgtttttgttgtttgggttgagttgagggtggagttttttggggggtattggttattgagtttttttggagaagttagaggggagtggagaaggttattgttcggtttggtttttggggatagtggttggtttttagaagttttgagggcggaggggggggttgggtagggtttttttaggtgttaggagggtgttcggaggttataggagggggtttttggttggtttgaggttggtcggaggggaaggggttagtaggtgtgtaaatagagggttttattaggttggggtagggtggtcgtttttcgtatatttgaggaatttttttttttttttcggtgatattttgttcgttttttagtattttgttttgtttttaggaggt

SEQ ID NO: 384 - DNA, 6235 bp, Artificial Sequence
  chemically treated genomic DNA (Homo sapiens)
tttaaggagtattatagaagtaatttatagtttttattgtagtttgtaatttttttttttttttttttttaatattgaatgagatcgaatgttaggtttatgtagtttttggttaatgttaacgaaaagtttaacgtttcgttcgcgcggggatagttcgttcgtaaagcggggtagttcgtaggcggtcgttttttggttttacgttaagggagggcgcgttaagttttttttattcgtgtatattgggggcgtcgttaggacgtaatttagtttaatttggatatttttggttttagttttcggatatttttttttttttttcgtcgtaatttgttaagtttttaagtttgtttttttgtgttatttttttttttcgttgttttttagttttcgacggtttttttttaaaatgtttgtaattgttgcgttagtatgagttggtatttattgttaacgtggtttatgattttttgtttaagttgtgttatttgttttttgagtatgttggtcgtggacgttagtttcgagttttgagtttttaaggtttttatttttttttttagtcgggcgattttttttagttttttttttcggtatttggaggtagcgatgcggttttttatgcgtttttttttcgttttgattcgtttttgggattttatgtcgatgggggataggggcggtgtttcgtcgggtatttcgggtattgtttgaggttttttttttagggtttgtagtcgcgggtgttgtacgggtatttgttggggtaggtggtgcggcggttgttgttgttgttggggttgcgcgggaaaggttaggtcggtcgcgtcgtaggagggcgtttcgtcgtcgttgtttagcgcgtttgggttgaagttgttgaggtttgcgtagatcggcggttcgttgtgtaggttggcgttgaagtcgtcgttgtcgttgttttttgttatcgaggttatcgcgggagttattatgtttgtttcgttgatcggttgcgtcgtcgacgtgacgttgggtagcgtgttttggttgtgtagttcggttagggcgcgtacgaagttttcggcgaagtttttttgtttatttgttacgtttttggggtataggaattgggtgggggtcggcgtggtggtgatgtgttcgttgttggattggattattaggcgttttagttcgggcgacgttagtttgagtagttttacgtcgggcgaggtgaggaggttcgagtttttggcgcggaggtgcggttttaggttttttattgggtcggttaggtttagggttatgttttgttttaggattttggggttattgtagttataaggttcgttttcggacgggaggaacgaggcgttgagggtatcgttatagaaggtcgtttttatttttgtagttatagaatagttcgttattttacgtgaggttagtttgggttgcgcgtataagtttcggggtcgtaatagggttgtggtaagcgggggatattcgcgtttttcggagtttttgatagggaaagtttttttaagagcgtacgtattcgttggttgtcgttttcgttgcgttttttttattagttcgttttagggagcgtagggttaattaagatgtttttcgtatttttatttgtcgattcgcgcgcgttattcggttttgaaaagtcgcggttatttattgagcgtttttcgtgcgtagcggtttttcggagttcgtaggcgaatttattttttagagtagcggtttttttcgcggagcggattagtgcggattttgtagtggtcggtcggcggcgggttttggtcgttcggatttcgacgatttgttttttttttcgttgttagggggagggggcgttcggtagtcgcggttcgcgttcgtttaagtttaataatcggtgcgagcgaagttgagcgtacgtttttttttttttgcgtggtttttcgtcgttttttggtttttatcgtcgtggagaagtttaagacgtaggaaaggtttgtaaaagttggtttcgggattttgttatttgttttcggtttttttagtcgggaaagttttttgttgttgtagtcgttcgtcgatttttttcggcgggcgcgtgggtatcgttgtttttcgtcgttgttaatagcgtttgggtagtagggtttttttttcgggggcggttggagattaggttttttggatattttcgaaatattagttcgggagttataggcgttagttttgggtagttagagagaaggtgaaaagaaaataagatttgtagttcggattatattgtcgatttggttggttggttgtgtttgtttgtttgtttgatttcgcgtatttttattttcgtttcgttgttttagttatatttagtgtaattttgagtttttatttagttcgagtttaatatttatttgttattagttaatttttaaaaatagtttatgatgttattttaaggtttttttattggttcgcgtcgtttttaggggggcgggttcgttcgttattatggagattttattttagaagatttttttttgggttcgcggaggtttacgggatgaggtaatgtttcgttgtttttttatagtcgggttttttttttttttatttttttttttgtcgtacgtttttcggttttttttttttcggtttttttttcgggtcgtttttttcggttcgttcggtgtattgtgggttgacgttttggggtttgattgtttagtgacggtggttgtcgcgagcgggcggacgttcgtaatttttgatggaggggggtttaagtttacggttgcggacggggatgcgggggatgtagggattcgggaggttagggaatttggttagttgttttgggttaggggtgcgggcgaggggtggttgttgtttttttatttgtggggttcgaagttatttatcggcggtcgttatcgcgcggggttggaggttgagaatttaagtacgttgttattttttcgtattttcgggggggcgggaatatcgtttttaaggtggttttgtgaagttttaggtgggggcgagtttaaggggatttaagtttaggggcggtttttcgagagtcggttttttacgttgagaatatttcgaagtttgtatttcggttaagtttaggagcgacggttcgcggggtcgtttggttgttcgtagaagtcgagagatttgtattgttcgaaattggacgtttagttgagttttcgttgtattttattttatttttcgggatcgtgggggaaagggcgcgggggtttatagttttgtttcggaggggtagtttttatagtgggcgtaattggtgggtaatagggtttagatgggaataagcgtgtaggcgattcgaaattcggggaatttcggtgttagtttattttttttttcgttttcggataatacgtatacgtttaatataatacgtataatataacgcgcgcgcgcgcgtatatatatattttattcgcgtcgagttgttttcgggaaaataagtttagaaggcggcggatattcgtataaagttacgtagtagtattcggagttcggggtagaatttggattttaaatttttgtattttcggtcgggtggtgggcgtatattttgggtagtttttaggaagcgttagatatatgtaagtggtttttttttcgcggttattttatttttttttcgttttttattttttagggacgaaagtgtgtggtggaaagaatttcgaagtcgggaattttggttttttcgtggttaggttattatagtgtgaagtaagtaaattacggaattttttcgagttttattttttttatttgtaggtggggtcggtgtcgtttattttattgggttgttaggagttagtgtgatagggtcgtttgtagtattagggaggtggtggttaaatagttcgttttttttttttgtttcgtagtttttattttcgtagagtttggataggatgttaggatataagagtgcgatttggtaggattaggtgtatttttttgtgagaagtatcgaggggaggaggggagggggaatcgggttagaagttagattttttttaagtttttgtttaaaattggggtttgaagttggatttgtagtagtttaagtttttaggttttaaatttagatttcgttgtttttgaatttggaatttagttttgggtttattgtttttagttttaaggtatttgcggttttgagtgtttagaaattaatagtagttggtattagtgggaaatttgttaatttttttttatttcgggtatttatttagtttttattgatttgtagagggtaattgaaagtttattgtgagttaggtattgagttggggagggggtggggtaggtaggtatatagtgatgataagatttagttgtttttttaaggagagaatatttttttttgtttgttgttttgaattattttttgttgtatttagggagttggtgttttaaatattttttaataatagtaataaaaattagttttatgtattaaatatttattatttgttaggtatttttttaagtaatttaaatacgttgttttttttttataattgttttgagagatatatattattatttagatttaatatgtgaggaaataggtttagagaggttaagtatttttgttgaggttatataggtagttggaaattgattttaggtttgtgttatatttttttgtattttttttattttggtaaatttttttgtggagtattagttatttgtagaggaaatagcgtttgtggtatagaagaaatttttttgtttgattttttgattgtaatttcgtttagagtttttgtatttagaaattttaagatttaggattttgtataaatatatattttttgtttaaggttttgtgtgtttttttttgttttatgtggtttagtaggttgattttttttttatgttgagaaatagtatattttatttaaaaaaataataaatttgtttatgttaacgtttttgtttggaagtttttattggtttttttttataattaggagagtttcgatttttatgttttggagaaggggttttttataatttaattttttttttttttagttttattttttatttttagttttgttaggaaaggtagtgttatgttgttttaataaataattttaatatattagtggtttattttagtgaaagttggttatttttgttatatgatcgttgtaggttggtagggtagttttgtttattgtagttattaaagggtttaggttgaaggaggtttcgtgttgatatttttttttatagttattttgattgtggggaaggaattcggaatattatggttgttagagtatttatttatggtatatattatttttgtttatatattattggttaaagtagttatatggttatgtttttttagattattataattttattaggtgttttaaagggttttttaggaatatttggggaataatattaaagattttgtttttttttttgtttattaaatgtttggtttatttttttttttttggtggaatttttttattttttatttaagggaaataattttaaagatttatttagttatagtattaagttgttttgtttattgttttttatgatttttggatttgttttcggagagttttttttttttatagttaaagtaggtattggaaaatatgtttttaaataagtttttaaaagttggggagatgtagagtgatattaagttttgaatatgtgtaggtaggttttttatttatttgatatgaggtgttttatgtgataatagttataaagtttttttttagatatatttttttggtttgttatatttttttgtttttttgtttttttgtttgttgatttttttgttttttttttgtcgttttatttttttgttttttatttgattttgagtattttgggtttattgggttttgatgggagagttagatttttttttttttttttagagttattttgtttagttgaaagtatatattgggtaagattttaattgatttttttttttttttttttgagacggagttttatttttgttgttttggttggagtgtaatggtatagtttcggtttattgtaatttttatttttcgggtttaagcgatttttttgttttagttttttgagtagttgggattataggtatgcgttattacgttcggttaattttgtatttttaggagcgataggatttttttat

SEQ ID NO: 385 - DNA, 6235 bp, Artificial Sequence
  chemically treated genomic DNA (Homo sapiens)
atggagaaattttgtcgtttttaaaaatataaaattagtcgggcgtggtggcgtatgtttgtaattttagttatttaggaggttgaggtaggagaatcgtttgaattcgggaggtagaggttgtagtgagtcgagattgtgttattgtattttaattagggtaataagagtgaaatttcgttttagaaaaaaaaaaaaaaggattaattaagattttatttagtatatatttttaattggataaaatggttttgggaaaaggaagaaaggtttaatttttttattaaaatttaataagtttaaagtgtttaaaattaagtgaagagtaagagagtgagacggtaaaagagagatagaggagttaataggtaggagagtaggaaagtaaagagatatggtaaattaaagaagtatgtttggaaaagaattttgtggttattgttatatggaatattttatattagatagataagaagtttatttatatatatttaagatttaatgttattttgtatttttttaatttttaaaagtttatttaaaagtatattttttaatgtttgttttagttgtggaaaaggaagatttttcgagggtaaatttaggagttatggaaaataatgggtagggtagtttggtgttgtgattggatgggtttttaaggttgttttttttgaataaagaatgagggaattttattaggggaaggagagtagattaaatatttggtgaatagaaagggagatagagtttttagtgttattttttaaatatttttggagagttttttgagatatttggtaggattatagtgatttaaagaggtatggttatgtgattgttttggttaatgatgtatgggtagaagtgatgtgtgttataagtggatgttttgatagttatgatgtttcgagttttttttttatagttaggatagttgtgaaaaggggtattaatacgaggttttttttagtttgagttttttagtgattataatgagtagagttattttgttaatttataacggttatgtagtagaaatgattaatttttattggaataagttattgatatgttagggttgtttgttagggtagtataatattgttttttttgatagaattgggagtgagagataaggttggagagagaaggagttggattgtgaaaagttttttttttaaggtataggaatcggaatttttttgattgtaaggaaaagttaatgaaggtttttaagtaggggcgttaatatgaatagatttgttatttttttggatgaaatatgttattttttaatataaggagaagattagtttattaaattatatgaggtagagaggaatatatagaattttaggtaaaagatatatatttatgtaaagttttaagttttgaaatttttaaatataagagttttgaacggagttatagttagaggattaggtaagaaaattttttttatgttataagcgttattttttttgtagataattaatattttataagaaagtttgttagagtagagaaaatataaaggaatgtaatatagatttgaggttaatttttagttgtttgtgtgattttaataaagatatttaatttttttgggtttatttttttatatgttaaatttggataataatatatgttttttaagatagttgtggggagaaaatagcgtatttaaattgtttaggagaatgtttggtagataataagtgtttaatatatgaaattgatttttattattgttattaaaaaatatttagaatattaattttttgaatataatagaaaatgatttagggtaatagatagaggagaatgttttttttttgaggaagtaattggattttgttattattgtatatttatttattttattttttttttagtttagtgtttggtttatagtaggtttttagttattttttgtagattagtgaaagttaggtgagtgttcggagtgaagaaaagttggtaggttttttattgatattagttgttgttggtttttgaatatttaaagtcgtaaatattttagggttgggggtaatgaatttaaggttgaattttaagtttagaagtagcgaagtttgaatttagaatttaggaatttaaattgttgtaggtttaattttaagttttagttttagatagaggtttgggaaagatttgatttttaattcggtttttttttttttttttttttcgatgttttttataggaaagtatatttggttttgttaaatcgtatttttatattttggtattttatttaggttttgcgaggatggaaattgcgaggtaggggagggaagcgggttgtttggttattatttttttagtgttgtaggcgattttgttatattaatttttggtagtttagtgaggtggacggtatcggttttatttgtagatgagggaaatgaagttcggaggagtttcgtgatttgtttgttttatattgtggtagtttggttacgaaagaattaggattttcgatttcgggattttttttattatatattttcgtttttaaggggtggggggcggggggagaataaaataatcgcggaaaaggaattatttatatgtgtttagcgttttttagaggttatttaggatatgcgtttattattcggtcgggagtgtagagatttgaagtttaggttttatttcgggtttcgagtattattgcgtgattttatgcgagtgttcgtcgttttttgggtttgttttttcggaagtaattcggcgcggatggagtgtgtgtgtgcgcgcgcgcgcgcgttatgttgtgcgtgttgtgttaagcgtgtgcgtgttgttcgggggcgggagggggagtagattaatatcggggtttttcgagtttcggatcgtttatacgtttgtttttatttggattttgttatttattaattgcgtttattataaaaattgttttttcgaggtaaagttgtgaattttcgcgtttttttttttacggtttcggaggatgaagtggggtgtaacggagatttagttgagcgtttagtttcgggtaatataaatttttcggtttttacgagtagttagacgatttcgcggatcgtcgtttttgaatttgatcgagatgtaaatttcggagtgtttttaacgtggggggtcgattttcgggagatcgtttttaaatttaagtttttttaggttcgtttttatttgggattttatagagttattttaagggcggtattttcgttttttcggaagtgcgggggggtggtagcgtatttggatttttagtttttagtttcgcgcggtggcggtcgtcggtggatgatttcgggttttataagtggggaaataataattatttttcgttcgtatttttggtttaaaataattggttaggttttttggtttttcgggtttttgtatttttcgtattttcgttcgtagtcgtgaatttgagtttttttttattagaggttgcgagcgttcgttcgttcgcggtagttatcgttattagatagttaaattttaagacgttagtttataatgtatcgggcgggtcgggaaaaacggttcggggaggggatcggggaagagagggtcgagaggcgtgcggtaggggggagggtaggagaaagaagggttcgattgtaggagggtagcggagtattattttatttcgtgagttttcgcgggtttagagaagaattttttagggtggagtttttatggtgacgggcgggttcgtttttttgagagcgacgcgagttaatgggaaggttttggggtgatattatgggttatttttaggggttgattggtagtagataagtgttgagttcgggttggataagggtttagagttgtattgagtgtggttgaagtagcgaggcgggagtggaggtgcgcggagttaggtagatagatagatatagttagttagttaggtcggtagtatagttcgaattgtaaattttattttttttttattttttttttaattgtttagagttagcgtttgtggttttcgggttggtgtttcgggagtgtttagagagtttggtttttagtcgttttcgggaggagagttttgttgtttaggcgttgttgatagcggcggaaagtagcggtatttacgcgttcgtcgggggaagtcggcgagcggttgtagtagtaaagaattttttcggttgggaggatcggagataagtggtagagtttcggagttaatttttgtaagttttttttgcgttttaggtttttttacggcggtaaagattagaaggcggcggagagttacgtaagagaagaaggacgtgcgtttagtttcgttcgtatcggttgttgaatttgggcgagcgcgagtcgcggttgtcgggcgttttttttttttagtagcggaggaggggataagtcgtcggagttcgggcggttaagattcgtcgtcggtcggttattgtagggttcgtattgattcgtttcgcggggagagtcgttgttttgggaagtgagttcgtttgcggatttcgaggaatcgttgcgtacgaagagcgtttagtgagtgatcgcgattttttaaagtcgggtagcgcgcgcgagtcgataagtaagagtgcgggaggtattttaattaattttgcgttttttggagcgagttggtgaggagggcgtagcggggacgatagttagcgggtgcgtgcgtttttagagaaattttttttgttaaaggtttcggggggcgcgggtgtttttcgtttgttatagttttgttgcggtttcgaaatttgtgcgcgtagtttaaattaattttacgtgaagtgacggattgttttatgattgtaaagatggaaacgattttttatgacgatgtttttaacgtttcgtttttttcgttcgagagcggattttatggttatagtaattttaagattttgaaatagagtatgattttgaatttggtcgatttagtggggagtttgaagtcgtattttcgcgttaagaattcggatttttttatttcgttcgacgtggggttgtttaagttggcgtcgttcgagttggagcgtttgataatttagtttagtaacgggtatattattattacgtcgatttttatttagtttttgtgttttaagaacgtgatagatgagtaggagggtttcgtcgagggtttcgtgcgcgttttggtcgaattgtatagttagaatacgttgtttagcgttacgtcggcggcgtagtcggttaacggggtaggtatggtggttttcgcggtagtttcggtggtagggggtagcggtagcggcggttttagcgttagtttgtatagcgagtcgtcggtttacgtaaattttagtaattttaatttaggcgcgttgagtagcggcggcggggcgtttttttacggcgcggtcggtttggtttttttcgcgtaattttagtagtagtagtagtcgtcgtattatttgttttagtagatgttcgtgtagtattcgcggttgtaggttttgaaggaggagttttagatagtgttcgagatgttcggcgagatatcgtttttgttttttatcgatatggagttttaggagcggattaaggcggagaggaagcgtatgaggaatcgtatcgttgtttttaagtgtcgaaaaaggaagttggagagaatcgttcggttggaggaaaaagtgaaaattttgaaagtttagaattcggagttggcgtttacggttaatatgtttagggaataggtggtatagtttaaatagaaagttatgaattacgttaatagtgggtgttaatttatgttaacgtagtagttgtaaatattttgaagagagatcgtcgggggttgaggggtaacgaagaaaaaaaataatatagagagatagatttgagaatttgataagttgcgacggagagaaaaaagaagtgttcgagaattaaagttaagggtatttaagttggattgggttgcgttttgacggcgtttttagtgtgtacgagtgggaaggatttggcgcgtttttttttggcgtggagttagggagcggtcgtttgcgggttgtttcgttttgcggacgggttgttttcgcgcgaacggaacgttggatttttcgttaatattgattaagaattgtatggatttaatattcgattttatttagtattaaaggggggagggggagggggttataaattgtaatagagattgtagattgtttttgtagtattttttaag

SEQ ID NO: 386 - DNA, 6140 bp, Artificial Sequence
  chemically treated genomic DNA (Homo sapiens)
attcgtttgagattttataaatgttaattggaatttaagttgggtttcggttttttaattagtgatattttgttcgagatgtggtttttggttttttgtgtgttaagatatttttgtttttttattttagttttagttttttttagtaggtttttttaggttttgttgaaacgtttgtatgattttttataaggtaacgtgatagttaaaaattaaattttggtcggacgtgggggtttacgtttgtaattttagtattttgggaggtcgaggcgggtggattatttgaggttaggagttttagattagtttgattaatatggtgaaattttgtttttattataaatataaaaaagtagtcgagtatggtgggtatttgtaatttgagttatttggaggttgaggtaggagaattatttgagttcggggaggtagaggttgtagtgagtttagatggcgttattgtattttagtttgggtgatagagcgagattttgttttaaataaatgaattttaatatagttgttggtggtaaggtttttttttatgattaagggacggtggttattttttttaagtttttttatttgtaaaatgggtataatttagtggttttttttaatagggttggttaggtatatatggttattagttttatttgttgtgtgatttcggttattaatgtttatattttttagggtttttaatgagttggaagtttaaagcgtagggttttaatagtaaagggtagagtaggtaggagaagtaggaagtttcgggttaaagttttgaaagtgagggagtttaaggttagattatttttgtatagtttttttaaaaggttgtgtgatgttaagttagttgtttaatttttttgaattttagatttttttaaagtagggagtaggatgttgggaggaggaggagaagcgaattttagggagatatttggaaaattttagttttggaggtagattttttgggttagattttatttgtgttaatttttttttggtattgggtttattagtttgttttgggttttagtatttttcgatttattaaaagagaaaagtttatattgtaagttaagtattgttttgtaaatataaatttttttaatcgttataattttatggggtaagtttttcgattgttttttttattttatacggataggtaaattaaggattaaaaggttaaaaagtttattaagtttttgtttttttttttttgttttgggttggggttgtgttttttttatttcgaaattttttttttttaaaaggtaagggggtattagttagttttaaacgtagattaaagattttaagatttttttttaatttggatattagtcggtttcgcgttaaggcgcgtttagggggcgttcgttgcgcgttagatgtgcgggtcgtttttagatattcgttttttgttttttttaataaggggaggagttagggatagagggaggagagaaaggcgggggtgtaggggggaagcgaattaggtttcgtttagttcgttaggtttcggcgggggaagaaggaggcggagagtcgagttggcgtaacgagattttattgaaaatagaaaatcgggcgaattaaggattataaataggaatgtggattcgtagtaaaataaaataaaatagaataaaaaagggaggggggatcggtcgaaagaatcgaaggggggagcgagatcgaggaaaggggcggagaattttttttttttttttttatttttttaaaaaattaatataagaaaatatatatatatataattaacgtttgttttcgagtagaaatataaatagggtagaatcgaatattttgttttttttttttttaaagaaaaaaaaaaaaaagtaaaagtaaaggaaaggtagggtttgaggttgcgttttttcggagttttttttcgcggcgcggtgtataaaggggtagtcgagacgcgcgggtttgtgtaatacggggcggtcgcgcgggggaaagaggtagcgcgagggcgggggggttatgcgttcgttttttcgggagtagggggtttagtttgtcgagttttgggtattttcggggggggggaattttcgggggtcgcgttttttttgagtttttgggtatattcggggagggggggtttttagggtcgtattttttttaagttcggggcgtttacgatattttttcgcgagttcgttttttggggagggtggtcgcgtatgcgtttcgcgcgcggatttagtacgcgggtatttggtgttggggtagtagttggtagtcgttgttgacgtggttgaggattttttgtttgagttgcgttatttgttcgcgtagtaggttcgtcgtggacgttagtttcgtgttttgatttttgagggtttttatttttttttttaggcgcgagatgcgttttagtttgcgtttgcggtatttggaggcggcgatgcggttgcgtagtcgtttgcgtttcgttttgatgcgtttttgcgtgtttatgtcgatgggcgataacggcgggttttcgtcgaagttcggtacgtcgggtatcgtttgtggttcgtttttgagcgtagttaggcgcggcggttttaacgcgtttgggggtggcggcggcgggaagggtataggttcggtagcgaaggcgatcgtcgcggcgtttttcgcgttttcggcgtcgttcgcgtagttgtttaggttcgcgtagataggcgtttcgggcgcggtcgtcgtcggggttagttcgtcggggggcgcggagttcgtggtcgtgttcgagggtttttcggcggcggcggcggcggcggtagcggtcgcgttcgcgtcgagttggttttgtttgtgtaaattttttagggttttgacgaagttttcggcgaatttttgtttttcgttggtcgttattttggggtagaggaattgtgagttcgtcggcgtggtggtgattagttcgttggattggatgatgaggcgttcgagttcgggggaggttagttttagtagttttaggtcgggagaggcgagtaggtcgtcggggggtgtcgcgttgggggcgtcgtcggcgcgtaggggggtaggaggcggcgcggtcgtaggtttgagcgttgtcgttatttgtttatttaggtttagcgttagcgcgtttttttttattatgttgtcggtcgcggtcgtcgggggcgtttcggggaataagcggttcggggacgcgaagttgtcgtcgttgttattggcgtcgtcgtttaggtcgtttagcgttttatcgtcgtagaagggtgtttttatttttcgtttttttcgtcgcgtcggttcgggggggagtggtcgcggtttttcggggggttcgcgttttttcgttcgttcggttttgcgttcgtttcggtcgcggtcgtagcgttcggttttttattggcggcggtttttgcgtcgcgttatttgtgcgtttttttatagtttcggttcggcgcgatgagtttatcgttttcgttcgttattgggtgcgggtgacgtcgtttatttgtatggaggggcggggttaagtcgtcgacgttcgttcggtcgtcgttgtttcggcgacgcgcggtaaacgttataatagcgcgttgttttgtgggttgacgttatgggggcggtcgcgcgttcgggtcgggttatttcgtttcgggatcgttgtgtacgatcgattttttcggcgtcgttttcgttaaggtacgtttcgggtggcgtgatgggttcgggttattaggcgttcgttcgtttcgaggtttcgtttcgtgttcgcgcgtggggtttcggtcgggcgggggcgggggcgggggcggtgtcggttttcggggattggagggggatggggtttcgtatggttaaataattttttggcgttttttgttttgttgtgtcgttagggttttttttagcgcgttttttggagaggttttgtgcggatacggggttggaggtttggtggggttgtgttcgggggttcgtcgggggtgtggggaggtttgcgttttttattttttttttttttttttttttttttttttatttcgcgtgtgattgtttaggaagagacgggaggggagaggagggtcgttagaagttgttgaaagcgtttggattttgattatttttattgagtgcgttttagaattaggagttttattttttgtttttatagatgggaaattgggtttagagaggtggagtgattatttttcgagagttagttaggagttatagtagggttcgggttgtgattaggtttgagtttttgtttatttttagaattttagaatttgggagtttaggtttttgcgtagtttttttttttcgtcgtttacgttttaattttaggtttgttagggttgtgatgttttgggcgagggtgtttaattttaggggttgggttgatgaggtaggaatgtcgggtataattattatatgtttgttattattattatggttgttagggtttaatgagttattattaagattggttgggaagggggtgtgagggaggagagatggatttattttattaatatttataagggatttttaggatatttggatttgatttatagtttttgtatgtatttttttagttttttatttttgtttgaatggagtttatatttttttttttttgatttttttttttttattttttttgatttttggttttttagttgtaggattaatcgtatttttgggtttttgtacgtgttatgttttttgtttggtattttttttttttagtgtaaagatgtgtttttaggaagtgttttatttttagattttatttttttattgtagtttttgaatttgttagaatgatggagtggattatagtttttgaaggttagggatattgtttatgttgagtttgttgatagggtttcgtatagaatggatgtttagtattaaaggtgaatgcggggttgggtgtggtggtttatgtttgtaattttagtattttgggaggtcgaggtaggtagattatttgaggttagtagtttaagattagattggtcgaaatataaaaatataaaaaaaaaaaaaaatacgaaaattaatcgggtgtggtggtgtgtatttgtaattttagttatttaggaggttgagatatgagaatcgtttgaattcgggaggtagaggttgtagtgagttgagattgtgttattgtattttagtttgggagatagagtgagattttagttttaaaaaaaaataaaaaataaaggtgaatgtaataaaaggttgtttgtgtgggtggtttttagttttagtttgtttgtttggttagtgggtatgcgttattttttttttattttttttatttatttggttttgtttttaattggggtatgaaggttataagggaggttgtttttattattaagagaggtggtttgtcggttatacgcggtgatttttgtttgtaattttagtattttggaagtttgaggtaggtatttgaggttaggagtttgagattagtttgattattatggtgaaattttatttttattgaaaataaaaattaggttgggcgtagaggtttacgtttgttattttagtattttaggaggttaaggtaggttgattacgaggttaggagattaagattattttggttaatacggtgaaattttgtttttattgaaaaataaaaaaaaaaattagtcgggtatggtggcgggcgtttgtagtttttagttattcgggaggttgaggtaggagaatggtatgaattcgggaggtagagtttgtagtgagtcgagattatattattatattttagtttgggtaatagagcgagatttcgttttaaaaaaaaaaaagaaaaaagaaaagaaaaaaaaattagttaggtgtggtggtaggtgtttgtaattttagttagtcgggaggttgaggtaggagaatcgtttgaattcgggaggtggaggttgtagtgagtcgagattgcgttattgtattttagtttgggttatagagtgagatattgttttaaaaaaaaaaaagaagaaaaaaaaaataggttgggcgaggtggtttatatttgtaataagtattttgggaggttgaggcgggtaagttatttgaggttaggagttcgagattag

SEQ ID NO: 387 - DNA, 6140 bp, Artificial Sequence
  chemically treated genomic DNA (Homo sapiens)
ttggtttcgaatttttgattttagatgatttgttcgttttagttttttaaagtgtttattataggtgtgagttatttcgtttagtttattttttttttttttttttttttttttgagatagtgttttattttgtagtttaggttggagtgtaatggcgtaatttcggtttattgtaatttttatttttcgggtttaagcgatttttttgttttagtttttcgattagttgggattataggtatttgttattatatttggttaattttttttttttttttttttttttttttttttttgagacggagtttcgttttgttgtttaggttggagtgtagtggtgtgatttcggtttattgtaagttttgtttttcgggtttatgttatttttttgttttagtttttcgagtagttggggattataggcgttcgttattatgttcggttaatttttttttttattttttagtagagatagggttttatcgtgttaattaggatggttttgattttttgatttcgtgattagtttgttttggttttttaaagtgttgggatgataggcgtgagtttttgcgtttagtttaatttttatttttaatagagatggggttttattatgatggttaggttggttttaaatttttgattttaaatgtttgttttagatttttaaagtgttgggattataggtaggagttatcgcgtgtggtcgataggttattttttttggtgatgaggatagttttttttatggtttttatgttttagttgggggtagagttaggtgagtaaggaggatagaaaaggagtaacgtatgtttattggttaggtagataaattgaggttagagattatttatataagtaattttttgttgtatttatttttattttttatttttttttgagattggagttttattttgttttttaggttggagtgtagtggtataattttagtttattgtaatttttgtttttcgggtttaagcgatttttatgttttagttttttgagtagttgggattataggtgtatattattatattcggttaattttcgtatttttttttttttttgtatttttgtatttcggttagtttggttttgaattgttgattttaagtgatttgtttgtttcggttttttaaagtgttgggattataggtatgagttattatatttagtttcgtatttatttttaatattgagtatttattttatgcgaggttttgttagtaggtttagtataggtaatgtttttgatttttagggattatggtttattttattattttggtagatttagaggttataataaaggagtaaagtttgagggtggggtattttttgaagatatatttttgtattgggggaagggagtattaagtagagagtatagtacgtgtaaaggtttagaggtacgattagttttgtaattgggaggttaaggattagagagagtgaggggaaggaggttagggaaaggagggtgtgggttttatttagatagaggtggggagttggaggggtgtatgtagaggttgtaggttagatttagatgttttaaggattttttgtgagtattggtggggtgggtttatttttttttttttatattttttttttagttagttttaatagtggtttattaagttttaatagttatgatagtggtaataagtatgtaataattatattcggtatttttgttttattagtttagtttttggagttgggtattttcgtttaggatattatagttttggtagatttggggttaaaacgtgggcggcggaaggaaggggttgcgtaggggtttggatttttaggttttagggttttaagggtggataagagtttaggtttagttatagttcgggttttgttgtgatttttagttaattttcgggggatggttattttatttttttgagtttagttttttatttgtaaaggtaggaagtaggatttttggttttagaacgtatttagtgaaaatgattaggatttaagcgtttttagtaatttttggcgattttttttttttttttcgtttttttttgagtaattatacgcggggtggagggagggagggaaggaaggagggagggtgaggaacgtagatttttttatattttcggcgagttttcggatatagttttattaggtttttagtttcgtattcgtataaagtttttttagaaggcgcgttaggggaggttttggcggtatagtagagtaggaggcgttaaggagttatttagttatgcgggattttatttttttttagttttcggaggtcggtatcgttttcgttttcgttttcgttcggtcggggttttacgcgcggatacggggcggggtttcggggcgggcgggcgtttggtggttcgggtttattacgttattcgggacgtgttttggcggaggcggcgtcggggagatcggtcgtatatagcggtttcggggcggggtgattcggttcgggcgcgcggtcgtttttatgacgttaatttataaggtagcgcgttgttgtggcgtttatcgcgcgtcgtcggggtaacggcggtcgggcgggcgtcggcggtttggtttcgtttttttatgtaaatgagcgacgttattcgtatttaatggcgaacgggggcggtgagtttatcgcgtcgagtcgaggttataagagggcgtataagtggcgcggcgtaggagtcgtcgttagtggagggtcgggcgttgcggtcgcggtcggggcgggcgtagggtcgagcggacgggggggcgcgggtttttcgggaggtcgcggttattttttttcgggtcggcgcggcgggggaggcggaggatggaaatatttttttacggcgatgaggcgttgagcggtttgggcggcggcgttagtggtagcggcggtagtttcgcgttttcgggtcgtttgtttttcggggcgttttcgacggtcgcggtcggtagtatgatgaagaaggacgcgttgacgttgagtttgagtgagtaggtggcggtagcgtttaagtttgcggtcgcgtcgttttttatttttttgcgcgtcgacggcgtttttagcgcggtatttttcgacggtttgttcgtttttttcgatttggggttgttgaagttggtttttttcgagttcgagcgttttattatttagtttaacgggttggttattattacgtcgacgagtttatagtttttttattttaaggtggcggttagcgaggagtaggagttcgtcgagggtttcgttaaggttttggaggatttatataagtagaattagttcggcgcgggcgcggtcgttgtcgtcgtcgtcgtcgtcgtcggggggttttcgggtacggttacgggtttcgcgtttttcggcgagttggtttcggcggcggtcgcgttcgaagcgtttgtttacgcgaatttgagtagttacgcgggcggcgtcgggggcgcggggggcgtcgcgacggtcgttttcgttgtcgaatttgtgtttttttcgtcgtcgttatttttaggcgcgttggggtcgtcgcgtttggttgcgtttaaggacgagttatagacggtgttcgacgtgtcgagtttcggcgagagttcgtcgttgtcgtttatcgatatggatacgtaggagcgtattaaggcggagcgtaagcggttgcgtaatcgtatcgtcgtttttaagtgtcgtaagcgtaagttggagcgtatttcgcgtttggaagagaaagtgaagatttttaagagttagaatacggagttggcgtttacggcgagtttgttgcgcgagtaggtggcgtagtttaagtagaaagtttttagttacgttaatagcggttgttagttgttgttttagtattaggtgttcgcgtattgagttcgcgcgcggggcgtatgcgcggttattttttttaaggggcgggttcgcgggggggtgtcgtgggcgtttcggatttggagagggtgcggttttggggatttttttttttcgagtgtgtttaggaatttagagagggcgcggttttcggggatttttttttttcgagggtgtttaggattcgataagttggattttttgttttcgggggggcgagcgtatgattttttcgttttcgcgttgtttttttttttcgcgcggtcgtttcgtgttgtataaattcgcgcgtttcggttgtttttttgtatatcgcgtcgcggaagggggtttcgagggggcgtagttttaaattttgttttttttttatttttatttttttttttttttttttggaagagagaagaatagagtgttcgattttgttttatttatgtttttattcgggaataaacgttggttgtgtgtgtgtgtgtttttttgtgttggttttttaaagaaatgggaagaagaaaaaaaaatttttcgttttttttttcgatttcgttttttttttcggttttttcgatcggtttttttttttttttttgttttgttttgttttgttttgttacgagtttatatttttgtttgtaatttttggttcgttcggttttttgtttttagtaaagtttcgttacgttagttcggtttttcgttttttttttttttcgtcggggtttggcgggttgggcggggtttggttcgttttttttttatattttcgttttttttttttttttttgtttttagtttttttttttgttggagggagtagagagcgggtgtttgagagcggttcgtatatttggcgcgtagcgagcgttttttagacgcgttttggcgcggggtcggttgatgtttaggttggggaggggttttggggtttttgatttgcgtttggaattagttaatgtttttttgttttttgggaaggagagatttcgaggtggaaagggtatagttttagtttaaagtaggaaggaagagatagaaatttagtaaattttttaattttttggtttttggtttgtttgttcgtataaaatggggagaatagtcgaaaaatttgttttataaagttgtgacgattaagagagtttatgtttatagagtagtgtttggtttatagtgtaagttttttttttttggtggatcgggggatgttgaggtttaggataagttgatggatttagtattaggaggaagttggtataggtgggatttaatttaagaggtttgtttttaggattgggattttttaagtatttttttgaagttcgtttttttttttttttttaatattttattttttattttgaggaaatttaaggtttagagaggttgagtaattggtttgatattatatagttttttaaggagattgtgtagagatagtttgattttggatttttttatttttagagttttgattcgaggttttttgttttttttgtttgttttgttttttgttgttaagattttgcgttttgggtttttaatttattggggattttgagggatgtgaatattagtggtcgaggttatatagtaagtagggttggtggttatgtgtatttagttagttttgttagggagggttattgaattgtatttattttatagatgaagaaatttggagagaatggttatcgttttttggttatggagaaaggttttgttattaatagttatgttggggtttatttgtttgagatagagtttcgttttgttatttagattggagtgtagtggcgttatttaggtttattgtaatttttgttttttcgggtttaagtgatttttttgttttagtttttaagtagtttagattataggtgtttattatgttcggttatttttttgtatttgtagtagagatagggttttattatgttggttaagttggtttggaatttttgattttaagtggtttattcgtttcggttttttaaagtgttgggattataggcgtgagtttttacgttcggttagggtttggtttttagttgttacgttgttttgtgggaggttatgtagacgttttagtagggtttgaaggaatttgttgaagggaattgaggttgaggtgggagagtaggggtgttttgatatataagagattaagaattatatttcgggtagagtgttattggttgggagatcgggatttagtttaggttttagttggtatttgtgagattttaggcgagt

SEQ ID NO: 388 - DNA, 6234 bp, Artificial Sequence
  chemically treated genomic DNA (Homo sapiens)
atttaatttcggtatcgatggtttttatttttttattttaggtttttttttttagagtgtttgaggttttttggttttttggttttttttaggtttaaggcgttgattttagtttttggttttaatatttataggaatattgggattaagaaaattaattgtgttaattagtaaaattttttatttgagatgttattttaaaagtaaattatatgtaaaatatttaacgtggggagttttgtaatatgttttttttgttatacgattattatatatttgttcggagtttggggtttttaaattatataaggttttatgtgatcgttataaaatttttttattttttaaaggtagggtagtaaggattaagtttgattattgaaggtagttttgttgtaagtggtttttaatgttataaaagtagtttgggaagataggtttattaaataaattttttgggttgtaaattattagaagtaatcgtatgttatgtttatttgtttaattcgaaaggtatttatttggatgtttaaagaaattatgtagattaatattgtttttagtgtttataagaaagttggttgattttaaaggaaatttagggagttttttgaggaagtcggattgtagttgagtatatttttttgtggtttttttattttttttgtaaaaagttttttataggaatttgtgtttggaggaaaaggggttgtgatttgttaatttgaagatgggagattttaaaggaattttatttaattagttttgtattgttattttatgaatagagaagttaggtggttgtttagtgaggggtagggttggtattatattcgagtttttttgttttgtgttttttattttttagtggattcggcgatttttcggttttggagttattttgtgtttttttaatagtaggacgaatatataggcgatgatgagattgtaatgggataagggggagaggcgtggggagtttttgatgaaaatttgggtttttgaaattattatgatgaagggaggagtttgtattagtaggtgtaaggagtgtgagtttgagttttgtttattagatagtttaagtagttatatttttgaattttggttttttgtaggttagtttttggttaggtggtggtttttttttttttttttttttgtattgagatttttatttggtttttgattttggagtttttgatatagtttttattattgaagtagttgtggttttttatatagttttttttattacgttagtaaggggattgagtttttttagtatagttagggttaggtttatatatttttttgggaagttagtattttttttcgtggatcgtttttttatttttatagggtttttttaaagggtttttggatgattatattggttttttttttttagggtggggaattagagatgttaagattggttagttttttttttttaagagtttagggattcgttttaaaatattatttagataaacgtatgagttatgtgttaattgtaaaattatttaatagtatatttgttagaatattagtcggtattttgattttatttcggtattgttttttttttggttttattaagatttcggttttaattgggttttggtagtaataggttgtaagtggttaggtgtatagtattattttttagtagtgtggtgtggtgttggtggtttattttttttatgtatatatgttttaatatggaaggatagtttgtatatacgtagggtacgttattatgagatttttttatagagtatgaaattgaggattagagaagttagacgagtttttcgaagttttatagaaggttaatggaaaaaattagagttaagggtaaatatgttttatttgtttttttatattagtttaaatgtgaatggttgtttggaatatagtgttgagaaggatttcgaggttgtgtttaggtttagtggggaaaaagtgttttgatttgattattatatcgtgtatttagggtttagtttattttttataagtagttatttaaaatatgttttatttaaggtagggtcggggtggggaattttagaggattaatgatgtagtttgtattgttattagggtttattttaaagtaaattttgttgaagtttttttttgaataatttttattatttatgttaatatgttggattttgtaagttataaatacgaaggtatgagtattggtcgaattttaatagggaaattttatcgggaaggtgaagatttttttttattaagataataaatagaatttagaaggttcgtagtatggtggtttagaatatgtgggttttggatgggattttgttaaggggtgtgtgattttttcgaagtttttagggatgatattattttttggggtgtttatgttaattacgttagagataatggtttttgtatttattgtttggggttgttataataaagtgttatatattgagtggtttaaaataatagaaatttattgttttatattttcgggggttagaagtttgaaatttaggtgtgttaggattttgttttttttgaaggttttagggaagagtgttttttgtttttttcgaaggttttagggaagggtttgtttttttaggtttttggtggtttgtaggtgtagttttttaatttttttttttaagcggttttttgtttataaggatacgagttatattggatgaggggtttattaattgatggtttttgtaaagtttttatttttaaataaggttatattgtgaggtattgggagttaggattttaatatagtttttttggtggatataatttaatttttaataacgtttatataattttaagtagggtttggtattttgtgtgttttttggagagcggttgagttaggttttggtagtgtttaggttatcggtgattgtagtttttggacggtatcgtttattataggttttggaggttgtttttacggttttttgatagggtttttgttggtttgggggtttttgattaggggagcggtattaggaggggagagattcgcgtttcgggtttagcgtagtcgtttcgagtaggatcgggatttttattaagcgggcgtcgttttacgattttcgcgcgtttttaggattattcgggtacgtggtaggtcgtttgtacgttcgcggattatttttgtgataggaaaaggtacgggttatttggtaaattaaggtatagagttttaggcggaagttgggaaggcgtcgttcggtttgtatcggtcgaagggttattcgggttaggcgtatagggtagcggcgttgtcggaggattagggtcggcgtgtcggcgtttagcgaggatgcgtagattgttttaggttcggcgtcgtcgtatagggtatgcgtcgattcggtcgggcgggaatatttcgtttttttcgggtttcgttttagtttcgttttcgcgcgtttcggtttcgttttcgcgcgtttttttgttttttttaggttttcggtttcgtttcgttttagatttcgttttacgtcgttattttcgtgtttttcggtttcgttttcgcgtttcggatatgttgggatagttcgcgtttttagaacgttttgcgtttcgacgttcgtaggttttcgcggtgcgtatcgtttgcgatttggtgagtgtttgggtcgtttcgttttcggaagagtgcggagttttttttcgggacggtggtagtttcgagtggttttgtaggcgtttttatttcgtcgtcgggtgtggggtcgttttgatttttatttatttcgggcgagttttaggtgcgttttaagtgttttttaggtgttgtttagttttttttcgggtttggggtttttggattaggttgcgttgtagtgattgtggattggcgtgtggcgggggtcgtggtagtttttgttttatttttaggtgttagttttaggttcgggtttcgggttttttttatttttttatgttgttagtttttttttcgttagttgttttaggaagtttttagaagtttttgcgcgggttttggtttgtagtaattttttagtatatttaggtagagttttatattttttttttgttggaggttaagttttaggggttttttggttattatggttggtgtttgtgtatattatattttaattgtatttattaatatttagagtaagtaaggttcgttggagagttatatatattgggtatcgtaatgtcggttataatatcgtagaggagttttgaattatgtatttcgtatttttgggtttattattttttgaaattttagggtggtgtttgtttttagttgttttagttgagtagttggttttttgttttggaaagtagattttgtatatgtgtgtgtaatttatgtttgttgagattattattagatagggaagcggtttggtttagagagttgtttttagtagaatgttaagtatagagagttgagaattagattggttatttatatagatatttaaatagaaatttatagagtatttgttaagttaggttttttcgttattttttttatttttgggtaggtgtttaggagatggttttgttatttttagggtttttttaatggttaaaatattttgggagatgaataagattttaaaaatttaaagtttagcgtatttggtgggtgggggtgtgaaaattttgaaggaaatcgcgttaagagtttggttgattgttaatattacgttaatttagagggttaggatatttgtttagattcggagtttgtttgtaagtagtagaggagagttggttttgttttgtcgcgtgtttttttttttgggttttttgtttcgggttggaatttgaatagtggagtagtgtttgttatagttaggggtttggatgaagtagattattagtacggagttatatttaggtattttttaatgtatatatttttattaaaaaaaaaaaatttgggttaggtatagtgggttacgtttgtaattttagtattttgggaggtcgaggtgggtggattatttgaagttaggagtttgagattagtttggttaatatggtgaaatttagtttttattaaaaatataaaaattatttaggcgtggtggtgtatgttggtaattttagttatttgggagattgaggtaggagaattgtttgaatttgggaggcggaggttgtagtgagtcgagattgcgttattgtattttaatttgggcgacgagagtgaaattgttttgaaggggaaataaaaaaatttgtattaaaataaggatttaattaatagtattaggtattattttaaaaaggttttgttgttagtaaggttgaaagaaatagagttttaggtatatattgggtagtattttgtttagttgtttagatttttgaattttgttgaggttttattttgatattatttgggttttatttttcgttgtttgggttttttttttaggtgttttaattagggttttttttgtttttttgtagggaagaagggggtaggaagggtttgaaaaagaatttgttttttttattgtttttttagagtttgtttttttttagttttttttttatttttttttaggatattaaaattttgatttttttagtattttataataaaataaagttattaaattgtttgttttgttttgtagaggatatatatttaggagttagtgatttagattttttatttttttttttggtgttaatgttttttttagtatattttttttgatagaaaaaaaatggaggtaaaattgaattttttgtattatttttttttttagtattatttttgtttttgtattttattttgatttttttttttagtataaagttttatgtttagatttatttgttttgagatttttgattttcgtttgggattttagtttttttaggggatatattgagttttttagattttgtagggttttgtgtttattcggtttttgggttgttgttacggttttttttgattttttgttttttgggataagtagtttttaatgtagttattttttgaaagagttggggttttatcgtagaatattattttattatttttagagataaggttttggtttttcgtttaggttggagtgtagtggtgagattatagttttttgtagttttaagtttttgggtttaagcgaattttttgttttgattttttaagtattagggattataggtgtgcgttattatatttggtta

SEQ ID NO: 389 - DNA, 6234 bp, Artificial Sequence
  chemically treated genomic DNA (Homo sapiens)
tagttaggtatggtggcgtatatttgtagtttttggtatttgggaggttaaagtaggaggttcgtttgagtttaggagtttgaggttgtagggagttatgattttattattgtattttagtttgggcgaaagattaagattttgtttttaaaaataataaaataatattttgcggtaagattttagtttttttagaaagtagttgtattaaaaattatttgttttaggaaatagagggttaggaaggatcgtagtaatagtttaagagtcgaatgagtatagggttttgtagggtttgggaggtttaatgtgttttttggagggattagagttttaaacggaagttaaaaattttagggtaagtggatttggatatggaattttatgttggggaagggggttagaatgaagtgtagaaataagaataatgttaaaggaaaagataatgtagaaaatttagttttgtttttattttttttttattaaagagaatatattgaaaagagtattagtattaaaaagaaaaatggaaggtttgaattattggtttttaaatgtgtgttttttgtaaaatagaatagataatttagtaattttattttattataaaatattgaaagagttagggttttggtgttttaagaaagggtgggaagaggattggagaggaataaattttgagggggtaatggggaaggtaagtttttttttaggttttttttattttttttttttttgtaaaaggatagaggaggttttgattgagatatttggggaggaaatttaaataacgaaaagtaaggtttaggtgatattaaagtaagattttaataaggtttaagaatttgagtagttgaataaggtgttatttaatgtatatttagggttttattttttttaattttattaatagtaaagtttttttaaagtagtgtttaatattattagttaaatttttattttgatatagatttttttgttttttttttaggatagttttattttcgtcgtttaggttggagtgtaatggcgtaatttcggtttattgtaattttcgttttttaggtttaagtaatttttttgttttagttttttaagtaattgggattattagtatgtattattacgtttggataatttttgtgtttttagtagaaattgggttttattatgttggttaggttggttttaaatttttgattttaggtgatttatttatttcggttttttaaagtgttgagattataggcgtgatttattgtgtttggtttagattttttttttttaatgaagatatatatattgaaaagtatttgagtatagtttcgtattggtggtttattttatttaggtttttgattgtggtagatattattttattatttaaattttaattcgagatagagggtttaggaagaaagatacgcggtagagtaaggttagtttttttttgttatttgtaggtagatttcgggtttgggtaagtattttggttttttgagttaacgtgatattaataattagttaggtttttgacgcggttttttttaaagtttttatatttttatttattaggtgcgttaagttttgggtttttaaaattttgtttattttttagagtgttttagttattgagagggttttgaaaataataaaattattttttagatatttgtttagggatgggggagatgacgggagagtttgatttaatagatattttataggtttttatttggatgtttatgtaaataattagtttaatttttagttttttgtgtttaatattttattgagaatagttttttggattaagtcgtttttttgtttgatgatgattttagtaggtataggttgtatatatatgtataaagtttgttttttaggatagaaagttagttatttagttgaagtaattgagagtaaatattattttgagattttaggagatgatgaatttaggagtgcgaaatatatagtttagaatttttttgcggtgttataatcgatattacggtgtttagtgtgtgtggttttttagcgagttttgtttattttaagtgttgatgaatatagttagggtatgatgtatataaatattagttatagtaattagaaggtttttagaatttggtttttagtaggaaggaaatatgggattttgtttaagtatgttaaagggttgttgtaagttaaggttcgcgtaggggtttttggaagttttttggagtagttggcggagggaaagttggtagtatggaagggtaggaagaattcggggttcgggtttggggttggtatttagaggtaaggtaggggttgttacgattttcgttatacgttagtttatagttattgtagcgtagtttagtttaggaattttaggttcggggaaaggttgggtaatatttgggaggtatttggggcgtatttggagttcgttcgggatgggtgggggttagggcggttttatattcgacggcgaagtgagggcgtttgtaggattattcgaggttgttatcgtttcgagggagagtttcgtattttttcgggagcgaggcgatttagatatttattaagtcgtaaacggtgcgtatcgcgaggatttgcgggcgtcgggacgtaaagcgttttaggggcgcgggttgttttagtatattcggggcgcgggggcggggtcgaggggtacggggatggcggcgtggggcggggtttagagcggggcggagtcgaggatttgagaaaagtaagagagcgcgcgggggcggggtcggggcgcgcgggggcggagttggggcggagttcgggaggggcggggtgttttcgttcgatcgggtcggcgtatgttttgtgcggcggcgtcgggtttgaggtagtttgcgtattttcgttggacgtcggtacgtcggttttggtttttcggtagcgtcgttgttttgtgcgtttgattcggatggtttttcggtcggtataagtcgggcggcgtttttttagttttcgtttgaggttttgtgttttagtttgttaaatggttcgtatttttttttgttatagggatagttcgcgggcgtgtaagcgatttgttacgtgttcgagtggttttgaaagcgcgcgggggtcgtaggacggcgttcgtttagtgagaatttcggttttgttcggggcggttacgttgagttcggagcgcgagtttttttttttttggtgtcgtttttttagttagggatttttagattagtagagattttgttagggggtcgtgggggtagtttttagggtttgtggtgggcgatgtcgtttaggggttgtagttatcgatggtttagatattgttagagtttgatttagtcgttttttagagagtatatagggtgttaggttttgtttggggttgtgtggacgttattaggagttgaattgtgtttattagagaagttatgttggagttttaatttttagtattttataatgtgattttatttggagatggggattttatagaagttattaattagtgggttttttatttagtatgattcgtgtttttataggtagaaggtcgtttggggaggaggattggagggttgtatttgtaagttattagaagtttaagaggatagatttttttttggagttttcggagggagtagaggatatttttttttggagtttttagagggagtaggattttaatatatttgggttttaaatttttggttttcggaagtgtgagataataggtttttgttgttttaagttatttagtgtgtggtattttattatggtagttttaggtaatgggtatagaaattattgtttttaacgtggttggtataagtattttagggagtagtattatttttggaggtttcggagaggttatatattttttggtaggattttatttaaggtttatatgttttaagttattatgttacgggttttttaggttttgtttgttattttaatggaaaggggtttttattttttcggtgaagtttttttgttgggattcggttaatgtttatattttcgtatttgtgatttgtaggatttaatatattagtatgagtgataagggttgtttagaggagaattttagtaggatttgttttgggatgagttttggtgataatataggttgtattattgattttttgaggttttttatttcgattttgttttggatgagatatgttttaaatagttgtttgtgggaaataaattaggttttgagtatacgatataatggttaaattaaggtattttttttttattgaatttggatatagtttcggaattttttttaatattgtgttttaagtagttatttatatttaaattaatgtggaaggatagatgaaatatgtttgtttttggttttggttttttttattagttttttataagatttcgggaaattcgtttgatttttttaatttttagttttatattttgtaaaggagttttatgataacgtattttacgtgtgtataaattatttttttatattagggtatgtgtgtatagggaaaataaattattagtattatattatattattaagaaataatgttatatatttggttatttatagtttgttattattaggatttagttagaatcgggattttaatagaattaaaggaaaaataatgtcgaaatggaattagagtgtcgattgatattttaataagtgtgttgttaagtagttttgtagttaatatatgatttatacgtttatttgaataatattttaagacgaatttttaaatttttaagaaaaagagattggttagttttagtatttttaattttttattttaggaaagaaaggttaatgtggttatttaaaggttttttaggagggttttgtgggaatggggaggcggtttacgagagaaagtgttggttttttagggagatgtgtggatttggttttggttgtattgaaagaatttagtttttttgttggcgtggtgggaagaattatgtgaagggttatagttattttagtggtaaggattgtgttaggggttttaggattaggagttaaataagggttttagtgtagaggggaaagaggaaaaaggttattatttgattaaggattggtttgtaaaagattaggatttaaggatgtgattgtttaggttgtttgatgagtagaatttaaatttatattttttatatttgttggtgtaagtttttttttttattatggtaattttaaaaatttaagtttttattaagagttttttacgttttttttttttgttttattataattttattatcgtttgtgtgttcgttttattgttaaaggaatataggatggttttaaagtcgggaggtcgtcgggtttattgaagagtaaggaatataggatagggaggttcggatgtggtgttagttttgttttttattgagtaattatttgatttttttgtttataggatgatagtgtaggattggttgggtgagatttttttgaggttttttatttttagattaataaattataatttttttttttttagatatagatttttatgaagaattttttataaaagaggtgggaaaattataaaagggtatgtttaattgtagttcgatttttttaaggagttttttggattttttttaagattagttagtttttttgtgggtattgggaataatgttaatttgtatagtttttttaaatatttaaatggatatttttcgggttaagtaaatgaatatgatatgcgattgtttttaatgatttgtaatttaagaaatttgtttaataagtttgtttttttaagttatttttgtgatattagagattatttataataaagttgtttttagtagttaaatttaatttttattattttatttttgggaaatgaagggattttataacgattatataaaattttatgtggtttgaaagttttaaatttcggataaatgtgtgatggtcgtgtaataaaagaaatatattatagagttttttacgttaagtgttttatatatagtttgtttttaggatagtattttaagtggagggttttgttgattaatataattgatttttttagttttagtgtttttgtaaatgttggagttaagagttggagttagcgttttggatttgggagaggttaggaggttagggagttttaagtattttggaggaagaagtttgaaatgaaaaggtgggggttatcggtatcggggttgaat

SEQ ID NO: 390 - DNA, 6205 bp, Artificial Sequence
  chemically treated genomic DNA (Homo sapiens)
tttagttattcgggaggttgaggtaggggaattgtttgaatttgggaggtagaggttgtagtgaatcgagattatgttattgtattttagtttgtgagatttcgttttaaaaaaaaaaaaaaaaaaagaaaaaaaaaaaaagaattgaagtgtttggagattagtgtattgtaatatttatatagttaagtaggtatttttaattgaattttaaaaaagtattatttttgaaattttttttagtttagatagggttagttatttgggtagaaaggaaaagaaaaataaaaaattggaaaaggatgtattagtattttttttagaaataatttaatattaggaatagaaggaggattttatttattaatttttaataattatttgatgttgttgttgggttggttaaatatttgttaatattgatgatttttttatttattattagagagaagtagagggatttgatgtttagagaagtagtaaaatttattttttattttttttttttagtcggatggaagtatttggaggttggttttatattttagtattttagtgttggtgatgtagattatttttgttttagagtaattttgtgttatggaatttaagaggattttgtcgtattaggataggaatgtatttttgttttatttgtttttatgaaagtagattttagagatttttagatgttatgagattaattgttatttagggtaggttttaggggagggatagagaagggtagtgttaataatagggattttggagataagattagtaatttaagaaataaatgtgagatattttatttttttttaatttattttttttttaaaagtttatttttattttttttttttttattacgtagtaattgataattaaatatagttttggtttttattatgtaatttagtagaatatttagatattaggaattttttatttttggttatttatataataatgaaatttgtagtttacgttaggttgtgtggatagtatttgtatttttggaaattaattggaggttttttttttattttttttcggttgttttttatttttttttttattgtggtttttgttttttttaagttgattagaattatgtataaaattagtttttaataaatattaatattgaagttttagtaggttgttaatttttgtatagttattttaaatgttgtatataagtgtaaagttttatggagttttagaggtttttaagaatattgtaaatattttaggtttaattagtagtttcggagttaggtaatggtttgtggttttttgcgttaggttttttgaggtttttagtttttagaggttgtttgtaattatgatgtgtatatatatagtatttttttttaaatatagtataaattttttttagattttgttaggtatttataattattgaatatatatgtagattgatttttatttttttaaagtttgaaaaataatttagtgttttaatttaggtttcgttagatattttttgatttaaattgtcgtttgtagttttattttttaagggaaatgaaaaaataataaatttttagattggtgttgatgtttattttttttaagcgggtcgattatttgttttgtagatttttgacgggtggggtgcggggtaggagtgcgatttaatttttagtattttcgaattagtttttttacggtgataggttagtttaatcggggttgtaaatagatttgataggtttgttttgggttgacggttattgattaggtttttagattagataagttatttggttgagtttatagtaggtggggcgcgtttattagtttaggggtagtgattggacgtttgttgtaatatcggagaatgtacgttttgggttgtagtaggagatatttttaagtatagaattaaaagggtttattttaagcggtagggtattagcgatggagaggttcgagagttttagcgtttagtttttttttttacgtttgggaaggcgtagaataggtcgatgtagagtaaggagtgagttttaggttttagttttttggtttgtttttagggtagtaggcgaggagtggtattagtttggggatttttttttcgcgttttgtaagaatcggcggtagttagtaggcggggaggcgggggtacgtgtttggatgtgggtgtttgtgtaattagttttttaagcgttagtttcgatagcgttttttcgggaggttggttcgagtttttgttttcgtcgcggcgtaggaagggttggggtttcgttgtttgtattaggtaagagtatttcgagtaaaggaagaagacgatttgttttcggagttattattggggagtgggaatttggaaagttttttaattagggatatacgtgatttttttcggaaagtagtttcgattgtggttcgtgtatttttttatttttttttgaatttttttaggttttttcgtttcgtttattcgttgggttgtagttttttatcgtttcgtattttttatttaattcggtaattttaaacgtgtacggttcggtcggggcgcgcggagtttggtttcgggcgatttattttgtcgggtttttacggcggttaagggggggcggggttaggtggtttttgagaatcgagtttgatttcgacgtcgcgaatcgatttggagttcgaggggaaagatgttcgatttttttgggggtatcggagcgggcgtaggagaggtttgcggggtgcgttttatttatagggatttttttttagtttatttagataggtgttttttgggtttttgaaatttaacggttatgtgtttacgtttagtacgttcggttgagagtttttatttttagggtaaacgagtcgagttatcggggaagcgagaggtggggcgttgtaagggagtcggatgaggtgatatacgttggcgatataatagtaggttgttttttgtgttaagattgatattatgaggatatagatttgggggaagggggaatttttaggtaaaggttgttatagttaaatttttgcgaacgattgtgattcgatagcggtgtaaaaggaaagagcgaatgtagtttacgtcgcggaaatttaggggtagaggtaaggggggagggtattttttttgtagggatcgtttttgtatttttttttatattgagtagcgtggttatttggttttttttatttgtgtataggtaattttagattcgagttagtgatattgtttaacgtatttattttagtttttattattagttttttattttcgttttataatagtttattttgttttcggttgggtttttgggtagaggtcgaggtttagttcgttattttcgtttcgcgttgttgtaaaagtcgtagtaagtgtagttgtaggttggcggttgggaatcggttcgagtaagttttaggtagttatattgggtatgtttagtagagtttgcggtttggggattttgcgttcgtatttagagttatcgttttgtttttttttatcgttttttgttttgttttgtttttttttcgttcggcgcggtttcgttcgtttttcgttcgtttttcgttttttttcggtttttcgaggcgttcgggttttcggcgcggcggcggagggggcgggtaggtcggcgggcggtgatgtggcgggattttttatgcgttgcggtaggatacgcgttcggcgttgggacgcgattgcgtttagtttttttttttcggaagttgtagttatgatggaagtttgagagttgagtcgttgtgaggcgaggtcgggtttaggcgagggagatgagagacggcggcggtcgcggttcggagttttttttagcgtttgtgagtagtcgcgggggtagcgttttcggggagtcggtcggtttgcggcggcggtagcggcggcgtttttcgtttttttttcgttttttttaatcgtgtagtttttttttcggttttttttgaaagggaaggtggaagtcgtgggttcgggcgggagtcggttgaggcgcggcggcggcggcggtatttttcgtttttggagcgggggggagaagcggcggcggcggcggtcgcggcggttgtagttttagggagggggtttgagtcgtttgttattatttttagggttgggaacgtcggagagttggtttttttttttttattgtttttaatacggcggcggcggcggttggtatatttagggattcgggtcggttttaaatttttcgtgcgtcgtcgtcgtatttttcgtggttcgggtttcggaggtcgtcggcggaggtagtcgttcggaggattattcgttttttttttatttcgttgtcgtcgttgttaggtttttggttgttgaggagaagtaggtttagtcgttgtaattatttagtagtcgtcgtagtagttattattcggttgcggtttagagttaagcggcggtagagcgaggggtattagttatcgttaagtttagagttatttttattttgtagaagaagtttcgttattagtagtttttgttatttttttttttttttttttttagttataggtttttagatatgatagttattattaaagagatcgttagtagaaataaaaggagatattaagaggatggattcgatttagatttgatttgtatttatttttgcggttgtttttttttatttttttgttatttttttagaacgtgggagtagacggatgcgaaaatgttcgtagtttgggtgattataatatttaattttggttaggttgttaggttatatattttgtgttttttttttgtgtatttaatttagggtgtgtttggttagacggaatttttgtttggttgtaagtgttaagttatcgattgtttttttaggttatttatatggtttttttttgagggttattgttcgttaatatagaatatagtatattgttagtggattagcgagttcggtaattcggttttttaaatgaataaaaaagtagacgttttttgaggttgagtatatttcgattaaattttggtttaggttttagattaagggtttagattagaataaaatgaaaattagtgttgtacgtacgtatattgtattagaattttgtagtgattgttttagttttttgagttgtattgatagatttttttaaaatatgattgatttgtataattttagaagtagaattatttttagtatatatggtgtatattgagggtaaaaagtagttttgttaatgtttaaatttaagttatttataattttgaattgtatgtagaagttttgtagtttgaagttaatagtgttataatatattttataaggcgtttttattagatttttgttatatttatttttttttttttttatggggtgatgtaggatagtgtttgaaatttgtattttagtagtatttaatgtttagtgtttttgttataaatatagaatggatattgagtagtttttgattttagatggtaatgtgtaggtttaagggtattgtgtgtagtaagtgaagattgtagaaataaaattttagtttatgtttgaaatttaagtattgttgtgatgttagaattgttgtttatcgtttttaggttttaggttttttgatattttttggtatcgttaattttattgatttgtgtagaatgttagttgtattttattagttaatatttagaaatgttggtaagaggggtttattttagttttagattgtaggtatgttagttttttttatatagtgtattaaatttattgagttagtttgttgaataagatagaagtttaagaattttaatagtgtgtagttttagttgtttaaaagttaggttttcgggttttaaaagttagtggttatcgaaaagtattaatttttgtagttttaggtataatatattggttttgattagggatggggatggggttttttttttgtagaatggggaaagtattgataggaattgagagttattggtaggttagtgtataaggtatgtgaaaatagaattaagttattggtttgaagtgattgaagtatttaggttttattaaggtttaaaatttggtaatatgagtttggtaatgcgaattgtggtagtggataatatttagttaaaattatgtaattgtataagtattagtatagtatttttaataaaagttattttttagtaaatgttagttgtattttgtttaaaggtaga

SEQ ID NO: 391 - DNA, 6205 bp, Artificial Sequence
  chemically treated genomic DNA (Homo sapiens)
tttatttttagataaaatgtaattgatatttgttaagaaataatttttattaaaaatattgtgttagtatttatgtaattatataattttaattaaatattgtttattgttataattcgtattattaaatttatattattaaattttaggttttgatagagtttaaatgttttagttattttagattaataatttaattttgtttttatatattttatatattggtttattaatagtttttaatttttgttaatattttttttattttgtaaaaagagggttttatttttatttttaattaaaattaatgtgttgtatttgaaattgtaaagattaatgtttttcgatgattattaatttttgaagttcgaaggtttaatttttagataattaaagttatatattgttaaaatttttgggtttttgttttatttagtaagttgatttagtaaatttaatatattgtatgaaaaaagttaatatatttataatttaaagttggagtaaattttttttgttagtatttttagatattagttggtaaaatataattgatattttatataaattagtaaaattaacgatattaaaaggtgttagaggatttgaaatttaaaaacggtgagtagtaattttggtattataataatatttaaattttaagtatgaattgaagttttatttttgtaatttttatttgttatatataatatttttgaatttatatattattatttgggattagaaattatttaatatttattttatgtttatgataagagtattgaatattaaatgttattgaagtgtaaattttaagtattattttatattattttatagggagagaaaaaggtaaatataataaagatttagtaagaacgttttataaggtatattatggtattattgattttaaattataaaatttttatatatagtttaaagttgtaggtaatttaagtttaaatattaataaaattattttttgtttttaatgtgtattatatatattgaaaatgattttgtttttaaagttatgtaaattagttatattttaaaagaatttattaatgtaatttaggaaattaaaataattattgtaagattttgatgtaatatgcgtacgtgtaatattaatttttattttattttgatttaaatttttgatttagggtttaagttaagatttaatcgaaatatgtttaattttaaaaagcgtttatttttttgtttatttaggagatcggattatcgagttcgttaatttattaatagtgtattgtattttgtattaacggataatagtttttaggaagagattatatagatagtttaagaaagtaatcggtggtttgatatttgtaattaggtaagagtttcgtttagttaaatatattttaggttgaatatatagaaaggaaatataaaatatatgatttagtaatttgattagggttaaatgttatagttatttaaattacggatattttcgtattcgtttatttttacgttttaagagagtgatagaaaggtaaagaggagtagtcgtagaaatggatataggttaagtttaagtcgaatttatttttttgatatttttttttgtttttgttaacgatttttttgatgatggttgttatgtttgggagtttgtggttgaagaaaaaggaggagagagatggtagaagttgttggtggcggggttttttttgtaggatggaaatggttttggatttggcggtagttgatgtttttcgttttgtcgtcgtttggttttggatcgtagtcgggtaatggttgttgcggcggttgttggatggttgtagcgattgggtttgtttttttttagtagttagaggtttggtagcggcggtagcggaatggggagaagacgaataatttttcgaacggttgttttcgtcggcggttttcggagttcgggttacggggggtgcggcggcggcgtacgggaggtttaaaatcggttcgggtttttggatgtgttagtcgtcgtcgtcgtcgtgttggaggtagtagaaggggagagattaatttttcggcgtttttagttttggaaatggtgataggcgatttagattttttttttggagttgtagtcgtcgcggtcgtcgtcgtcgtcgtttttttttttcgttttaggagcgggaggtgtcgtcgtcgtcgtcgcgttttagtcggttttcgttcgagtttacggtttttatttttttttttaggagaagtcgaggaagaggttgtacggttagaaaagacgaagaggaggcgagaaacgtcgtcgttgtcgtcgtcgtaggtcggtcggtttttcgagggcgttgttttcgcggttgtttataggcgttgagaggggtttcgggtcgcggtcgtcgtcgttttttatttttttcgtttgagttcggtttcgttttatagcggtttaatttttaaatttttattatggttgtagttttcgagaggagagaattgagcgtagtcgcgttttagcgtcgagcgcgtattttgtcgtagcgtataaagagtttcgttatattatcgttcgtcggtttgttcgtttttttcgtcgtcgcgtcgggagttcgggcgtttcggaagatcgaggggaggcgggaggcgagcgagaggcggacgggatcgcgtcgggcgaggggagggtagggtagggtagggggcggtaggagggggtagagcggtagttttgggtgcgagcgtagagtttttaagtcgtaggttttattgagtatgtttagtgtagttgtttggggtttgttcgggtcggtttttagtcgttagtttgtagttgtatttgttgcggtttttgtagtaacgcgaggcgaggataacgagttaagtttcggtttttgtttagaaatttagtcggaggtagggtaggttgttgtggggcgggggtggaggattgatgatgaaagttgagatgggtgcgttgagtagtgttattgattcgagtttgaggttatttgtgtataggtgaaaaggattaggtgattacgttgtttagtgtagagggaaatgtagggacggtttttgtaaggggaatattttttttttttgtttttatttttagattttcgcggcgtggattgtattcgttttttttttttgtatcgttgtcggattataatcgttcgtagagatttgattgtaatagtttttgtttagagattttttttttttttaaatttgtgtttttatggtgttagttttagtataaagagtaatttgttattgtgtcgttagcgtgtattattttattcggtttttttgtagcgttttatttttcgttttttcggtaattcggttcgtttgttttaaaaatgaaagtttttagtcgagcgtgttgaacgtgaatatatagtcgttgaattttaagggtttaaagggtatttatttaaatgaattgaaagaggatttttgtgagtgggacgtatttcgtaggttttttttgcgttcgtttcggtgtttttaagagagtcgagtattttttttttcgggttttaggtcggttcgcggcgtcggagttaagttcggtttttagagattatttagtttcgtttttttttggtcgtcgtgaaaattcggtaggatggatcgttcggggttaggtttcgcgcgtttcggtcggatcgtgtacgtttggggttatcgggttgagtggaaagtacggaacggtaggaagttgtagtttagcgagtgggcggggcgaggagatttaggagggtttaaaaggaggtggaaggatatacgggttatagtcggaattatttttcgaaggaggttacgtgtgtttttagttggggaattttttaaatttttattttttagtgatagtttcggaggtaagtcgttttttttttttgttcggggtgtttttgtttggtgtaggtagcggaattttaattttttttgcgtcgcggcggaaataggggttcggattagtttttcgaaggagcgttgtcggggttggcgtttggggaattggttatataagtatttatatttaaatacgtgttttcgttttttcgtttgttggttgtcgtcgatttttatagaacgcggggagagagtttttaaattggtgttatttttcgtttgttattttaagagtaagttaaaggattgagatttgagatttattttttgttttatatcgatttattttgcgtttttttaaacgtgggaaaaggagttgggcgttagggttttcgggtttttttatcgttgatgttttgtcgtttagggtgaatttttttggttttgtgtttgagggtattttttgttgtagtttagagcgtgtatttttcgatgttgtaataaacgtttagttattatttttgagttggtgagcgcgttttatttattgtggatttagttaagtgatttatttggtttgagaatttagttaatggtcgttagtttagaataaatttgttaagtttgtttatagtttcgattgggttgatttgttatcgtgagagagttgattcggaaatgttgagagttggatcgtatttttatttcgtattttattcgttaaggatttataaagtaagtagtcgattcgtttaaagagaatgagtattaatattagtttgggaatttattgtttttttattttttttaggaagtagaattatagacgataatttgagttaaaaaatatttaacgagatttaggttgaagtattgagttgttttttaaattttgagagaatgagaattaatttgtatgtgtgtttaataattgtaagtgtttagtaaagtttaaagagggtttatgttgtatttgagaaagagtattgtatatgtgtatattatagttgtaggtaatttttgaagattagaaattttaagagatttagcgtagaaagttataggttattatttaatttcgggattattaattaaatttgggatatttatagtgtttttagagatttttgaggttttataaaattttgtatttatatatagtatttaagatagttgtgtaggagttaataatttgttgaagttttagtgttgatatttattgaagattggttttgtgtatagttttggttagtttgggaaaggtaaggattatagtggaaaaggaaatggaaagtaatcggaaaagagtaagagaaaggtttttagttgatttttagagatgtagatattgtttatatagtttagcgtgaattatagattttattattgtataaataattaaagataaggagtttttgatgtttaggtgttttattagattgtatggtaaaaattagagttgtgtttaattattaattattgcgtggtagaaaaagggaaaatgaagatgaatttttaaaaggggagtagattagggaggggtaaaatgttttatatttgttttttagattgttgattttgtttttagagtttttgttattagtattgtttttttttgttttttttttggagtttattttaagtgataattagttttatagtatttgagaatttttgaaatttgtttttatggaagtaaatgaaataagggtgtatttttgttttggtgcgatagaatttttttggattttatggtatagagttattttggagtagagataatttgtattattagtattaaagtgttagaatatgagattagtttttaagtatttttattcggttgaagaaagaaaatgggaaatgggttttattgtttttttaaatattaggtttttttatttttttttagtggtgaatgaaaggattattaatgttggtagatatttggttagtttaatagtaatattaggtggttattaggagttggtgaataaaattttttttttgtttttagtgttaagttgtttttgaaagaaatattgatgtatttttttttaattttttgtttttttttttttttttatttaaatggttggttttatttaaattaaagaaagttttaaaaatagtatttttttaaagtttagttgaaaatatttgtttggttgtatagatattataatatattggtttttaagtattttagttttttttttttttttttttttttttttttttttttgagacggagttttataggttggagtgtagtggtatgatttcggtttattgtaatttttgttttttaggtttaagtaatttttttgttttagtttttcgagtagttggg

SEQ ID NO: 392 - DNA, 6176 bp, Artificial Sequence
  chemically treated genomic DNA (Homo sapiens)
tatttaaaatttaggttaggtatagtggtttatgtttgtaattttagcgaggtcgtgggaggtcgaggtgggtagattttttgcggttaggagttcgagattagtttggttaatacgataaaattttatttttattaaaaatataaaaattagtcgggcgtggtggagtgtgtttatttagttatttaggagggtgaggtaggagaattgtttgaattaaggaggtagaggttgtagtgagtcgagatcgtattattgtacgttagtttgggtaatagagtgagatttcgtcgtaaaaaaataaaaaataatagaataataaaataaaaattagtaggagagtgttttatatttataaagttaatatttttgtgagtaagtataattttaagagaattttttgtaagaatttttaggaatatatgagtttaatttatttattattgtgtaagttaaaatatttgatataaaatatttattaaaaatgttttgttagttaggtatagtggattatatttgtaattttagtattttaagaggttgaagttggaggattatttgagtttaagagtttaagattagtttggttaatatagtgtgattttttttttattatttaaaaaaaaaaaaagttttgtttggttagtggtttatttttgtaattttagtaagtacgttgggagggagaggtggaagtaggaggatcgtttgagtttaggagtttgagattagtttaggtaatattgttagattttatttttattattttttttttaattagttatgtgtggtggtatttgtttgtagttttagttatttaggaggtaaaggtaggagaattgtttaagtttaggagttagaggttgtaatcgagttatgattatgttattgtattttagtttgggcgatagagtgagattttgtttttttaaaaaaaaaaaaaaaaaaaaaaaaaaaaaaaaaagtttgtattgttttgaaaaaataaaaaaaaatttaaaagttattaattaagttaaattaaatatgtttaattattattagttttaatattaataaagggagaaaattattagtaagaatgaagattcggtaatttatgtataataatttaaatttaattagtttattatttataataaagatagtttttttataattttagtaatttttattttatttttattttttattattttttttttgtattttaggtaatttgttgttttttaaatttattttaatttttatatggttttaagtttttgtattagttgttttttgagtttttttttattcgatgagtatttatttataggtgttttaaaattcgatttagaagttttttcgagtgtagaagtttttttaatttttttttaagtaaaattaattgttttaaatttttataatatttgataagttaatttttattatattgtattgtttttacgttttaggagcgtagggagggtagagtttttttatttagtttatagaggattaggtaagtagaaacgtttaatgaacgtgttttgaatttattttttatttagattaagtgattttttagaattcgtttatattttaaggatatattaagttttattttttttttttattatagaatgaatattaggggtatatttagagttttagaacgagaataatgaatgaatacggtcgtttcgttttttacgacgtttaaattttttttttttgggtatcgattcgttcgtagagttttagtagttgtagagttgaagcgtttcggcggttttcgcgttatataaaagatagttttggttttttattttaaagcgttttgaggttaattttttataagtattttaaattttttattaataatttagagttttgatatttaaggttagttttgatatttaagaagaggtttttgtgtttttgtggtagggtattggttagttttttttttttttattcgattttttacgtcgtttttaaaagggtgttatttgattgaagtattttgagaaagggtgtaagttcgggttttatattcggcggtttaagagaaaaggaattggtttatttaagtgataatagatatggggtagttttgggcggatttttttattgttaaatatgaggaatgcgtatggtataagggtggcgttggtacgttttcgttaaatataaggaaatttgagtgggatgtgggaattcggttcgtcggttatgatatcggatttcggggttttcgtttaacgttattttagggtgataacggtttggtttaagttttttgttcggtagtcgcggggtcgttttattagcgttatttaggttcggtcgttttggaagtcgattttttagtttcgtcgttcggttttttcggtatttacgattcggttttgttatttatttgagggagttaggtcgttttaacgttttgtcgttcggcggtagtttttcgttcgtttttttttttcgcggcgggtgagggagcgggaggcggttatattcggcgcgtttttagtttaggggacggagtttcgagtagttttcgtatcgtagtaaacgcgtttcgcgttttagggtacgcgttttaaagttcggttagttgatttttttcggggtttaaaaaaggtagtagaaagtcgttttcgttttataatcgttttttttttattttcgttatttaagatggcggtttaagcgttcgcgattaagattttcgggcggtttagacgagcgagttttcgattcggtgttcgttttttcgatttgcgacgttatcggtttttcgattttgcgcgagttttattggtagtcgatttttaatttggttcgggtatttatcgttttggtttgaatttaggtttcgttttcggggcgtggtttagcgatttggtggtcgttatttcgaagttgaagaggttaggcgacgttgatttgtttttaggagaggtattcggtaatcgagaagaatcggttttcggttagttaggagtggttagaggtttagaaggggagaggaaggtttgtttgtttagtattgtaaggtttagcgattattagacgtgttttaggatatagggtatagtgtttaattttgacgcgtttttttcgggtattttaatattaaattacggtttcgttatttgatagttatgtggatagtttttgaattttaaacggttttttttttgtgtgtaaatttcgagtttattttttttttattatattagtaataagttaaaaaaattgataatattcggtttggtttaaggtatattgaaatttgttgtgtgttttcgtagcgttattatagtggaatttggatatgttaaaagtatatattttttttttcggtagttttatttttagatattaattttagagaaataagtatatatatatataaaaagttatgtgtgaagatatttaatgttatattatttgtattttggagaaatattggggatgaaatgaagattaataggaaattggttaagagaacgttgttatatatttaatttgggttgttatttatttaagaatgaattagatagttattgaatttaaaaaataataaaaaaagggttcggcgttttttttgggattatttttgtaattttagtattttggaaggtcgaggtaggcggattatttgaggtcgggagttcgagattagtttgattaatatggagaaatttcgtttttattaaaaatataaaaattagtcgggcgtggtggcgggcgtttgtaattttagttatttaggaggttgagataggagaatcgtttgaattcgggaggtagaggttgtagtgagtttagatcgtattattatattttagtttgggcgatagagcgagatttcgtttcgaaaaaataaataaatataaaaaaataaaaatattaaattagttgggtatggtggtgtatgtttgttattttatttattcgggaggttaaggtaggagaattgtttgtatttaggaggcggagattgcggtgagtcgaaatcgcgttattgtattttagtttgggtaataagagcgaaatttttgttttaaaaaaaaaaaaaaaaaagatatggttgggcgtggtggtttacgtttgtaattttagtattttgggaggtcgaggcgggtagattatttgaggttatgagtttgagattagtttggttaatatggtgaaatttgtttttgttaaaaaatataaaataaataggtcgggtgcggtggtttatatatgtaattttagtattttgggaggtcgaggcgggtagattacgaagttaggagatcgagattattttggttaatatagtaaaatttcgtttttattaaaaatataaaagattagtcgggtgtggtggcgggtttttgtagttttagttatttaggaggttgaggtaggagaatggtatgaattcgggaggcggagtttgtagtgagttgagatcgcgttattgtattttagtttggataatagagtgagatttcgtttaaaaaaaaaaaaaaaaaaattggttaggtgtggtggtgcgcgtttgtaattttagttatttaggaggttgaggtaggagaattatttgaatttagtaggtagaggttgtagtgagtcgagatagcgttattgtattttagtttaggtgatagagttagattttgtcgtaaaaaaaggaaaaaaaaagttattaagttaaaaaagtagaatataatgtatgattttatttacgtaaatataggaatataagatatttatttaatattatagaatgttatgtgtattattatttttcgatattgagagtttattaggtattatatattattttggatattggaaaattaatagtaattaaaatttttgttatttagtaatgggagattaaaagaaaatataaataataaaatttaggttggatgtggtggttaaagtttttaattttagtattttgagaggttaaggaaggggggttattttagtttagatgttgaagattagtttgagtaatatgagattttatttttattaaaaaaaaaaaagaaaagaaaattagtgtgtatggtgatatgtttttgtaatttagttagggaggaggttgaggttggaggattatttggagttggggatggtataagttatgattgttttattgtattttagtttggataatatagtaagttttcgttttttaaaaaagaagaagaaaggaaaagtgaagtaaagtgagaatgataggagtatgtggattaacgtaaaaataaatgtaggagaaagattggttaggcgcggtcgtttacgtttgtaattttagttttttgggaggtcgaggtaggtagattataaggttaagaaatagagatttttttggttaatacggtgaaattcggtttttattaaaaataaaaaaaataaaaaaatttttaaaaaagtcgggcgcggtggtttacgtttgtaattttagtattttgggaggttaaggtaggcggattacgaggttaggagatcgagattattttggttaatacggtgaaattttatttttattaaaaatataaaaaattagtcgggtgtggtggcgggtgtttgtagtttcggttattcggaaggttgaggtaggagaatggcgtgaatttaggaggtagagtttatagtgagttaagatggcgttattgtatttcgtttgtttgggcgatagagcgaaatttcgttttaaaaaaaaaaaaaaaaaaaagaaagattagaaggtgtggaatgtggatagtatgagggggatttttaaaatgggaataataggttaggtacggtggtttatgtttgtaattttagtattttgggaagttgaggtaggtagattatttgaggttgggagttcgagattagtttgattaatatggagaaattttatgtttattaaaaatataaaattagtcgggtatggtggtttgtaattttagttattcgggaggttgaggtaggagaattgtttgaatttgggaggtagaagttgtagcgagcggagattgtgttattgtattttggtttgggtaataagggtgaaatttcgttttaataaataaataaataaataataaataaaataaaatgggaataataatattttttttgtaggattaaatgagataaaatttggagagtatttagtgtagagtttg

SEQ ID NO: 393 - DNA, 6176 bp, Artificial Sequence
  chemically treated genomic DNA (Homo sapiens)
taggttttgtattaagtgttttttaggttttattttatttaattttgtaaggaaagtgttattatttttattttattttatttattatttatttatttatttattgagacggagttttatttttgttgtttaagttaaagtgtaatggtataattttcgttcgttgtaatttttgttttttaggtttaagtagtttttttgttttagtttttcgagtagttgagattataggttattatgttcggttaattttgtatttttagtagatatggggtttttttatgttggttaggttggtttcgaatttttaattttaggtgatttgtttgttttagttttttaaagtgttgggattataggtatgagttatcgtgtttggtttattatttttattttaaaaattttttttatgttatttatattttatattttttagttttttttttttttttttttttttttgagacggagtttcgttttgtcgtttaggtagacggagtgtagtggcgttattttggtttattgtaagttttgttttttgggtttacgttatttttttgttttagtttttcgagtagtcgggattataggtattcgttattatattcggttaattttttgtatttttagtagagatgggattttatcgtgttagttaggatggtttcgattttttgatttcgtgattcgtttgttttggttttttaaagtgttgggattataggcgtgagttatcgcgttcggtttttttaaaaatttttttattttttttatttttagtagagatcgggttttatcgtgttagttaggagggtttttattttttgattttgtgatttgtttgtttcggttttttaaagggttgggattataagcgtgagcgatcgcgtttggttagttttttttttatatttatttttacgttggtttatatatttttgttatttttattttgttttatttttttttttttttttttttttaagagacgggggtttgttatgttgtttaggttggagtgtagtgaggtaattatagtttatgttatttttaattttaagtgattttttagttttagttttttttttagttggattataggagtatgttattatgtatattaattttttttttttttttttttttggtagagatggggttttatgttgtttaggttggtttttaatatttgggttgaagtgattttttttttttggttttttaaagtgttgggattagaggttttggttattatatttaatttgaattttattatttatatttttttttaattttttattattagatggtagggattttgattattgttaattttttaatatttaaaataatgtgtggtatttaataggtttttaatatcgaaaagtaatagtgtatatggtattttgtagtattaggtaggtattttgtgtttttgtgtttgcgtaaataagattatatattatgttttgtttttttaatttaatggtttttttttttttttttttgcgatagagtttggttttgttatttaggttggagtgtagtggcgttatttcggtttattgtaatttttgtttattgggtttaagtgatttttttgttttagttttttgagtagttgggattatagacgcgtattattatatttggttaatttttttttttttttttttaggcggagttttattttgttgtttaggttggagtgtagtggcgcgattttagtttattgtaagtttcgtttttcgggtttatgttatttttttgttttagttttttgagtagttgggattataggggttcgttattatattcggttaattttttgtatttttagtagagacggggttttattgtgttagttaggatggtttcgattttttgatttcgtgatttgttcgtttcggttttttaaagtgttgggattatatgtgtgagttatcgtattcggtttatttgttttgtattttttagtagagataggttttattatgttggttaggttggttttaaatttatgattttaagtgatttgttcgtttcggttttttaaagtgttgggattataggcgtgagttattacgtttagttatgttttttttttttttttttttgagataagagtttcgtttttgttgtttaggttggagtgtaatgacgcgatttcggtttatcgtaattttcgttttttgggtataagtaatttttttgttttagtttttcgagtagatgggatgataggtatgtattattatgtttagttaatttggtatttttatttttttatatttatttattttttcgagacggagtttcgttttgtcgtttaggttggagtgtaatggtgcgatttgggtttattgtaatttttgtttttcgggtttaagcgatttttttgttttagttttttgagtagttgggattataggcgttcgttattacgttcggttaatttttgtatttttagtagagacggggtttttttatgttggttaggttggtttcgaattttcgattttaggtgattcgtttgtttcggttttttaaagtgttgggattataggagtaattttaaaaaaagcgtcgggttttttttttgttgttttttaaatttagtaattatttagtttatttttggatggatgataatttagattggatgtgtagtagcgtttttttaattagttttttattaatttttattttatttttagtgtttttttagaatgtaaataatatggtattaaatatttttatatatagttttttgtgtatgtgtatatttatttttttagaattagtgtttagaagtgaaattgtcgggaggaaggatatatatttttaatatgtttaagttttattgtgatagcgttgcgagggtatataataggttttaatatattttggattaaatcggatattattagtttttttaatttgttgttaatgtgatgggggaaaaatgaattcggaatttatatataaggaaaagatcgtttaaggtttagggattgtttatatagttgttaagtggcggagtcgtgatttggtattaaagtgttcggagaggacgcgttaaagttggatattgtgttttgtgttttgaggtacgtttggtgatcgttgggttttgtaatgttgggtaggtaggtttttttttttttttttaggtttttggttatttttggttggtcgaaagtcggtttttttcgattatcgagtgttttttttgaaagtaagttagcgtcgtttaatttttttagtttcgaaatggcggttattagatcgttaggttacgtttcgggggcggggtttgagtttaggttagagcgatggatgttcgagttaagttagaagtcgattgttagtagggttcgcgtagaatcggagagtcggtggcgtcgtaggtcgggaggacgagtatcgagtcgagggttcgttcgtttgggtcgttcgagagttttaatcgcgggcgtttgggtcgttattttagatggcgggagtaagaggaaaacgattgtgaggcgggaacggttttttgttgttttttttgggtttcgaaaagggttagttggtcgggttttggggcgcgtgttttgaggcgcggagcgcgtttgttacgatgcgggggttgttcggggtttcgttttttgggttggggacgcgtcgaatgtgatcgtttttcgtttttttattcgtcgcggggaggaggagcgggcgagaagttgtcgtcgaacgataggacgttggggcggtttggtttttttaggtaggtggtaggatcgggtcgtggatgtcgggggagtcgggcggcggggttgagggatcggtttttagggcgatcgggtttgggtggcgttgatggagcggtttcgcggttgtcgggtagagggtttgggttaggtcgttgttattttggggtagcgttgggcgggggtttcggagttcggtgttatggtcggcgagtcgagtttttatattttatttaaatttttttgtgtttggcggaaacgtgttaacgttatttttatgttatgcgtattttttatatttggtagtgggaaaattcgtttagagttgttttatatttgttgttatttggatgggttaatttttttttttttgggtcgtcgaatgtgggattcgggtttgtatttttttttagggtattttagttaagtgatatttttttagagacgacgtgaggaatcgggtaagagaggaggaaattggttagtgttttattataaaggtataggggtttttttttgggtattaggattagttttgggtattaggattttgggttattaatgaaaggtttgggatatttatagaggattggttttaggacgttttggaatgaagagttagggttgttttttgtgtgacgcgagagtcgtcgggacgttttagttttgtagttgttgaggttttgcgagcgagtcgatgtttaagagagaggggtttggacgtcgtgagaggcgaggcggtcgtgtttatttattgttttcgttttagggttttgggtgtgtttttggtatttattttgtggtgggaagaaggaatggaatttagtgtatttttgagatgtgaacgggttttagggggttatttaatttaagtggaaaatgaatttaaggtacgtttattgagcgtttttgtttgtttggttttttgtgggttgagtggagagattttgttttttttgcgtttttaaggcgtgaaaataatgtagtgtgataagaattggtttattaagtgttatggggatttagaatagttagttttgtttggggaggagttgaggaagtttttatattcgaggagatttttgagtcgagttttgaaatatttgtgagtaagtgtttatcgggtgaggaggagtttagggaatagttggtataaaggtttagagttatgtgggagttgggatgagtttggggagtagtaaattgtttggggtgtaggaaggaaatggtgagagatgagagtaaaataaaagttgttagaattgtgagggggttgtttttgttgtagatagtgaattagttgaatttggattattgtatatgggttgtcgagtttttatttttgttgataattttttttttttgttgatgttgaagttgatagtgattgaatatatttagtttaatttagttaatgatttttaaatttttttttatttttttagaataatgtaaatttttttttttttttttttttttttttttttttttaaaggaataggattttattttgtcgtttaggttagagtgtagtggtatgattatagttcggttgtagtttttaatttttgggtttaagtagtttttttgtttttgttttttgagtagttgggattatagataggtgttattatatatggttaattaaaaaaaaaatagtagagatggagtttggtagtgttgtttaggttggttttaaatttttgggtttaggcgatttttttgtttttattttttttttttaacgtgtttgttgggattataggggtgagttattggttaggtagaattttttttttttttaaataatagagagggggttatattatgttggttaggttggttttgaatttttgggtttaagtgattttttagttttagttttttaaagtgttgaaattataggtgtgatttattgtgtttggttagtagaatatttttgataagtgttttatattaaatgttttgatttatatagtggtgaatgaattgaatttatatatttttggggatttttgtaaaaaatttttttaaagttatatttgtttataaaaatgttaattttataaatgtagaatatttttttattaatttttattttattattttattgttttttatttttttgcgacggagttttattttgttgtttaggttggcgtgtaatgatgcgatttcggtttattgtaatttttgtttttttggtttaagtagtttttttgttttatttttttgagtagttgggtaggtatattttattacgttcggttgatttttgtatttttagtagagatggggttttgtcgtgttggttaggttggtttcgaatttttgatcgtaagagatttgtttatttcggttttttacggtttcgttgggattataggtatgagttattgtgtttggtttaaattttaaata

SEQ ID NO: 394 - DNA, 6246 bp, Artificial Sequence
  chemically treated genomic DNA (Homo sapiens)
tgtagttattacgttattgttttaatttttttttttttatagtttttttttataattaaaggataagtttttgagagtaaggattataattttttatgtttgtttttaataggggttttttagaatgttagtattttaataaatgtttaaagattttttttttttttaaatgtttttaaagttaaagttgttaaaaatatataattaatattaaattttaatttttaaaattttaaattgatttatatggtaatcggaattaaatatttttatttatatattttataagagttattttatttttagttagtatttgtattattaagaatttaagagttatttttaaagaaaattttgaaaagaaaatgaaaagttttaaaatgtagtattataatttagtattatagatttttgaaataaagttaataaattaattagttgaaatagattgattgatttttaaattatattattaagatgtaaaatatataaatattttagtattataagaggtttttaagtagttattataagatttgtattattatagttgaaaattatttcggaattttaaaatattttttaaattattttatgaagtgtttagaaagtacgatttttttttgaaagatgtataattagtttttttttttatttattcgggtattttttatttgtaagttataagaaaaaaaaaaaattaatttttaaaaattattttttatttagttattatttagattattttgttttaggttagtttttaaagttaatatgaattgaaattttgagtttaattaaaagtgattattttatgttgtttaagaatataattaattttatataatattatgttttgcgtgtgtgtgggtttttaaaattttagttttttagtttttttagtttttttaggtaataaattaatttgtttttgtttttatgatgttttttttttttataataaggaaataatatagatatttttgttaaattttgtaagtatgtttaaataagttattattaaatattatatgaatttttttataaatagagatatattggaatattagatatttagtatatattaaatattttaagagtatattttttagtataaatttaggataagagtagtttatttataattttgaatatagtttaaatatttttattatttttaggattatagttatttgtaaaagttaaaatggaaaggattaaatttatatttttttaattaaatttatagttatttaaatatgatggaaattaacgttagagtgttttaaatcgttttttttaaggaattcgttagaatatttaataggtaatgaatgtagtagtattttaaaattgaatttaaatgtaatgagttagtgataatatttaatttagtatttggtattatgataaaataaattttaattaaaatttggatttattaatatttttaagttaatttttgattaaatataaattatacggtggtaggttggtaatgttaaaataggaaggttaagagataatatattaaattatttatttaattgaatataaatgtatatagagatgttattgttgttaggtatttattggtttttattagttttttttaaagagagaaattaatggtagtttttaaatgtgaatggttattgaggaagtttatttatagattaagaataaatattatgtgtagttatataaataagaaaaaaatgttgggagggtgggatatttaacgtttttattaagtatattaaattatgataatttttgagatttaaaatatttttttattttaaattttaaaaattttgtaaatgtgtataatggtttagtaattaaattttgtttttttttttattttaaaggatgggtaagtaaatattgttattattattttaacgtggaaatattcgagtatttgatgaaattgattattaatagtaagaaaagtataagaaagtagtttgaaatcgaattatttaaataaatattatattattttaatttaaggttaatgagatcgggggagggggtatgggaggagtaaaaagggagttgttttatttttgattgaagataggttttgtttttttttattgtttgtttattaggaggtttaataattttagattttggtatttcgaggttttttattttaagggcgaggtggaaaaggggtgtaaaataaaattaatatttattgttaatttttatgttgttaaaagttgaaggttgttgtatcggtttgtagtttttcgtaaaggaggtggttttgggtcgttttgatatgattatttttttcgcgaattattttttttttttttttttttttttttttttttgtttttatgttggggtgttaggttaacgataaatgtagtattaagtttttttatagaagaaaaagaaaaagatttcgtttttttggttttttattttttttgtatattataaaaaataaaataagcgatatattttttttttaagatagatcggtacggatatttaatatatagatgatttaggatttgggaaaaaatataattttttttttttttttttttgggaggagagaaaagagagggtaaattttaaaaaaatatgtattacgtgaaacgggggtaaatatttgattgaaaatgagtatttcgaatattatatttttttcggggatttttttttcgagttaatgaagaagggaagcggcggaaggattacgagttttacgtttgaagagaaagggggatgggtaggagggagggagagggagggagggggtggttcggagatgcgacgggaaacgttgtagtttcggtaagtcgcgggattcggcgggttgacggtaggggttcggcgaattagagggcggcggagtcgcgagttagttagaggcgggcggtggcggtggcggcggtttttttttttattgcgttaggagtagttgtaggcggcggttggatttagcggttatggcggtggcggaggtagttttttttagattttaggtagcggtttttcgattgttttttattcgtcggggatatgggaattcggtaatcgttttcgtttttcggggttttttttttcgttcgcggtaatagttcggtcgttttttcgtttttcggttttgttcggtgttcgtttaggaagtgttcgcgttttgttttagtttagagttttgttagcggttgcggggtcggttttttttcgttttttttttttttttgttatttggttcgggcggcggcggcggcggcggcggtataagttcgtattcgttcgggttaggagttgttttgtgtgaggagcgttgtttgcgtagtcgttttgtatttttttattttttttttttttttttattcgttttttatttttttttttttttatttagttttatatcgtttagcgtttcgtcgttcgcgtaataggcgtttgggaatcgtcggtcgagttttacgttcgttcgtttcggttgggagtcgaagttcgaacggagttaattacggacgtcgtttgtttgcggtttttttcggaaaaagtcgattagtttgagaaattaattagaaagtgacgttgggaagttacgtttaaagagcggaaaatgtcgaaggtagtcgaacggaaagggtgaattcgttttgttcggtggttggttggaggagatattcgataatggtaatagtggttaattagagtcgtcggtttttacgaagaggtttgaagagttgaggacggtgaaatttagagacgttggtgaaattgtacggttgggcgtcgtcgtcgttttgtgattggttggaaaatttcgttgggagcgtatttttttcggtgattggtgaagagaagggggttttcgaggatagtttggttagttaggattttttttttttttttaaggtggggagaagaaagcgaagggagggcgtttataaagcgttgttttattggtttgaagtttaggcgttggagttggggtaaaagggagagggagggagttcgaaattcgcggcggcggttaatcggtttttattgtcgtttaatcgtaagatttagttgtagtgtgattggttttcggtttcggttttaggagcggggagatgtttgattcgggtcgtggttgacgattcgacggttcgtttgcggtcgtttttaataacggtggaaatcgtatatagggatcgcgggttttcggtgtagtaaatcggaaagtgttgcggtcggcggttttgggttttgagcgtttaagcgagtagaggggtggaggggttttttttatttataggaggttttcggcggggcgtagttaattttgcgcgtttaaggtttttttttgtcgtggatcgcgtgtgtcgagtgttggtttttttttcgaaagggttagacggattaagggggtttttttagtcggttgtaagtttttagacgttaaaatgggaataaagtttttagaaaggtagcgtttttgggcggtcgcgtttcgtttagtcgcgggggttattgatatagaggtttgttgcgtttggtgtgcgcggttcggtcgggtttttggaaacgtttatgagaaatgagtttatgttggatgcgcgcgttttttgggcgtaattgtttagcgtaaaacgggtttcgaaagtaggtgaggggaaatgtcgttaggtcggatattttgaagttttcgaggaaatgggggggttagaggagttcgtggtagttttggattttttggaattagggtgatttataaaagtgtagtttgagaagattttatatataagattagcgtttattgttttattatagaattagtttttttggtttgttttagaatagtgaggtatggttacgttaagataatagagaaagtagaatagatagttgttattttgattgtaatttagtggtgtttgtaatttttatttgtagagttatttttttttgttaagatgttgtttttagaaagtatatgttaaaggatttatatttgattagattatttggtttttgttttgaaatattgatgaaggatttgggatagaataaagtaagttttgatggaagataggaaaggtttagatagtgtttgtagatttaaatggttatagaggttagataagtaaagtaaatgagtgagattggttttgtgtaagataatggggaatgatagggaaaatggtaaattggaatatttatgttataattaaaaggaatagttgtttaattttagtagattgttgtttttaggaatgtgggtttagtgtttttagatgtttaatttttttttttttaaaagaaattttaaaattggatttttgtgtgaaatttttgtatttttaaatgttggtaattaaatttttaaattttgtaggttaatttaaaaatattttttggttaatgaggtattggaaaaagtgttaataattgttaggggttcgatagtagtaggagggtgaaaataaaatggtttgggattttaaataattgaaatgtatttttatttatttatttatttttgagacggagttttatttttgttgtttaggttggagtgtagtggcgcgatttcggtttatcgtaattttcgttttttcgatttaagtgatttttttgttttagttttttaagtagttgggattataggtatgtgttattatgttagttatttttgtatttttagtagagacggggtttttttatgttggttaggttggtttcgaattttcgattttaggtgatttgtttgttttagttttatagagtgttaggattataggcgtaagttattatatcgggtcggttgaaatttatttttaaaatagtgtatttttaattttttttttatttttgtgtgtattttataatgtgtatattatgttagtttaagattaagagtttatggataagttaggagtggtggtttatgattgtaattttagtaatttgggaggtcgaggtaggtggatcgtttgaggttaggagtttaagattagtttggttattatggtgaaatttcgtttttattaaaattttaaaatttagttgggcgtggtggcgggcgtttataatattagttatttgggaggttgaggtaggataattgtttgaatttaggaggtggaggttgtagtgagttgagatcgtattattgtattttagttaaggtaataagagtaaaatttcgttttaaaaaaaaaaaaaaaaaaaaagtttatgaattattagtttagataaagaatagttgta

SEQ ID NO: 395 - DNA, 6246 bp, Artificial Sequence
  chemically treated genomic DNA (Homo sapiens)
tataattattttttgtttaaattagtggtttataaattttttttttttttttttttttgagacggagttttgtttttgttgttttggttggagtgtaatggtgcgattttagtttattgtaatttttattttttgggtttaagtaattattttgttttagttttttaagtaattggtattatagacgttcgttattacgtttagttaagttttaaagttttagtagagacggggttttattatgatgattaggttagttttgaatttttaattttaggcgatttatttgtttcggttttttaaattgttgggattatagttataagttattatttttggtttgtttataaatttttgattttgagttaatatgatatgtatattataagatatatatagaaataaaaaaaggattaaaggtgtattattttaaagataaattttaatcggttcggtgtggtggtttacgtttgtaattttgatattttgtgaggttgaggtaggtagattatttgaggtcgggagttcgagattagtttgattaatatgaagaaatttcgtttttattaaaaatataaaagtagttggtatggtggtatatgtttgtgattttaattatttgggaggttgaggtaggagaattatttgaatcggggaggcggaggttgcggtgagtcgagatcgcgttattgtattttagtttgggtaataagagtgaaatttcgttttaaaaataaataaataaataaagatatattttaattatttaaggttttaaattattttgtttttatttttttattgttatcgggtttttaataattattaatattttttttaatgttttattggttaagggatgtttttaggttggtttgtagggtttgaaaatttggttattaatatttaaaaatgtagagattttatataaaaatttaattttggggttttttttgggaggaaaaaaattgaatatttgagaatattggatttatatttttgagggtaataatttgttagagttgagtagttgttttttttagttatggtatggatattttaatttgttattttttttattattttttattgttttatataaggttagttttatttatttgttttatttgtttggtttttgtagttatttgaatttgtaaatattatttagattttttttgttttttattaaagtttattttgttttgttttaagttttttattagtgttttaaagtaagagttaggtaatttgattaaatataggttttttaatatgtgttttttggagatagtattttaatagaaagagatgattttgtaggtagaaattataggtattattggattataattaggatggtaattgtttgttttattttttttgttattttgacgtagttatattttattgttttaaagtagattaaaggaattggttttatggtagaataatggacgttggttttatgtatgaaatttttttaagttgtatttttatagattattttagttttaaaagatttaaagttattacgggtttttttgatttttttattttttcggaggttttaggatattcggtttgacggtatttttttttatttgttttcggggttcgttttgcgttgggtagttgcgtttaaggagcgcgcgtatttagtatgagtttattttttatgggcgtttttagaggttcggtcgggtcgcgtatattaagcgtagtaagtttttgtattaatggttttcgcggttgggcggggcgcggtcgtttaaaggcgttgtttttttggaagttttgtttttattttagcgtttgagagtttgtagtcggttgggaaggtttttttggttcgtttggttttttcggggaagaggttaatattcggtatacgcgatttacggtagaggggagttttgggcgcgtagaattggttgcgtttcgtcgagagttttttgtgggtggggagagtttttttatttttttgttcgtttgagcgtttagagtttagggtcgtcgatcgtagtatttttcgatttgttgtatcgagggttcgcggtttttgtgtgcggtttttatcgttgttggaggcggtcgtaggcgaatcgtcgggtcgttagttacgattcgagttaggtattttttcgtttttgggatcggggtcgaaggttaattatattgtagttaggttttgcgattggacggtagtgagagtcgattggtcgtcgtcgcgagtttcgggtttttttttttttttttttgttttaattttagcgtttaagttttaggttaatgagatagcgttttatagacgtttttttttcgtttttttttttttattttggagagggaggggaagttttgattggttagattgttttcggaagtttttttttttttattaattatcgaaggaggtacgtttttagcggagttttttagttaattataaagcggcggcggcgtttagtcgtgtagttttattagcgtttttgggttttatcgtttttaattttttaagttttttcgtaagggtcggcgattttgattggttattgttgttattgtcgaatgttttttttagttagttatcgaataaggcgaatttatttttttcgttcggttattttcggtatttttcgttttttgggcgtggttttttagcgttattttttaattggttttttaggttgatcggtttttttcgggaggagtcgtaaataaacgacgttcgtgattggtttcgttcgggtttcggtttttagtcgaagcgggcgagcgtggggttcggtcggcgatttttagacgtttgttacgcgggcggcggggcgttgggcggtgtaaggttgggtgggggaggaaggaggtggaggacgagtaggaggggggaggaggagtggggaagtgtaaggcggttgcgtagatagcgttttttatatagagtagtttttgattcgggcgaatgcgggtttgtgtcgtcgtcgtcgtcgtcgtcgttcgggttaagtgataaaggaaggaaggaagcgaggaggagtcggtttcgtagtcgttgatagggttttgggttggggtaaagcgcggatattttttgagcgggtatcgagtagagtcgaggggcgggagggcggtcgagttgttgtcgcggacgggggagggggtttcgagggacggaagcggttgtcgggtttttatgttttcggcgaatggggaatagtcgaggagtcgttgtttggggtttgaagggagttgttttcgttatcgttatggtcgttggatttagtcgtcgtttgtagttgtttttggcgtaatgaggagaggagtcgtcgttatcgttatcgttcgtttttgattgattcgcgatttcgtcgttttttagttcgtcgggtttttgtcgttagttcgtcggatttcgcggtttgtcggagttgtagcgtttttcgtcgtattttcgagttatttttttttttttttttttttttttttatttatttttttttttttttaagcgtgagattcgtgattttttcgtcgttttttttttttattgattcggaaaaaaaattttcgaggaaaatataatattcgaagtatttatttttaattaagtatttgttttcgttttacgtgatatatatttttttaggatttgtttttttttttttttttttttaggaaagggaggggaaagaattgtatttttttttaagttttaaattatttatatgttaaatattcgtgtcgatttgttttgaaggagaaatatatcgtttgttttgttttttatagtatataaaaggagtgaaaagttaagaggacgaagttttttttttttttttttgtgggagaatttaatgttgtatttatcgttaatttaatattttaatataaagataaaaggaagaaaaggaggaaggaaggaaaaggtgattcgcgaagagagtgattatgttagggcggtttagaattattttttttgcggagagttgtaagtcggtgtagtagtttttagtttttggtagtatgaaagttagtagtgagtattggttttattttatattttttttttatttcgtttttaaaataagaaatttcgaaatattaggatttgaaattattagattttttgataaataggtaatggaaaagggtaaaatttatttttagttaaggatgaagtagttttttttttattttttttatattttttttttcggttttattaattttgaattgagataatatgatatttatttggatgattcgattttaaattgtttttttgtattttttttgttgttggtagttagttttattaagtgttcgagtgtttttacgttaaagtagtgatgatagtgtttatttgtttattttttagaataaagagaaggataagatttgattattaaattattatgtatatttgtagaatttttggaatttggaatgagagaatattttaggttttaggggttattatagtttgatatatttaatagagacgttaaatgttttatttttttaatattttttttttgtttgtatgattatatataatatttgtttttaatttgtggatgaatttttttagtaattatttatatttggaggttgttattgatttttttttttagaagggattagtgggagttaataaatatttagtagtagtaatatttttgtatgtatttgtgtttaattggataagtggtttgatgtgttattttttaatttttttgttttgatattattaatttgttatcgtataatttatgtttaattaaaagttaatttggaagtattaataggtttaagttttgattgagatttgttttgttatagtgttaaatattaagttaaatgttgttattggtttattatatttaagtttaattttggagtgttattgtatttattatttgttaaatgttttggcgggttttttaaaaaggacgatttaaaatattttagcgttagtttttattatatttagataattgtggatttagttagaagaatgtggatttagttttttttattttggtttttgtagatggttatggttttagaaataatagggatatttgggttgtgtttagggttgtggatagattatttttgttttgggtttgtgttgaaaagtatgtttttgaagtgtttaatatatattaagtatttaatgttttagtgtatttttatttatggagaagtttatgtggtatttaatgatagtttgtttaaatatatttgtagaatttaataaaaatatttatattgtttttttattgtgggaaagaggggtattatgagggtaaagataaattaatttgttgtttagaagaattgagagaattaaagaattgagattttaagaatttatatatacgtaaaatatgatgttatgtgaaattgattatatttttaggtaatataaaatgattatttttagttgaatttaagattttaatttatgttggttttgggaattagtttgaaatagggtagtttaggtaatagttgaatgggagataatttttgaaagttaatttttttttttttttgtggtttgtaagtagagaatgttcgggtaggtaaagaggaaagttgattatgtattttttagggaagggtcgtgttttttaagtattttatggagtgatttgaaaaatattttaaaatttcggggtaatttttagttatgatgatataaattttataatagttatttaagagttttttgtggtattggagtgtttgtatgttttatattttggtaatatagtttgaaaattagttagtttattttagttaattgatttattagttttattttagagatttgtaatgttagattataatgttatattttgggattttttattttttttttaggattttttttgaaaatgatttttgaatttttggtaatatagatattaattaaggatggagtaatttttgtaaaatatatagatgaaaatgtttaatttcgattattatataggttaatttagaattttaaaagttggagtttagtgttaattatgtgtttttgatagttttgattttaaaagtatttaaaagaaaggggagtttttaagtatttgttaggatgttagtattttaaggaatttttgttgaaaatagatataagaaattgtagtttttgtttttaaaagtttattttttagttgtagagggaggttatggggaaaaaaaaattaaaataatagcgtgatgattgta

SEQ ID NO: 396 - DNA, 6216 bp, Artificial Sequence
  chemically treated genomic DNA (Homo sapiens)
atttttagatttatatggggttaggatattggtattggattaaagaggtttttttttttgttttttttttgtttttttaatgttttgttgtaaagatttaggcggggagagagagagagagagagagatagagattgatttatagttagggttagggaattgaggggaattaatttaatttttttttttttaatttattaggtttgtattttgttttttttgtagattagtgttttgttagttatttgggggttaggggatggagtgaaggataagatttttttttattgtagtgaagttatttggagaaatgtgtggaaaatagtaagatttagtgattttttttttattttttttttaattttaggagagattttgtttttttatttatcggtttttagattaattatttatatttatataggcgagagtttttttgaatattggaggtgataggatattaggataaagtataattattgtgttttggtttaattattattttttttgtttggggtcgtcgttggtttttggttgtttttcgtatttttttttatttttattttttttttttttttttttttatttggaatatttttttttttttttttggttttttttgaattgtttttagagttatagattgtggggagtggttattgcgtttttaaggtgaggttttttaagcggggtcgagtttgttttttaattgggagttagtatgatttttgtgtgggttgttttttgttttattgtttttttttttaatttgttaggtgattttgggtttttttgtgttttttttgggttttcggaggattttttggggagatagtttgttttgacgtttttttttttgtagtaagtagtttggggagggaggtgaggataagtgaagttaagttgtttagggggttaagtttatggaagggaagatgttatagagatatatgtggttttgtgattgttgttttgtgttttttttttttttttgaaagtttaggtgattaggtgatttgagtttttaatttggtgataatgtgggtattggttgagtttttaagagtatattgttgtaaatgtcggtgataatatattggggtatgggatttagagttaatttttttaggttatagttaggttatatttttataatgaaggggggaggtgggttatattttttcgttttaatgaaggtagtttaaaaatttttaggttaggttgtaattttagttttatataaaaggaattttgtgtttttatttttttggatttttgggtaaagttttagagggaaatataaataggttgttgtaatatattttgttgggtattattatggaggatagttggtttatgggggtggggggtgtttggggttacggagtgattggtgatggttatttttttttggaatttttttagtttttttttagttttagatttgtttatttgttttttattaagatttgtttttttaggtttgttggtttttttaggggttgaagaaggtcgagttgagaagggatgtaagggagggggttagaatgagtttttagggtttagagtttttattttgttttaagatgtttatagtttgtgtttttggggtgttagaggcgtataaggaggaaagttagtggttttttttttatatttcgtttattagtttagagtatggagtttaggtgaggaggtttgtttgggagggggttttgagttaggaaataaatatttattaattgtataaagattttgtttttgttgttggggagtttgttaagtggtggagataggattagtgtacgaatgatggaaagggagggttggggtgggtgggagttagtttttttttttataagggttttaggatattatatcgatggaattgggggtattggggaggtaatttagtatttttattaaattatagtaatatgtgttgaggatggggttgattaggtaagttttttggagcgttttggttaaattgagggaaattgttgtatttttatttttagtttatgtttttatagaggttatgttagttgtaggttagattttggtaagatttgggtggataattagattgattggttttattttttttataggttttagagttttaattttgttttttggggtagtttggaaatagttaggttagaaattagttaggaatttttttaagttgttttttatatgtaagaatgggatggggtttttgggagtatttagggaagatgtggagagttggaggaaaagggggtttggaggtaagggaggggattgggggaaggataggggagaagttgtgagtttggagaagtagttaagggattttgagggaatgggggagttgagacgaaatttttatttttatttagaagatgagttatgagtttgggtttgggttgatagaagttttggtttttggtttggtgggagttttgggtagttggtttatagacgttttttagtgttggcgggtaggtttgaattattacgtaggttttggtttttattcgtttttattagttttttggttttagttttttggtaatatttggggttgggggggtagtaggaataagggtttttgtttgtttagttgtttttttttttgggttttgttagattttatagtgtatacgtgggttttaataggttttttttttttttagttattgattaatttcggaattatatagtttttcgtttttagttttataaatttggtgttaaattttttttttttgggaagtatttttggatattttttaaaggattttagttattttagtttgttggttgtcgtttattttgatgtttgtaggttagatgagggttttagatggtatattgttagagggatatattgtggtttttgtgtttagttttgggttttttgtatatgaagtaattttagttttaaatatgtagttgtttgggaggttagaaatagggggtttaggagtaaattttttttattttttttttaaagtttattttttttttagttagagtcggggtgtgtagacggtagttattagggggcgttcggttattatagggaagttgggtgaatggagcgagtagcgttttcgagagtgaggacgtgtgtgtttgtgtgggtgagtgagtgtgtgcgtgtggggttgagggcgttggagcggggagaaggttaggggttattttaggattttaatagatttgtgtgtttttttttttattcgtttttgttcggtttttcgtttttttttgttttttttaatatttttagtaaagagggaacggtttttaggttttgttcgtacgtaattttatttttttgtttttttttcgttaatgtttcgcgggcgcgtgtttttggatagagttttcgggggcggatgggtaatttttaggttgtgaattttggtgggggtcgagttttttttttattgcggcgggttgcgggttaggttttattgagcgttcgtagagttcgggttcgagtcgcgtgtggaagggttgaggttcgtttgttttcgtttttcggggcgggtcgggggcggggtttcggcggggcggagttatgcgttttttttttttttttttaaaagtcggttggtagcggggaggatcgcggaggtttggggtagtcgggtagttcggaggtcgtggcgttgggggttagtattagcgttttgtcgggaggcgtagcggttaggtggatcggttagcggatttatcggttagggcgttcggtgttggaatttgatatttattgattcgggttttattttttttttttttttttaaatatttttttttaaaattgtattgtttttcgttttaatttatttttgtttgttattttttatttgaatcgggtcgacggtttggggagattgttttatttttttaaattattgtggattttggaaattagtagaaagaggaaagaggtagtaagagttttagagagaagtcgaggaagagagagacggggttagagagagcgcgcgggcgtgcgagtagcgaaagcgataggggtaaagtgagtgatttgtttttgggggtgatcgtcggagcgcggcgtgagtttttttttttgggatttcgtagttgattagtcgcgttgacggatagatagatagatatcgtttttagttttagttattatttttttttcggtcggcggcggatagtggacgcggcggcgagtcgcgggtaggggtcggagttcgcgttcggaggcggggtggagggggtcggggttcgcggcgtcgtattgaaatttttcgtttaatttttgggttgttttcgtttcggaggagtcgtggttcgcgcgggggaagtcgagtcgagcggagtcgcgagaagtgttagttcgggtcgggaggagtcgtagtcggaggagggggaggaggaagaagagaaggaagaggagagggggtcgtagtggcgattcggcgttcggaagtcgggtttatggacgggtgaggcggcggtgtgcgtagatagtgttttagtcgcgcgcgttttttaggttttggttcgggtttcgggtcggggaggaagagtagttcgtcgaggcgtcgaggagagcgggtcgttttatagttcgagtcggagagggagcgcgagtcgcgtcggtttcggtcgggttttcgaaattatgaattttttgttgttttgggtgtattggagttttgttttgttgttttatttttattatgttaaggtaagcggtcgtgttttgttggcgtcgcgggtcgttgcgagcgtttttttcggttggggacgtgcgtgcgagcgcgcgcgtgggggtttcgtgttttacgcgggtttatgggtattaggcgtgcggcgtttttttttgtcgttttaggtgtagggggagggggcgcgcgcgttaggtgggagggtattcggagagaggtttatcgtttacgcgggttttgtttatttatcggagttatcgtacgtacgatttgggtcgattagtcgagggcgggagtcggaggaggaggtcgagggggttgggtttgcgttgtcgttgtcggttgaagtttgttttcggtcgttggtttcggacgaattggaagtttgagtagcgggggcgggagttagagattagtgggtagggggtgttcggattttggatcgcgggagggtagagagcgtggagggggtagggcgtaggagggagagggggtttgttgttattgttattcggtttttttagttttcgtcgcgagtttgggaaaagttttggggtggattgttgcggggattttttttttttgttgggttatttgcgtcgcgttaatttcgttcgttttcgttcgcgtttcgttcggtgttcgttttttttcgttcggtcgggtgcgcgcggcgcggagtcgattatattagttcgggtttggtcggtcgcgtgttttcggagtttcggttgttcgaatggggagtttagagtggcgagcggtattttttttttcgttagtttttcgcgggaaggtgatttttcgaggtagttttagttcggggatttagagaattatttttatttttttttattgtttttagattttatttttgtttagtgttaggaggaattttttgacgttttttttttttatttattttttttttagtttggagagaagtttttgttatttcgtttatttttatttttttttgcggagaagatttatttaatttttttttggttttagagtttagggaaaggatgattattgttagaagtcgtggcgcgggagtttattgggcgttttgttatattttatcgaaagtttcgatttggtgatagtgtgttttttttttttcgttaatagtttcgagtgagttgtgttttagttttcgtgggggtgggttaagggaggatttgaagagttattgttttattttatttttttggagaaatggtttgaaatttgttgtgatacgggtagtatgggaatagttttttttgaattttggaaaggagtttttgttagttttgtatatattttgttttggtgaaaggtagttttggagtaggtgtttttttggaattttaaatttgtttatttaatttgtttttgaaagggattttaaagggttttttttcgtttttttttgacgtttttttttagttagaatttttttggagaggaggtaagaggaaagttatggataggggtcgttgttaatatcgtaagtttttta

SEQ ID NO: 397 - DNA, 6216 bp, Artificial Sequence
  chemically treated genomic DNA (Homo sapiens)
tgaggaatttgcggtgttagtagcgatttttgtttatggttttttttttgttttttttttaagggaattttggttgagggaaggcgttagagaggagcggaaagggattttttagagttttttttagaagtaagttgggtgggtaggtttggagttttaaaaaaatatttgttttagggttgttttttattaggataaagtgtgtgtaaggttggtaggagtttttttttagggtttaggaaggattatttttatgttgttcgtgttatagtaaattttaagttatttttttaaaagggtaaagtggggtaatgattttttaaatttttttttgatttatttttacgagagttaaagtatagtttattcggaattgttggcgagggaagggaagtatattgttattaagtcgggattttcggtggaatgtgataaagcgtttagtgggttttcgcgttacgatttttgatagtgattattttttttttggattttggggttagaaaggggttagatggatttttttcgtagagagaaatgaaaataagcggggtgataggggtttttttttaggttaaaaaggaaatgggtgaagagaaggggcgttaggaaattttttttagtattgggtagaggtagggtttggagatagtaggaaggggtagggatggttttttggattttcgggttggggttatttcgagaggttattttttcgcggagggttggcggggggaggggtgtcgttcgttattttgggttttttattcgggtagtcgaggtttcgggaatacgcggtcggttaggttcgggttgatgtaatcggtttcgcgtcgcgcgtattcggtcgggcgggggagggcgggtatcgagcgggacgcgagcggggacgggcggggttggcgcggcgtaggtggtttagtagggagggggggttttcgtagtaatttattttaaaattttttttaaattcgcggcgagggttgaagagatcgagtggtagtgatagtaagtttttttttttttttgcgttttgttttttttacgttttttgttttttcgcggtttaaggttcgagtattttttgtttattggtttttggttttcgttttcgttgtttagatttttagttcgttcgggattagcggtcgggagtaaattttagtcggtagcggtaacgtaagtttagttttttcggttttttttttcggttttcgttttcggttggtcggtttagatcgtacgtgcggtgatttcggtgggtgggtagggttcgcgtgggcggtgagttttttttcgggtatttttttatttagcgcgcgcgttttttttttttgtatttaagacgatagagggggacgtcgtacgtttggtgtttatggattcgcgtggggtacggagtttttacgcgcgcgttcgtacgtacgtttttagtcgggagaggcgttcgtagcggttcgcggcgttagtagggtacgatcgtttattttggtatggtggaggtagagtagtaaggtaaggttttaatgtatttaagatagtagaaagtttatggtttcggaggttcgatcggggtcggcgcggttcgcgtttttttttcggttcgggttgtggggcggttcgtttttttcggcgtttcggcgagttatttttttttttcggttcgaggttcgggttagggtttggggagcgcgcgcggttggagtattgtttgcgtatatcgtcgttttattcgtttatgagttcggttttcgagcgtcgagtcgttattgcggttttttttttttttttttttttttttttttttttttttttttcggttgcggtttttttcggttcgagttagtatttttcgcggtttcgttcggttcggtttttttcgcgcggattacggttttttcgaagcgagaatagtttagaagttggacgaaaagttttagtgcgacgtcgcgagtttcgattttttttatttcgttttcgggcgcgggtttcggtttttgttcgcggttcgtcgtcgcgtttattgttcgtcgtcggtcggggaggaggtggtagttggggttgggggcggtgtttgtttgtttgttcgttagcgcgattggttagttgcgggattttaagggggagggtttacgtcgcgtttcggcggttatttttaaaagtaggttatttattttgtttttgtcgttttcgttgttcgtacgttcgcgcgttttttttgatttcgtttttttttttttcgatttttttttggagtttttgttattttttttttttttttgttggtttttaaaatttatagtgatttggggaagtagagtaatttttttaagtcgtcggttcgatttaagtggggaatggtaagtaaaaataaattaaaacgagaaataatatagttttaaaaaaaaatgtttaagaaaaaagaagagggataaaattcggattaatgaatattaaattttagtatcgagcgttttggtcggtgagttcgttgatcggtttatttaatcgttgcgtttttcgatagagcgttggtgttagtttttagcgttacgattttcgagttattcggttgttttaagttttcgcgatttttttcgttattagtcgatttttaaaaaaaaaaggggggggcgtatggtttcgtttcgtcgggatttcgttttcggttcgtttcggggggcggggataggcgagttttagtttttttatacgcggttcgggttcgggttttgcggacgtttagtgaagtttggttcgtagttcgtcgtaatgaaggggaagttcgatttttattaaggtttatagtttgaaaattatttattcgttttcggaaattttgtttagagatacgcgttcgcggggtattggcgaggagggagtaggaaagtgaggttacgtgcggatagggtttgagagtcgttttttttttgttaggaatattgaagggggtaggggaaggcggagagtcggatagggacgggtggggagagggatatatagatttattggaattttggagtgatttttggtttttttttcgttttaacgtttttaattttatacgtatatatttatttatttatatagatatatacgtttttattttcgaagacgttgttcgttttatttatttagtttttttgtggtggtcgagcgttttttagtgattgtcgtttgtatatttcggttttggttaaagagggaatgggttttggaaagggggtggggggagtttgtttttggattttttatttttgattttttaaatagttatatatttgggattggagttgttttatgtatagagagtttagggttgggtataggggttatagtgtgtttttttgataatgtgttatttggagtttttatttggtttgtagatattaaagtgagcggtagttaataggttggagtgattggggttttttgggaagtgtttagggatgttttttaggggagaagaatttggtattaagtttgtggagttgagaacgggaagttgtgtggtttcggggttagttagtgattgggagggaagaggatttgttggagtttacgtatgtattgtggagtttggtaaaatttaaagggggaggtagttgggtagatagaggtttttgtttttgttgtttttttaattttagatgttgttagggaattgaggttagggggttggtgggggcgggtggaggttagggtttgcgtgatgatttaaatttattcgttagtattaaggaacgtttgtaggttagttgtttagagtttttattaggttaggggttaaggtttttattagtttaagtttagatttatagtttattttttgaatagaaatgggggtttcgttttagtttttttatttttttaggattttttggttatttttttaggtttatagttttttttttattttttttttagtttttttttttatttttaagttttttttttttttaattttttatattttttttaagtgtttttaaaggttttattttatttttgtatataggaagtagtttggaaaaatttttagttggtttttgatttggttatttttaggttgttttagggaataaagttggggttttgaggtttgtgggaagagtgggattagttagtttgattatttatttagattttgttagggtttggtttatagttggtatagtttttgtggaggtatggattgagaatgggaatgtagtaattttttttaatttaattaaaacgttttagggagtttatttagttagttttatttttagtatatgttgttgtggtttggtggaggtgttaggttatttttttagtatttttagttttatcggtatggtgttttaaggtttttatgaggaaaagggttggtttttatttattttaattttttttttttattattcgtgtattagttttgtttttattatttggtaggttttttagtagtagggataaggtttttgtatagttagtaaatgtttattttttggtttagggtttttttttaggtaggtttttttatttgggttttatgttttaggttgatgaacgggatatggaagggaagttattaatttttttttttgtgcgtttttagtattttaggagtataagttgtagatattttggggtaggatggaggttttgagttttaagggtttattttggtttttttttttgtatttttttttaattcggttttttttagtttttaaaagagttaatagatttgaaagagtaggttttagtaaaaaataaataaataaatttgaagttaagaggaggttggaggggttttaaggagggatagttattattagttatttcgtggttttaggtattttttatttttataagttaattgttttttatggtggtatttagtaaggtgtgttataataatttgtttgtgtttttttttggggttttgtttagggatttaggggagtgagggtatagaattttttttatataaggttaggattataatttggtttaggggtttttgagttatttttattagggcgagaaagtatggtttattttttttttttattgtggagatataatttggttgtgatttggaggggttaattttggattttatgttttagtgtgttgttatcggtatttataataatgtatttttaaggatttagttagtgtttatattgttattaaattaaaagtttaagttatttagttatttgagtttttaaaaaaggggaaaaagtataaaataataattataagattatatgtatttttgtggtatttttttttttatgggtttagttttttgaataatttgattttatttatttttatttttttttttaggttgtttgttgtaggggaaggggcgttagagtagattgtttttttaaagaatttttcgaaggtttagagagggtataaaggggtttagggttatttagtagattgggggaaggggtagtgaagtagagagtagtttatatagaggttatgttggtttttagttgaggggtaaattcggtttcgtttggagggttttattttgggagcgtagtggttattttttatagtttgtggttttgaaggtagtttagaaggagttaaggaggaaggggaaggtgttttaggtgagggggaaggggagaaaggggtgggggtggagaaaagtgcgaaaggtagttaggagttagcggcggttttagataaagaaagtagtgattgggttaaggtataatagttgtattttgttttgatgttttgttatttttaatatttagggaaattttcgtttgtgtgggtgtgggtggttaatttagaagtcggtggatgaagggataaaattttttttgagattggaaagaaggtgaggagagagttattgggttttgttgttttttatatatttttttaagtggttttattgtaatggaaggaggttttgttttttattttattttttgatttttaggtgattagtaggatattgatttgtaggaagggtaggatataaatttggtgaattgaaggagagagaattgggttggttttttttaattttttgattttgattgtgggttaatttttgttttttttttttttttttttttttcgtttaggtttttgtaataaagtattaaaaagataaagagaaagtaaaggaaagggtttttttggtttagtgttaatgttttagttttatgtggatttggaggt

SEQ ID NO: 398 - DNA, 6188 bp, Artificial Sequence
  chemically treated genomic DNA (Homo sapiens)
aataaaataaaataaatagaaaaaaagaaagtaagttatggggtttaatttgagagaatcgagtgtgggtgtttattcgtaagagagcgaggggaaagaggttttttaagtttttttaattttgaaaatggggaggaggttttttaagttgtagtgttagagtgatatgatttagttttttatttttagagatggggtttggttatgttgtttaggttggttttgaatttttgggtttaagttagttttttgagttgttgggattatagatatgtgttattttatttagtttgatttggtttttgtgtttagaagatatttgttgttgttttaggtgttaaggttagtgttgggtataggggtgttagagtttattgagaaatggatatagaattttagtgtttatttttttattttggagtttgtgttttttattttatatagttttgttgtttgggaggattgtttgttttttgaggttatttgtttttggttattgtgttaggatagttttgttgtgggtacgagttatagggtaagaaagaatatatttgggagttggaaggtttaattttagggaaagtatgtagtttggggtagggtattaaggaggtttttagtttttatattttaaggaaagaaatattaggaaggtgtggttttaggtaggttttttttttttttcggattattgtttgtttgttattgatttttgttttaattttatattaatagttgttatatatatatatatgtattttaagagttggagtttttttaagttatttaggttggttttgaatttttgggtttaagcgatttttttgttttggttttttaaagtgttgagattataggtgtgagttattacgttcggtagtaattattttttagttttaatgtgtattagttttgtaattaagtgtattttatatgtttttgttaattaatttaatagttttataatggtggttattaattgttgttttacgaaagaggaaattggggttttgagagtttggggatcgatttaaagtatttagtgtttgtggatgtaattgggatgtagggagttagtgggttgggggtgaggtgtttcggtaggtggaggtggtggggtatttatttttatgatggttgttgttggttggttgtttttgttggtgattggcgttttataggaggtttggggtttggcgatgatgtttgtcggagtttgagggttcgttttttgcggggttggggtttaggtttttttttgtagagttggagtttttttgtttattcggtttaaattttgggatttggaatatgttttgggttgtgaggataagatgttacgtagttaaggtatagttggggttaacggtggttttggaaggtagaggtaggtatttttggtttttttttttatcgtagcgtttttaggttcgttaggttttttgggtttttatttgtttgtcgggtttggtttggtagggagttgaggttgtcggtttaggattttagtttttttttagaatttcggtggatttaggtttcgtttcgttcgtggtgacggcgtataggttttattttaagttcgatttcgaggtttttgattcgggtttgtcgtttttttttagtatttcgggtttcgggttttagttgtttgggtaacgggaattgttagcgatttggtttaattatttttcggaacgttattcgggtaggtttagaggcggggttaattcggttcggtttcgttttttcgtcggatttaaggtttttcgttcgtatttttttttttttttttttcggtttcggggtttatattttcgttgttttatattttgggcgtgtgtgggagtaggagagggattttttggggtttttatttggaatttggagatttatttttgttaataagttttttagtttttttgggttttagtttttttttagtgaagtggggatagtgatagttttttcgggagttagtgaaaattttgtgaagggagtgattattgcgggcgaaggcgtttggtatagttataattgaagtttagtcgtcggatgtgattattgttgttattgttatcgtttcgtttggattgggtgttcggtcggaaagtttcgtttttcgtttttttttttaggcgcggaagtttcgcgtcgttcgtttcgggggatatttttcgcgttatttcgggggtattggagataaggaaaggaattttttttttggttgggatggttgttcgggcgcgggaggagggtcggggattcggtgagggaggatcgtagggttcgtgggggttttacgtttggtaggcggtcggttaggtgagtagggtcgcgggcgcgtcggggcgaggggcgggttcgcgcgggggattcggggtttcgcgggtttaggttcgggggcggggttcgggggttattttggttatgggcggaagttttttttagagatcgagggacgggaattcgttgtcgttttcggtcgggcggtacgatttcgatttgggtataggagagaggagcgtgggaattggcggatttttatataagtaaaggcgggcggtacggggtacggtttattcggggattttttggatgcggtacggttttcgtaattcggtcgtttttttgtcgtttttcgtaatttcgggcgttcgttagcggcgtagttcgcgttaattttcgtacggttttacgtcgggtgcggcgttggattgcggagttagtcgggtcgttgcgtaatttgcgtagcgaacggcgttcgcgtaggcgcggagggggaggggggcggagtagcgggagtcggggagtcggagtttcgggtttttacgatttgagtcggtttttttattagcggtttgaggatttggcgttcgttttttttttttttttgaggttggagcgtggacgcggtgggggagggtggggcgggggtagttttcgagaattacgaggataggaggtagaggttttttttattcgtattattggaggagagagagttttttttagtttggggagggggagagcggggtattgggcgtttttcgtagcggtcgttgttttgattcgacgggtattagtcggttttttttttttatttaggacgatatgaacgatcgaggttagggagttttttttttgggtttttgtatttttttatttttggttttggggtaggtttagggaggagatatttttaatttttattcggtttgttttggagaaaagagattgtttttttatgtttttgagtgaggggtttggggtttaggttgtttgtgttttttaagggtaagggtttttttgttgaggaggaggggtttgttagttataatttttttttttttgagcgttttatttttttttttgtattttgtaatttttattttttcgtatttatttttttggtttcgtcgatagtttttttttgtttgttttcgggatttaggtttttttttttgatatggagagtaatttgtttggtttggtgtttgttgtcgggttggtgtttgcgttgttatttgttgtgattttggggttgatagttgtttatattattttgtatgttttgtttttttttttcgtttatgtttagttttggttggtgtttttgtatgggtataagcgttttagttattagacggtgtttttggttttttgtttgttttgggtcgttttgcgtattatttttttttttttttattttcgagatatttttcgcgttaatcgtttggggtttttgtttttttggtttttttattgttgtttcgtttgtttgtagttttttattttgacgtttatgaatttttattttgtttaggtaattaattgtggtttcgggtggggggcgggaggtggtaagttttaaggatttataggagtgaagggtatttttgtttttaggtggtgtttaaggttaaggtgaagcgtcggtcggagatgagtcgaggtttgtaagtattcgggatattggtgggtttagtttttaggttaggggtaggtgatagttttatgtagatttttttttattttttagggttgagataaaggtaatttagggaatgtttgtggaagattttggaaaagttaaagtatttggcgtagatggtttagtagaggttttgtagatttgtaaggtataggaataggaatgtttgtggtagtgtgagggagagggttttagtgttatttattatggagggcgagttggaggttttagtttatggaagtattaaagttatatgtatttttgggtgatttggggtcgtaatgttttcgttatttgtatagtgttttacggtttataaagagtttttttagttattttttatttgtataatttttttgagaggttattatttttttttgagagatgaagaaattgaggtttagttaggtaagatagtaggattaaggtcgtagagttggggtttagatagagatttttgattttagttggtgtatttttcgaagtattatggttgttagttattttttgatttttttgggttttagtttttttatttgtaagagtggaggaatagggtttagattggatgttttgagttttgtcgatattggggttttttgtaggaggtggggtaggtggtgagtgttgagggttgttgagggttcgcgttgattgtgttgtggttgtaggttcgttgttcgaggggtttttgtgggggtttcgttgttttttttgttggtgaacgtgttgtgtgttgtgtttttttatcggcgtcgggtatagttttgggttttgttgtttgttcgcgttttggtgagcgattttttgttcgttatttgcgcgttgttttttgttgtttgtttttgtttcgtcgttaggcgggcgttttttattagtatttatttggaggttaaggtagggttgtagtattgatgtttaggtgttttttgggtttttcggtagcggtttttagggtgtagaggaagttgggagttttttttttttgagggttttttgttgttatttgtgttaggggattagtgtgtgttaggcggtcgcgatgggtggcgttatggttttgttttatgttagtcgggtttgttataatttgatagtattggttttggttttttagagtcggttggatattttcgattacgattggtataatgtgtttgattaggtgggtatacgtatgtttgttatttttttagtagtcgtggtattttggttttagttggtttgggttttgttttattatttttttggcgtgattgtagattggtattagtttttgtttttttataggcggatttggtgaatgatttggggaataaaggttatttggtatttggttttatttttttcgtgtgggagttattgtttattattttgttggtgggtttttttcgggtgtatcggtttttataggatttggtaagggtttgtttttttttttgtggggttagtggagggggcggatgttgtaaattttgggttggagtttggggttgggtttgggaggttagtgtaggataggagtaagtatcgatgatggtttttttttttagagtattagttatatttttaatgggtaggtttttgtttttcggttttatttttttgatcgggttgggtattgtgaagatgagggttgtttttgggagtatagtcggggtgagagtattaggtaggagtcgtggtattgttttagtatttttgttttattcgtttatttcgttggttttattaagttatgggggatcgagatagtcgggttttgttttttatttttgttatggtttttgtttttttatttgtattaggtgaggttttttgggtttttattgttaaagtttttattttttgtttagagatgtattttgttttgggtttcgaaggtttaggttataggggttttgttttaagtttgttttttttttgtagtttttgtgattgtggttttggttattgttttgagattgattttgtttttttgttgtagtatgtcgggtagtttaggttttgggagttggtatggtgttatcgggcgtgagtcgggttggtatgggggtagttagacgaagattatttttttgttttttttttaggtgttaggattaggcggttattattatagtttttattttattttatagacgtgattttttttttttttttatagaatatttaggttttagttttttttatt

SEQ ID NO: 399 - DNA, 6188 bp, Artificial Sequence
  chemically treated genomic DNA (Homo sapiens)
ggtgagggggattggggtttgggtattttgtgggggagggagggggattacgtttgtggggtggagtagagattgtggtggtggtcgtttggttttggtatttgggagaagagtagaggagtggttttcgtttggttgtttttatattagttcggtttacgttcgatggtattatattagtttttagagtttagattgttcgatatattgtagtagagaaatagggttagttttaggatagtgattagggttatagttataagagttgtaggaggaagataggtttagaatagaatttttgtgatttagattttcggggtttaggataaagtatatttttaggtaagaggtggaggttttagtaataggaatttaggggattttatttagtatagatggggaagtaaaggttatggtaggggtggaaggtaagattcggttatttcggttttttatagtttgatggagttagcggggtgggcgggtagggtaggggtattgaggtagtgttacggtttttatttggtgtttttatttcggttgtgtttttaggagtagtttttatttttatagtgtttagttcggttaaagaagtaggatcgagaggtaaagatttgtttattgaggatgtggttggtgttttgggggaggaagttattatcgatatttatttttgttttgtattggttttttaggtttaattttagattttaatttaggatttgtaatattcgttttttttattggttttatagaagagggagtagatttttattaggttttgtgggggtcggtgtattcggaagaagtttattagtagggtggtgggtagtagtttttatacgaagaggatgaggttaaatattaggtagtttttgttttttaggttatttattaggttcgtttgtgggaaggtaggggttggtgttagtttgtagttacgttaaaggggtagtgggatagggtttaggttagttggggttaaggtgttacggttattaaggaggtggtagatatgcgtatgtttatttggttagatatattgtattagtcgtaatcgaaggtgtttagtcggttttggggggttaaggttagtgttgttaggttgtagtaggttcggttggtatagagtaggattatggcgttatttatcgcggtcgtttggtatatattggttttttggtataggtaataatagaggatttttagggagagaaggtttttagttttttttatattttgagaatcgttgtcgagagatttaaaagatatttgggtattagtgttgtagttttattttggtttttaggtagatgttagtggagggcgttcgtttggcgacgaggtagaggtaggtagtaagagatagcgcgtagatgacgaatagggagtcgtttattaggacgcggataagtagtagggtttagggttgtgttcggcgtcgatgggagagtatagtatatagtacgtttattagtagaaagagtagcgaggtttttataaaggtttttcggatagcgagtttgtagttatagtatagttagcgcgggtttttaatagtttttagtatttattatttgttttattttttgtaggaaattttaatgtcgataaaatttagggtatttagtttgagttttgtttttttatttttatagatggagaaattgaggtttaaaaaggttagaaggtgattgatagttatggtatttcggaaggtgtattaattggagttagaagtttttgtttgagttttagttttgcgattttgattttgttgttttatttggttgggttttagtttttttattttttaagggaggatagtagttttttagggaaattgtataaataaaagatggttgggaaagttttttataaatcgtaagatattgtataaatgacgagggtattgcggttttaggttatttaggagtgtatatggttttggtgtttttatgggttggagtttttagttcgttttttatggtggatgatattggggtttttttttttatattattataagtatttttatttttgtgttttgtagatttgtaaggtttttgttgagttatttgcgttaggtgttttaatttttttaagattttttatagatattttttgggttgtttttgttttagttttgagaggtgggaagggatttatatgggattgttatttgtttttgatttggaggttgagtttattagtgtttcgagtatttataagtttcggtttattttcggtcgacgttttattttggttttgaatattatttaggagtagagatgttttttatttttgtgggtttttgaggtttgttatttttcgttttttattcgggattatagttggttatttgggtaaagtagaggtttataagcgttaaggtgaagaattgtaggtagacggggtagtagtagagaagttagaagggtaagggttttaggcggttggcgcggggagtatttcggaagtagaaggagaagagggtggtacgtaaggcggtttagagtagatagagggttaggaatatcgtttgatagttgagacgtttgtgtttatatagaagtattagttagagttgggtatagacggagaagaagagtagggtatatagggtggtgtaggtagttgttagttttagggttatagtaggtggtagcgtaggtattagttcggtagtaggtattaggttagataggttattttttatgttagggagggaggtttgaatttcggagatagataaggagggattgtcggcgggattagggaaataaatacggaggggtgggaattgtagggtgtagagagggagatggggcgtttaggaggaaagaagttgtggttgataggttttttttttttaatagagagatttttgtttttggggaatataggtagtttgggttttaggttttttatttaggggtatggaagggtagttttttttttttaggatagatcggataggggttgggggtgttttttttttgggtttattttagagttaaggatggggggatgtagaggtttaaggagaggattttttggtttcggtcgtttatgtcgttttgggtggagggggagagtcggttgatattcgtcgggttagggtagcggtcgttgcgaggggcgtttaatgtttcgttttttttttttttaagttgggggaggtttttttttttttaataatgcggatggggagggtttttgttttttgttttcgtaattttcgaaagttgttttcgttttatttttttttatcgcgtttacgttttagttttaaggggagggaggaggcggacgttaggtttttaggtcgttgatgggagagtcggtttaggtcgtggggattcggggtttcggtttttcggttttcgttgtttcgttttttttttttttcgcgtttgcgcgggcgtcgttcgttacgtaaattgcgtagcggttcggttggtttcgtagtttagcgtcgtattcggcgtgaaatcgtacgagaattggcgcgagttgcgtcgttggcgggcgttcggggttacgggaggcggtaggagggcggtcgagttgcgggggtcgtgtcgtatttagggggttttcgggtgggtcgtgtttcgtgtcgttcgtttttatttgtatgggggttcgttagtttttacgttttttttttttatatttaaatcggggtcgtgtcgttcggtcgggggcggtaacggattttcgtttttcggtttttgaagaaaattttcgtttatagttaagatggttttcgggtttcgttttcgggtttgaattcgcggagtttcgaatttttcgcgcgggttcgtttttcgtttcggcgcgttcgcggttttgtttatttggtcggtcgtttgttaggcgtgaagtttttacgggttttacggtttttttttatcgggttttcggtttttttttcgcgttcgggtagttattttagttagggaggaggtttttttttttatttttagtgttttcgagatggcgcgggaggtgtttttcgaggcgggcggcgcgaagttttcgcgtttgggaggaggagcggggagcgggatttttcgatcgggtatttagtttaggcggagcggtaataatagtaataataattatattcgacggttgagttttagttgtggttgtgttaagcgttttcgttcgtagtaattattttttttataaagtttttattggttttcgggggagttgttattatttttattttattggggggaaattaaggtttagaggggttgaaggatttgttggtagaagtgggtttttaggttttaaatggggattttagagaattttttttttgtttttatatacgtttaaggtgtgaggtagcgaggatgtgagtttcggggtcgaaggagggaggaaaaaggatgcggacgaggagttttggattcggcgggggggcggggtcgggtcgggttgatttcgtttttggatttattcgagtgacgtttcgagaggtgattgggttaggtcgttgatagttttcgttgtttaagtaattagggttcggagttcggggtgttggagggaggcggtaggttcgggttaggggtttcgagatcgggtttggggtgagatttgtgcgtcgttattacgggcggggcggggtttgggtttatcggggttttgaggggagattgaggttttgagtcgatagttttagttttttgttaggttagattcggtagatagatgagggtttaggaggtttggcgggtttgggggcgttacggtgggagaggaagttaggggtatttgtttttgttttttagggttatcgttggttttagttgtgttttgattacgtaatattttgtttttatagtttagagtatgttttagattttagagtttgagtcgagtgagtaggaagattttagttttgtagagaggggtttgggttttagtttcgtaggggacgggtttttaggtttcggtaagtattatcgttaggttttaggttttttgtgggacgttagttattagtaggagtagttaattagtagtagttattatggaggtaagtattttattatttttatttgtcgggatattttatttttagtttattggttttttgtattttagttgtatttataggtattgaatgttttgggtcggtttttaaatttttagagttttagttttttttttcgtaaaatagtaattaataattattattgtaggattgttgagttaattagtaggaatatataggatgtatttgattatagagttggtgtatattaaagttaaaaaatggttgttgtcgggcgtggtggtttatatttgtaattttagtattttgggaggttaaggtaggaggatcgtttgagtttagaagtttaaggttagtttgagtgatttagggagattttagtttttaaaatatatatatatatatatagtagttattagtgtggggttaggatagaaattagtgataggtaggtagtgattcgaaaaggaaaaggggtttgtttaaggttatatttttttggtgtttttttttttagaatgtgggggttggaagtttttttggtgttttgttttaggttatatgttttttttgggattaggttttttagtttttagatgtgtttttttttgttttgtggttcgtatttatagtaggattgttttggtatagtggttaggggtagatgattttaaggggtagatagtttttttagatagtagggttgtgtggggtgagaagtataggttttaagatggaaggatggatattggggttttatgtttattttttagtaggttttagtatttttgtgtttagtattggttttggtatttggaataataatagatattttttgaatataaaaattaggttaagttgggtggggtggtatatgtttgtagttttagtaatttaggaggttggtttgagtttaggaatttaagattagtttgggtaatatagttagattttatttttaaaaatagaaaattaggttatgttattttggtattgtagtttaaaagattttttttttatttttaggattaagaaggtttaagaggttttttttttttcgtttttttacggataaatatttatattcgatttttttagattggattttatagtttgttttttttttttttgtttgttttgttttgtt

SEQ ID NO: 400 - DNA, 6161 bp, Artificial Sequence
  chemically treated genomic DNA (Homo sapiens)
ttttataaaaaatgaatttaattaagtatggtgtagtatatttttagttttagttattagggaggttgaagtgggaagattgtttgagtttagacggtggaagttgaagtgaattgtgtttgtattattgtattttagtttaggttatggagtgagaattttgtattataaataaataaataaattaggagtgtaaatgaagatttggattaggttattttttaaagaagagggtaattttgttggtggtagttagaatgattaggttaagagtaaaaatgaaatgaggatggttgaaaggatatagttataaaggagtgtaataggttgtgtgtttagaatagaggagagaattgagtatggatttgtaaatggtgtggatttagattatgagaattatattgattatgtgaaggtaagaggtgattttgaagcgatagtgttaaagttatagtatgagatggttgtgttagttttttatatattagtttatggttttgggaaaattatttaatttttttaaattttaatttttttatttatagaatgaggataaaatagtataaggattggtgagaggaaaaaatatatatgtaaaaaaagtatagtatttaataattttttaaaatatgttagtttttatttttttttttttttgagatagagtttcgttttattatttagtttggagtgtagtggtatgattttagttttttgggtttaagtgatttttatgttttagttttttgagtagttgggattataggttggttaatttttgtattttacgtttggttaatttttgtatttttagtagagatggggttttgttatgttggttaggttggtttcgaatttttggttttaagtgatttattcgttttggttttttaaagtgttgggattataggtatgagttatcgaatttagttagttgttattgttattgttgtagaaaagattttgtttttttagtgattataagggaagatggtaatatagaggtttggattggaggtagaagtaaagggagttagtagaataggagaattaggttgtttttttttggtttttggttggggtattttttaaaaaagtgttagatttaagagtttagggggttggttgtgagtgtttttatgtggattagttatggttagattgttttacgtttgtgatttgttttgtataaatatattgttatgtataaataatggttttatatatatgtaatttggaaggataaatattaagtttaatattggtaatttgtagggagggaagtggaattgggtgtgtatgtgtgtgtgtgtttgagaatttgtattttattatttcgtacgtttttattgtttgattttttttataatgagaatgagtttgtgtgttgggtaaaaaaaagaaaaagaaaaaaattttattaaaattaatttaattataaaagaagatgaattaaagaaaagtatcgagagaaattgtttgtgatttaagttttggttttttaatgtttggttgaagtttagtttataaagagaatattgggttaaaggttttggagaaaagatgggaaaggtttggtgtttatgtggtgtttgttagttttataagggtaaggtatttggtagacggtttttagtttaatgggaattgtttttgttttttaggtatatagtttagggttggaaaagtttaataagtgtatggaatatcggaaattttttgaaaatgttaaatttgtttcgagatgtttcgaagttcggtatatttttttgggtagtttagaggtttaggagtttagtttagtttagtttatcgtgtttttttagttagtttttttttgtttttagtagttttttttttttttgagtagtggttttttgtaggtttgcgttttagtttcgtttttttttttggacgtatttttgggttttattattattcggcgtcgggttttttttttgtttttttttttttttttttttttttttttttttttttttttttttttttttttttttttagtttttgtattaggaaacggttcggatttcggtagcggtttgattcgtgagatttttaatttggtaggcgggcggggttggagattggttgaggtgggggtaagggaggagttgggtttttgggttgtattagggggaatcgggaatagagatggtgtcggtaggaagtttttggttttgggtttttcgggaggatagttattaaatatggattcggttatatagttggtagagcgttgggggtaggggtttaggtttagagttgtaattttagttttttttaggttagaatttgatttttggttttttttttttggttttgattttttttttttttttttagggttttacgttggttaggaggatgaaaggttttagttgggggttttttgttattagtgttgtgttttaagagttgttatttcggttgggtgagtgttttttttttttttttgtttggagtaatttattgcgttttttatttttttttttagtttatttgtttttttttattttgtgtttttgttaatatttttatattttgtatttggggaggttttaagattttttttttagttaagaaggtgtggattaaggagattcgggggtgggggtgttgtaggggtgttattgagttgacgttgttttattgtgaaaagaatttaaagtattttaaatagaaaatttatttgttttatatttaatttggtatattaggaatgtaatggttagttatttatagtttagttttatattatgatttaatttttttgtttttgtttttttttgtttagtgagttttgagtatttttttttttttttttattttattgggttggttaaattagaagtgttttttttgattttttttttatatatttatgttagttttttatttttgttttttatagtcgttcggatggcgattttagtttcggttttagatatacgggttttggtggtagattttgtaggttataagttgaggtagaagggttatgtttgtggagttggtttcggggagggtttagtagttgattcgttgtattaagttatgcgggtagttggagatgagttcgagattcgttttcggcgtattttttttgatttggcggtttagttgtatgtgattttaggtttagtttaataacgttttatttaggttttcgatgaatttttttaagggggttttaattggggtcgttttgtagttttttttgtttttggggttgtattgtgtgttgagagtgttaataaggagatggaattattggtgggataagtgtaggagtggatggtggtttatttggagacgtagttggttgattggatttatagtagtgggggttgggtaagaagttttttaattgtcgttttgtatatttttttgtaaagttggtttttagggggaagatgggggttttgattggaggttgaggtagttatgttgggaatgaggtacggggttgagttttttcgtttggatggaattagattgagagatgtttggattttgtattttagggttgttatgtagttaatattggatgggtttatggttttaagtagaggatagaatatatatttaaggagtgtttgtaggggaatgttgttagggattttttatatttgagttatggcgtgggaggtggggaggattagggatgggtggtggttaggtaagttttggtaaaggatgttagttttgagtagaatttttcgttaaggaaaggatggaatttattggaggtagagtgggtagatgaattagttttttagggtgggggtgtatttggggggattagaggggtttgtagggagaagagttttggttagagaggagttgggtatggggtagtgttcgtagtggatggaattggaattttttttttttttttttttttattttttttttttttgatattttttttttttttttttttttttgtttttttttttttttataggcggagtttatagttttatacggggacggggttttggaggaggcgcggcgtttgcgggaggggaattgggtattagtgaggatagtgttgacgggggtcgtggtattgggggttttggtaattgtaggggttttttttgttagtaagtgaaagtttagggttaggtggggttaggtgtggttgggggttaggagagtaggaatagaatagagaaatgtttttggaagaagtggagttggtggatgggtgggtatggaataggatgggtagagaaagggtagtgtgtgagggagttgagtaggttaggtaggcgattggaagagtgagtaggatatagaggggaggggaatgttttggtaagtttaggggtataggagatgtagtcgttttagggttgggggaggtgggagggattacgtttataggtgtgggtatatgaaacgatttggaatttgttttatagttttgaggaaggtggatttatataagtagttgtattttattagatgagtgggatttagggaacgtagaaggtatatttttttggaatggaagtttaggggtttttaggtgatagggagaggtggttgttaatagtgggttgtttggatacgcgtgtgtatgtgtacgtatgttggtgtgtatgttgggttgtttggtaaatttggtggtgatgggattttttaaggagaaaatatttttttttgtaatggtaagaattaggggtagttttttgtttttttttttaatttttttttttttttgtttttgttttgatgttttaaggtttagagagaaatattgtatttagatcgagggttttgttgtttttttttagaaagtgattggtaaggttttggagagaagagtagttttgtagttggttttgtttttttattattttttttttttgtgtattatgtatttgttgttgttttttgggttttgatagaagggtagggttgttgagtttggatgggtggaggtttaggtagtcggatttgtttgttattttttttttttatttaggtataatggtgtttaaagtgtttttaatttttgggatttttgtatttaaattgaaattttaaattggggttttaattaattttttttttgaggttgtgggtataagtgttgatttagaatatagtttgggttttatattgtgttttagtgagattgttgatgttttgagatgattattttagatttgaattttatgggtgtgagggtgatgggtattttaggattggtttatgttgtgttgtgggttttggttcggttttattaggggttaggtatatgggttttagagtatttattatgatttagaagtatttatgatttatttgaagttatattgtttgtatgggtgttatttgtttgtattttagagtttgaggatgttaattttggaattcgtagttttttagaatagttttagattatggtttttttttttgaggaagaaattatttattttagatgtatgttttgagttagattttattgttgtattttttaaggtgttaagattgttgttttttaatgttaattttttgatatagtgttttagaattttgtttgtggttttgagtattgattattttagttagattatggttgattttttttggagatttttatttggttttagaatgtggtaacgtagttgtgttcgttagaacgtgggattaaattggttttaggtgttgagtttagatttttgtttttgagagagggttgtatttttttatggtatttttaggggaggtggtaggttgtatgtgttatttggttttgttgtgagtatgttgatattagaaatttagagttagtttgtggtaagtagttggggtggggggtttttgatttgtttaggataaattaggttagtggtttttaaattgtttggtagagttttgaagttttttaggggttgttttaggagtttttggggagatgaagggggtggggagttgagtaggttgggtaatttgtttttaaatagaatagttttttttgtagttgttttatatattggggtttagggtaagattttatttgtattaaggggtttgttgttgaaaaaaagttggaaaattattgattagattatcggttttaaattggagtttgtgtttttttttttaggtatggagtatatttt

SEQ ID NO: 401 - DNA, 6161 bp, Artificial Sequence
  chemically treated genomic DNA (Homo sapiens)
agagtgtgttttatatttggggaaggaagtatagattttaatttggagtcgatggtttagttagtggttttttaatttttttttagtagtaaattttttaatgtaaataaaattttattttgaattttaatatgtaagatagttataaggggagttgttttgtttgagggtaaattgtttagtttgtttagttttttattttttttatttttttaaggatttttgaggtaatttttaggaaattttagggttttgttaagtagtttgaaaattattggtttagtttgttttgagtaagttagagattttttattttaattgtttgttataagttggttttgagtttttggtgttagtatatttataataagattaagtggtatatgtagtttattattttttttagaaatattatgaaaaagtgtagtttttttttaaaagtagaagtttggatttaatatttgaggttaatttggttttacgttttggcgagtataattacgttgttatattttaggattaagtgaaaatttttaagaagagttaattatggtttagttaaggtgattagtgtttaggattataggtagggttttagagtattgtgttagaaagttagtattggagagtagtaattttagtattttggaaagtgtagtagtgaggtttggtttagggtatgtatttggagtgaataattttttttttaaaagaaaaagttataatttgaagttgttttagaggattgcgagttttaaagttaatatttttagattttgaggtatagataagtaatatttatgtaaatagtgtggttttaaataaattataaatgtttttaggttatggtaggtattttagaatttatatgtttggtttttgataaagtcgaattaaagtttataatatagtataggttagttttggagtatttattatttttatatttatgggatttagatttgaaatggttattttaaggtattaatagttttattgagatatagtgtgggatttagattgtattttagattagtatttatgtttataattttaaaaggaaaattagttagggttttaatttagagttttagtttgggtatagaggttttagagattggaaatattttaggtattattgtgtttgagtgggagaggagggtggtaggtaggttcggttatttaagtttttatttatttaggtttaatagttttgtttttttattagagtttaggaggtagtagtaagtgtataatgtataaggaagggggatgatgaaggaataaggttagttgtagaattgtttttttttttaaagttttgttaattattttttggaaagaagtagtagagttttcggtttggatataatgtttttttttaagttttgaggtattaggataagggtaggggaaaggaggggttgggaggagggatagagaattgtttttagtttttgttattgtaagagggaatgttttttttttgaggaattttattattattagatttgttaggtagtttagtatgtatattagtatgcgtgtatatgtatacgcgtgtttaagtagtttattgttaatagttatttttttttattatttgagaatttttaagtttttattttaaagggatgtgttttttgcgttttttaaattttatttatttaatggaatatagttgtttatgtaagtttattttttttagggttgtgaagtaagttttaggtcgttttatgtgtttatatttataggcgtgattttttttattttttttagttttggaacgattatattttttgtgtttttaaatttgttaaaatattttttttttttttgtgttttgtttatttttttaatcgtttatttggtttatttagtttttttatatattattttttttttgtttattttgttttatgtttatttatttattaattttattttttttaagggtatttttttgttttgtttttgtttttttggtttttagttatatttagttttatttggttttggatttttatttgttagtaaaaaaggtttttatagttattagggtttttagtgttacggttttcgttagtattgtttttattgatgtttagtttttttttcgtagacgtcgcgttttttttagggtttcgttttcgtatagagttgtgaatttcgtttgtgggagagaagggaagtaggagagaaagaaggagaaagggatattaggagaggaaagagtggagagaagaggagaggaagagttttagttttatttattgcgagtattattttatatttagtttttttttggttaaagtttttttttttgtaagtttttttgatttttttaggtgtatttttattttgagagattggtttatttgtttattttgtttttagtgaattttattttttttttggcgaaaaattttgtttagaattagtattttttgttaaggtttgtttgattattatttatttttggttttttttattttttacgttatgatttagatgtaaaaagtttttgataatatttttttgtaggtattttttgggtgtgtattttgttttttgtttgggattatgagtttatttagtgttgattgtatggtagttttggagtgtagagtttaggtattttttaatttaattttatttagacggggagatttagtttcgtattttatttttaatatagttgttttagtttttaattagagtttttattttttttttggagattagttttgtagaaggatgtgtagagcggtaattgagaagttttttatttagtttttattgttgtggatttagttagttagttgcgtttttaggtaggttattatttatttttgtatttgttttattagtggttttatttttttgttgatatttttagtatatagtgtagttttaaagataaagaaggttataaggcggttttagttggggtttttttgaaaaagtttatcggagatttgggtgaagcgttgttgggttgagtttggggttatatgtagttgagtcgttagattagagaaggtgcgtcggaagcgggtttcgaatttatttttagttgttcgtatggtttggtgtagcgggttagttgttgggtttttttcggggttagttttatagatataatttttttgttttagtttataatttataaagtttgttattagagttcgtgtgtttggggtcgaggttggggtcgttattcgggcggttataagaggtaaggatgaaagattggtatgaatatatgaagagagaattagaaggagtatttttggtttgattaatttagtgagatgaggaggagagaggaaatgtttaggatttattggatagggagaggtaagaataagggaattaagttatgatatgagattaggttgtgagtggttggttattatatttttaatatgttaaattaaatgtaaaataagtaaattttttgtttaggatattttagattttttttataataagataacgttagtttaatgatatttttataatatttttattttcgggtttttttagtttatatttttttggttagaggaagggttttaggatttttttaaatgtaagatgtaaagatgttggtagagatataagatgagggggagtagatgggttgaagagaaaggtgggagacgtaatgggttattttagatagagaaaggaaggagatatttatttagtcgggatggtagtttttaagatatagtattggtggtaaggagtttttagttggggttttttatttttttggttagcgtggagttttggaaaggggagggggagattagaattaggaggggaaggttagggattaggttttggtttgggaagggttagggttgtagttttgggtttaggtttttgtttttaacgttttattagttgtgtggtcgaatttatgtttaatgattgttttttcgggaaatttaaggttaagggttttttgtcgatattatttttattttcggttttttttagtgtagtttaaaggtttagttttttttttatttttattttagttagtttttaatttcgttcgtttgttaggttagggattttacgggttaggtcgttgtcgggattcgggtcgttttttggtgtaggagttgggagggagggagagagggaggaagggagggaaggaaggagggaggagaaaggggggggtagagggagggttcggcgtcgggtgatgatggggtttagagatgcgtttagagagaggggcggggttgggacgtaggtttgtaaagggttattatttaggaagagggagggttgttgaaggtaaagaagggttggttgagagggtacggtgggttgggttgggttgggtttttgagtttttaggttgtttagagaaatatgtcggatttcgggatatttcggggtaaatttagtatttttaggaggttttcgatgttttatgtatttgttgaatttttttagttttgaattgtgtgtttggaaaataggagtagtttttattaagttgggaatcgtttattaggtgttttatttttatggggttagtagatattatatagatattaaattttttttattttttttttaggatttttaatttagtgttttttttgtgggttgggttttagttaggtattagggagttaggatttggattataagtagtttttttcggtatttttttttaatttatttttttttgtaattagattgattttagtggggttttttttttttttttttttttatttaatatataaatttatttttattatgaaaaaaattaaataataaagacgtgcggagtaataaaatataggtttttaaatatatatatatatatatatttaattttatttttttttttgtaggttgttagtgttaagtttgatgtttatttttttagattatatatatatggggttattatttatatatggtagtatatttatatagggtaggttataggcgtgaagtagtttgattatagttgatttatatgagggtatttatagttagttttttgggtttttggatttggtatttttttaaagagtgttttaattaaaggttagaaagaggtaatttaatttttttattttgttagttttttttgtttttatttttaatttaagtttttgtattattatttttttttatggttattggagaagtaaggttttttttgtagtaataatagtaataattagttgggttcggtggtttatatttgtaattttaatattttgggaggttaaggcgggtggattatttgaggttaggagttcgagattagtttgattaatatggtaaaattttatttttattaaaaatataaaaattagttagacgtaaaatataaaaattagttagtttgtaattttagttgtttaggaggttgaggtatgagaattatttgaatttaggaggttgagattatgttattgtattttagattgggtgatagaacgagattttattttaaaaaaaaaaaaaggtaaaaattaatatattttgaggagttattagatgttgtgttttttttatatgtgtattttttttttttattagtttttatgttgttttatttttattttatgaatgaggaaattgaggtttggagaggttaagtgatttttttaaagttataggttgatatgtaagaagttagtatagttattttatgttgtaattttgatattatcgttttaagattattttttgtttttatatagttaatatggtttttatagtttgaatttatattatttataagtttatatttaatttttttttttattttaaatatatagtttattatatttttttatggttgtatttttttaattatttttattttatttttgtttttagtttgattattttggttgttattagtaaggttgtttttttttttagagaataatttagtttaagtttttatttgtatttttggtttatttgtttgtttgtgatataaggtttttattttatggtttaaattggagtgtagtggtataagtatagtttattttagtttttatcgtttaggtttaagtaatttttttattttagtttttttggtagttgggattagaggtgtattgtattatgtttggttaaatttattttttatagag

SEQ ID NO: 402 - DNA, 6195 bp, Artificial Sequence
  chemically treated genomic DNA (Homo sapiens)
atttttattttttagaagagtttggtatatagtggatttttagtaaatatttggtgaatgaatagattgttgataaaatatgttataattttatttttattgtttttagtttaggttgtttaaataggatttatttgtgtagtgtagaaattttaatataggtttatagtgaagttttattttggtaaaggttttaggatttgggattattaaatgtaaaaaaagagtaaatttattttttagatatttattggttgattaggcgagggtttgggatatattaaatgtaggtaagtaagaattttaagttattatttttgtgtatgtaggtagtattagtgttagtaataataagttagtttttttggtaaatttattaaaattaaattttaaatttttgaaaaaattaatatgtttattatgtttttgttagtttagaggtttaattatttgtgggggagggtttataattatgattaattatttatgatttgaaggtatttataaaagtatttgtttttttaagaaattattaaagaattaggtttaagattgtaaaattaattttaggggtaatagtaaattataggtttggggatttaattttgataatttttttttggaaagaaaagaattgttgttaattgtttttattttttgattttgtttgagtaaatattcgtagtttttaaaatttagaatttttagtttggttaagtaagttatggggattaatggttgttttaaggtagaggtagaagagaagaaataggaaggaaataaaaagggaatgaagatttgtagtttatgagggtgatattattaataatttttttaagtattattgaattttatggttcgtgattgagagttttttttgatattttataggttaattatttttaaggatttttttggttttagagtttgtaatgtttgggtttgaatatgatttgttttataaaaaaggttaggtgaattgatttttttttgtgaagttgttttatggtaagagattattaatttgttgaaacgtaaataattttttagatatttgaagtatttttaaatttataaagtgtttttatatacgttattttattttatttttacgattttaataggtaggtgttattattattttaatacgtaaaaataattttagaaaataatgtttttgtttttagtttataagaatatttttttgaaatttatagtatagaatttaagttatgggttagttagaaacgtttagaaatatattaattttaggaggataaattaagagaataggatggattagataaaatttataagtataatggtagaaagtgtgtttttggtataagaatggcgtaagttttgtaaataatagtgttatataggggtgtttttgtagtatttttacgtttggaaggatattatttatttatatatatgataagtatttttaattggatattttataggtaatagataaaataaaataagaattttcgttttaaaattgtagtggtggaatttatttttcgggatgtattaggtgatttttttaggacgatagttgagttatagggggttaaatatattttttttttttttttttaatattataaagagttttaaaaacggattttgttgtttttaataaataaaatatatatgaaaaaaagttatttataggtttttatatataattttattttttaaaatatttatttttttttattagttaggtcgaggtataatgcggttttaattttataattatttattgttttatttatatatttatgattttttgatgttttttagtttgagtttaaattgcgttgggaataaagtatcgtataaattattagtttgggataagaggagataagttaaaattttttaagaagattttgtagatatttggtttttttgagtttgtagagagtttggtattttaaaggttagttttgggtttttttattttgatgattaatgttaaattgtttgattttttataaaaatatttagttgtgtttatttatattattttatttttagcgtatatagtaggtatgtatttgttgaatagaagttttaaatggatgagaaaaaagatatttttgttatatatttttttaagatcgagaaaggtaaaattataatttaatttgtagaagtttttaggtatttttttttaatgtaaagttatgtatttttgtttaaaaaagaaaaggatgatataattaaataatgttaattatataatggggaaattttaggattattaagaaaatattattattttaagttatatatttttatttaatattggttattatataggagagagtaagaattgttgtttttttatttattcgtataatttatttgggaaaagtatgggtagaatatttatgatttaattatattatattttggatttatatttaattttttggagaattagtttaaagagtatgttcgtttagagatataaagtaaaatagatatagggataatagttttggaagaaatttttatgacgttgtttgagattgggtattagtatttaaattttttagattattaggagttatttttattacgtaattttaataaagagaaattgagagtatgattggtaaaaatattatgatgtttttgtattttgttaatttgatttatatttggttttatttataaagtttttattgattattatacggtatttttattttttagttttatttattttgttttttaaaaattttttaacggtatggttacgaaaaatatgcgggggttagcggggtatgttttaggttggtttattttgtttttaaaacgtatttattttttttagatttttttttagggtgggtagggagaaaacgtttttaagttgtatagttgtagggaagtttgtttaggttatgtttttttgatttgtttttcggttcgttgtttggtaaggttatcggttttggttcgcggttttgtcgataaaatttaatttttattttgtaagattaataggtcgcgtaggatttttttagtcgttttttgtttcgtatttttttgggtttgaggattttcggttcggtttttttcgcgcgcgcgaggttttagatggcgagggcgtagttttttggtttatttgattacgttggggtgttcgaaggtttttaggtgttttagtatcgttatttcgcggatggtggagagcggtatgtttttttcgtcggtttgtattcgtacgcgttttaacgttacgaaacggttttcgttttttaagtcgcgggttttgaatatttttttataggcgtttttttcgattttcgttacgtattcgtattgttggttagcgcggtataggtcgtttttttttatgtcgtttggacgtcgttcgtcgcggcgtcgttggggcgggcggggggtgcgtttaattagttggcggtcgtcgttcgtttatttcggggtttttcggagatcggtttagttttatttgtttttcgtcggtttaggcgttcgggcgttggggttttcgtcgttgtagaagttggatggagagattttttcgcggggttggcgtaattttggtgtcgtcgtcgcgaaatttcgtttgtagagtcgtcgtcgtcgtcgtcgtcggaggagcgagtcgattttttttttttttttttcgaagcgaagtttttaatatagatacgattatatagtttttgtttaagcgcgttttagtttagaattattgtatttaaaggaggagacgggaggataagaagaaagtgtaattagatagtttagaagtttttttcggggtttttttagattttttttttttttttttacgaagtttttatcgttatttttcgcgcgtttttgtttttttttaagtcgtttaattttttttggttttttcgagaaaagcgaagttatttttttttttttgtagggttgaagtcgttttcgcgcggagaggttgtaggggtttttcggggatgagcgagcggcgcgggacgtagtggaacgggagggggcgtgtcgagtagtttagagtgtgtcgggagcgcgggggaggggaggcgtcgggtacgttaatgttacggtttaatatttatttttatattattgtgttgcgtcgttatttttttcgttttttgaggttcggacgtgtagggagacggggtttaggggtgtcggagggcgtttaggggtcgcgtataagttggagcggaaggattgtgggtttattcgtgtggggtcgtagaatgtgggtgggggtttttaggattttgtaattcgatgttgggagtgtgcgagaaggggtggttagatatttgtttagaaattgttttttttttttttatttttagtttttttacgaggagatatttaaaaacgattcgtatatataaatggtttttttggggtaaaggagtttcggttggaaacggaatttttttttcggttgggaggatttttttggtggaaattttgggaagattagttatttggtcggggagggttggggtttatcgggggtgggcgagcgagcggttttgggggaggggagatatcgttttttacgggattttaagggtgggagaaaggggtgttcgttataatttcgtttgtcgtttttttaaagaataattttaggaaggggatagtataatcgcgtttcgtttttaagttttaaattgatttcgatttgagtaaaatttaattttttttttaaagggtggggggtggggggttaaattttgcgtttttaggggtgagagagaaggtttttgttttcggggttcggattcgcgaatttttttttatttttaggattttttcgttgtaggtagtagaggtggttgttttatttttttttcggttaaaggttcggtttagtttgtagtcggacgttttcggagttttttgtataataaagcgttagagtagggtattttaattttttttttttatttagtagttatttgggatttagggggttttttttttttagggtcgtcgcggtttcggtaggatttttattacgacggtcgtatgttcggaattttcggggtatttcggaattatttgtttcgtaatcgttggttcgttcgttttttgttaggaattaaataaacggcgcgatttttacgatgagcgggtggagcggatcgcggcgagagtagagtttttggtatttattatatttagaattttttttaaaagtcgaggaaagagtttttagggattgttcgggggtttgagttaggtcgagggttatataggtagtcggggagtcgtcgtcggtcgtttaattcgtttgttttgtatttttttaattttttttcgttcgagtttagtttcgggtttcgtagcgaaggaagcgtcggggacgttttattttcgtagggaattgcgtttgttgttttcgtcgggtttcgtattgttttggttttttttttattcgttttttagacggtcggtttcggcggagagaaacgggagtagtaatgtttttttttttttttttttttatttttttttgttgttgttgttgtttttttacgttggttgaatgtgatttgattttattttaaaaaaagtttgatatagtgttttaatattttcgtattttttcgcgattataaaggttgtagtcgtttttttttgttttttgtttttgttttttgtttttatatttaatgaaattttttatgcgtttttttcgaagtttgttaagtattataagggtcgttattagtatagcgataagaggttatatcggggatcgcgattttcgcgtgtgcgtatacgtagatgcgtttatatgtatacggacgggcgcgttgcggggattagggttgtttattgcggggcgtgtgtttaattttaatattttaaattataaaagtaaatttggaaattatagtaaacgtgcgttttcgcggggttttaagtttgggtattggtcggttgcgtgtatttttttgtgtataatacgttcgtaggaagtttgcgttaatatttatttcgtggaggggaaggtggagtttatatttatattttagcgagttggagagggagttttcgagggggaaatgtaagtatattttttagtatggagtttttagaggtagtgtattttaaattttaaatgtgaattattatgtgagtgttcgagtagagttttagttt

SEQ ID NO: 403 - DNA, 6195 bp, Artificial Sequence
  chemically treated genomic DNA (Homo sapiens)
gaattggaattttattcggatatttatataataatttatatttagggtttaaaatgtattgtttttagggattttatgttggagaatgtgtttgtatttttttttcgaaaattttttttttagttcgttgaggtgtgggtgtgggttttatttttttttttacgagataaatgttaacgtaggttttttgcgggcgtgttatatatagaaaagtgtacgtagtcggttagtgtttaggtttggagtttcgcgaagacgtacgtttgttgtagtttttaagtttatttttataatttaaaatattggagttaaatatacgtttcgtagtgagtagttttggttttcgtagcgcgttcgttcgtgtgtatatgggcgtatttgcgtgtgcgtatacgcgggagtcgcggttttcggtgtggttttttgtcgttgtgttggtggcgatttttgtggtgtttggtaggtttcgggagaggcgtatgaaggattttattgagtgtgaagatagagagtagagatagaaagtagaaggaggcggttgtagtttttgtagtcgcggaggaatgcggaaatgttgaagtattatgttaaattttttttgaaatggggttaagttatatttagttagcgtgggaaagtaataataataataaaaaaaagtggaggagagggggggaaaaggtattgttgttttcgttttttttcgtcgaagtcgatcgtttggggggcgagtggggggagagttagggtagtgcggggttcggcgggggtagtaggcgtagttttttgcgggggtgggacgttttcgacgtttttttcgttgcggagttcggggttagattcgagcgggagggggttggggggatgtaggataggcgggttgggcggtcggcggcggtttttcggttatttgtgtggttttcgatttggtttagattttcgggtagtttttgggggtttttttttcggtttttaaggaaagttttgaatgtagtgagtgttagaagttttgttttcgtcgcggttcgttttattcgtttatcgtgggggtcgcgtcgtttgtttaatttttggtaaaaggcgagcgggttagcggttgcgaggtaggtaatttcgaggtgtttcgggaatttcggatatgcggtcgtcgtggtgaaagttttgtcgaggtcgcggcggttttggaggagggaggttttttaggttttagatagttgttgaatggggagggaaagttagggtattttattttggcgttttgttgtgtagagggtttcgggggcgttcggttgtagattggatcgggtttttagtcggagggggaatggggtagttatttttgttatttatagcggggaggttttgggaatgggaaaaggttcgcgagttcgggtttcgaggatagagatttttttttttatttttggaggcgtaggatttaattttttattttttattttttgaaagggaggttgagttttgtttaggtcgaaattagtttaaaatttaaggacgaggcgcgattatgttattttttttttgaagttattttttaaggagacgataagcgaaattgtggcgaatattttttttttttatttttgggatttcgtgggggacggtgtttttttttttttaggatcgttcgttcgtttattttcgataagttttaatttttttcgattagatggttggtttttttaaggtttttattagggaggtttttttagtcggagagagaatttcgtttttaatcgagatttttttattttaaaaagattatttgtgtatgcgagtcgtttttaaatgttttttcgtagaaaaattgaaagtagaaagaaaggaagtaatttttgagtagatgtttgattattttttttcgtatatttttagtatcgggttatagggttttgggagtttttatttatattttgcggttttatacggatggatttatagttttttcgttttagtttgtgcgcgatttttgaacgtttttcggtatttttggatttcgtttttttgtacgttcgggttttaggaggcggggagggtagcggcgtaatataatgatatagggataaatattaagtcgtgatattgacgtgttcggcgttttttttttttcgcgttttcggtatattttgggttgttcggtacgttttttttcgttttattgcgtttcgcgtcgttcgtttattttcgaggggtttttgtaattttttcgcgcgaagacggttttagttttgtagggaaagaaaagtaatttcgtttttttcggaggaattaggaaggattaagcggtttgggagagggtaggagcgcgcggagggtagcgatggaggtttcgtaaaggaggaggaggggagtttggaggaatttcgaggaaggtttttgggttgtttgattgtattttttttttattttttcgtttttttttttaggtgtaatgattttggattgagacgcgtttgggtagaggttatgtaatcgtgtttgtgttgaggatttcgtttcgaggagggaagaggagggatcggttcgttttttcggcggcggcggcggcggcgattttgtaggcggagtttcgcggcggcggtattagggttacgttagtttcgcggggaggtttttttatttagtttttgtagcggcgaaagttttagcgttcgagcgtttgagtcggcggggagtaagtaaagttagatcgattttcggggagtttcggagtaggcgagcggcggtcgttagttagttgagcgtatttttcgttcgttttagcggcgtcgcggcgggcggcgtttaggcggtatggagaaggacggtttgtgtcgcgttgattagtagtacgaatgcgtggcggagatcggggagggcgtttatgggaaggtgtttaaggttcgcgatttgaagaacggaggtcgtttcgtggcgttgaagcgcgtgcgggtgtagatcggcgaggagggtatgtcgttttttattattcgcgaggtggcggtgttgaggtatttggagattttcgagtattttaacgtggttaggtgagttagggagttgcgttttcgttatttggggtttcgcgcgcgcggggagggtcgagtcgggaatttttaggtttagaaaggtgcggggtagagggcgattggggaggttttgcgcgatttgttggttttatagagtgagagttaagttttgtcgatagagtcgcgagttagagtcggtgattttgttagatagcgagtcgaaagataagttaaaaaaatatgatttgagtaggtttttttgtagttgtgtaatttagaagcgttttttttttgtttattttgaaggagggtttgggggaagtgggtgcgttttagggataggataagttaatttgagatatgtttcgttagttttcgtatatttttcgtggttatgtcgttggggaatttttgaaagatagagtaggtgagattggagaatgaggatgtcgtgtgataattagtgggaattttatgggtggagttaagtgtaaattaggttaataagatgtagaaatattataatatttttgttagttatatttttagtttttttttattaaagttgcgtagtaagaatgatttttggtggtttaaggagtttgagtgttgatgtttaattttaaatagcgttataaaaattttttttaaaattgttatttttgtgtttgttttattttatatttttgggcggatatattttttagattaattttttaaagggttaaatgtgagtttaagatgtggtatggttagattataaatgttttgtttatgttttttttagatggattgtgcgagtgggtggggagatagtagtttttatttttttttgtgtggtaattagtattaaatgaaaatgtgtgatttaggataatggtgtttttttagtgattttggaatttttttattgtgtggttgatattgtttggttgtgttattttttttttttttaaatagagatgtatagttttatattgaaaaggaatgtttagaaatttttgtaaattgggttgtgattttatttttttcgattttgagaaaatgtgtagtagaaatatttttttttttatttatttagggtttttgtttaataaatatatgtttattgtgtgcgttgaggatgaaatgatgtaaataagtatagttaaatatttttgtaaaaagttaaataatttaatattagttattaaagtggagagatttaagattgatttttgaaatattaaattttttatagatttagagagattaaatatttatagaatttttttgggaggttttaatttgtttttttttattttaggttggtgatttgtgcggtgttttgtttttaacgtagtttagatttaagttagaaggtattaaagaattataaatatataaataaggtagtaaatggttataaagttaagatcgtattatatttcggtttagttagtgaaggagaatgagtgttttagaagatgagattatatataaaaatttatagatgatttttttttatgtgtattttatttgttaaaaataataaaattcgtttttggggttttttgtgatattggagggaaaaggggagggtatatttagttttttgtaatttagttgtcgttttaggggaattatttaatatatttcgaaggatgaattttattattataattttaagacggaagtttttgttttattttgtttgttatttatggagtatttagttaagggtgtttattatgtatatgaatgaatagtgtttttttaaacgtagaggtattatagaggtatttttgtataatattattgtttataaagtttacgttatttttatattagaggtatattttttgttattgtgtttgtagattttgtttgatttattttatttttttgatttatttttttgagattgatgtgtttttagacgtttttaattgatttatgatttggattttgtattgtgaattttaggaggatatttttatgaattgaagataaaggtattgttttttaaaattatttttacgtgttaaggtgatgatggtatttatttgttaaagtcgtgagaataaaatgagatggcgtatgtgaaagtattttgtaaatttgaaagtattttagatatttaaaggattgtttgcgttttagtagattgatggttttttgttatggagtagttttatagggaggggttaatttatttgattttttttgtagaataaattatatttaaatttagatattataggttttggaattaagaagatttttgaggataattagtttgtaagatgttagaaaagatttttagttacgagttatgaaatttagtgatatttgaggaaattattgatgatgttatttttatgagttatagatttttattttttttttgttttttttttgtttttttttttttgtttttgttttgaaataattattggtttttatgatttgtttggttagattaagaattttggattttagaggttgcgaatatttgtttagatagggttaggaaataaggatagttgatagtaatttttttttttttaagggagagttgttaaagttgggtttttaaatttgtgatttattattgtttttgggattagttttatagttttaagtttggttttttaatggttttttaaaagggtagatgtttttataagtatttttaagttataagtaattgattataattataggtttttttttatagatagttaagtttttaagttaataggagtataataaatatattagtttttttaaaagtttaagatttaattttgatggatttgttagaaaagttgatttgttattgttggtattggtattgtttgtatgtatagggataatgatttgaaatttttgtttatttgtatttgatgtattttaggttttcgtttgattagttagtgagtgtttgggaagtaaatttattttttttttatatttggtaattttaaattttggaatttttgttagaataggattttattgtgaatttgtattggagtttttgtattgtataaatggattttgtttgaatagtttgaattaaaaataatagagataaaattatagtatgttttgttagtagtttgtttatttattaaatatttattgagggtttattatgtgttagatttttttagaaggtggggat

SEQ ID NO: 404 - DNA, 6243 bp, Artificial Sequence
  chemically treated genomic DNA (Homo sapiens)
ttagggttgtgtgtgattagtagatgtgttggaagtgatggtgtgttatttttgaggttaggttattaaagacgtagcggtttttattttgtgtgtgtttttttttttttgggttattcgttttggggaaagttagttgttggggtttgaaaatatatacgtttgggaagaggtcgtattggtgagggacggaggtttttagtttatagttgtgggaacgtgggaatgaattttttaggaagtgaatttttcggttttgttttagtttttagatgatttagttttggtagtattttgatggtaattttataagagagtttgagttagattatttagtttggttttttttggattttagattcgtaggagttatgagtttttttgttgttttatatattaaagttttgaggtaatttgttatatagtagtatataattaatatattagttgtagggttttgggtacgttttttagtttttgtattttcgttttttttttcgtgttatgagtattgtagaggcgagtgaggaatacgtagacgtagtatagtgttacgtatatgaggtagttttttagtttttttcgggatggttgtggttatttttttgtttttttttggatggatcgtgattttataacgttaggttaagttattgtatttttggtttgaggttatttattggttatagatagaggttttcggtaggaaagggtgagataaagagaggggttagttttttttttttagttcgggtcgggagaatcgtgttgggttaggtgagatattcgttgtttgtgcggtgttttgggatgagttattggatttgatttatggggagatttgtttgtgtcgttagagggcgaggggttttttggtttagtttgttttgggtttggttaagtattttggttgttattggggtttttaggataattgagaattgtttttttttttttgatttttagttgttttttttttttttgttttttggtgtttgtttagatgttttttttttgtgatttttgatttttggtttttggtttttgtttcgaggtttttttattttgggtttcgtgttttagagtttattgtgtattagttttttaagttgtttgttttttattgttttcgatttttttgtgtattatttaagaattgtatgggtatgtgttagtataaaaaaaaataaagttggtcgggcgcggtggtttacgtttgtaattttagtattttgggaggtagaggcgggcggattacgaggttaggagattgagattacggtgaaattttgtttttattaaaaatataaaaaaattagttgggcgtggtggcgggcgtttgtagttttagttattcggagaggttgaggtaggagaatggagtgaattcgggaggcggagtttgtagtgagtcgagatcgcgttattgtattttagtttgggcgatagagattttgttttaaaaaaaaataaagttggtcgggcgtggtgatttatatttgtaattttagtattttgggaggcggagatagatagattattggagttggagattagtttttggttaatatggtgaaattttgtttttataaaaaaatataaatatttgtttgtgtgtggtggtatatgtttgtagttttagttattcgggaggttgaggtaggagaatcgttttaattcgggaggcggaggttgtagtgagtagagatcgagttattgtattttagtttgggtaatagagtaaatttttattttaaaaaaattaaaaatttaaaataaaaaaatataaaaaaatattatcgatattaataattataaggcgttcggttaattgtatatttttagtagagatagggtttttttatgttggtaggttggtttcgaattttttattttaagtgattcgttcgtttcgattttcgttttttaaagtgagttatcgtgttcggtcgtgaatgtgatttgatagtttagattttttttcgtgaacgtttgttagttgtgaaattagtaaagttgcgtttttgagtttacgtagagtcggtttcggaattcgagtttcgggttcgagtatagtttcgtcgttatttcgggcgtgattttggtcggagtttggttttttttgagttttagtttttcggtttgggatgtcggaatgatagttcgttttttgtttcgtttagtttcgtttagtttcgtttcgtaggttttgggattggttcgcgcgaggtttttttttttaggcggggtcgggtttttttcgttcgttaggttttaattcggaaatgtagttggagcggaggcggagtttattaaggtcgcggcggagcgacgatgggcgcggttaatgggcgcgggcgtcggttgcggcgcgacggaagttttgttcggcgtcgcgcgggggcggggcggcgtcgggggcggggggcggcgggcgacggggcgggcgtaggatgagggcggttattgttggggtttcgtttcggggaggaggacgttgaggaggcgtcgagtcgcgtagcgttgcgggggaggcgttcgcgtcgacgcggggtttatggttaggattattagttagttggtgagcgcgcggcggcggattggacgcgtcggtttgttattttgtcgggttcggcggtcgttcgggttcggcgaggcggggcggttcggggtttcgagggtcgggtgtttttttatttgtagtcgggcggtcgggtcggggatggcgggcgtcggtcgagggcgttgtttggttgcggcggggagatcgggtttgggttgcggcgggcggcggtttggtcgggggcgttgatagacgcgcggagggcgggggaggtcgggaggtgttattcggtttagcggggtggaagtgtttggaaagtttgttttcggtttggcgtagtttggagtcgagtttttagggttatttttcggttttgtttgtagaggaatcgttttgggtttttatttggaacggggtttttggcgttttcgtttgcgagagaagtagaaggtgtaagtttttgttgaaagtatttgatgtttttgggtttttttttttagatttttgatgatagtggtcgggaaaattcgttttttacggttcggttaaggggtatttgggtgtttttgttgttcgtggttgtgtttagcgttgtgggaagtttttgggaggtcgaatgtgtaggattatcgaggggaaagtgagtttgataggtaggagggattttaggggaaggattaaaataaattatttgttgggtgaaatgttttgttaaaagtgtcgttggtgtttttatattttttttttatcgttaaaagtatttttcgtgtttttatgttttttatatgttaagttttatagtttggggacgacggtttaaaaatttatgttttgtatgcgatgtgtagtgggtgatggaagaacgtttatatggttttaatatttgatttaaaaggtaaatattttaaatgaaggaaaatttaagaaatttaattgatttcgtgttttttaggatgcggtttttttttttttttttttttgatggagtttttttttcgacgcgtaggttggagtgtagtgatgcgattttagtttattgtaatttttatttttcgggtttaagcgatttttttgttatagttttttgagtagttgggattataggcgtatgttattatgttcggttaatttttgtatttttagtagagaaggtgtttcgttatgttggttaggttggtttggaatttttgattttaagtgatttgttcgtttcgtttttttaaagtgttaggattataggcgtgagttattacgttcggtagatgtggttttttgataggcgtttttgatttttttttttgtggggcggggagtggggggttgtgagtttgtttgagaatttgaggaaaggtatgggtttttttttgagaaaaaggtagagtgacgttgaattttgtaattacgttaggaggtttttgaattttttgtagtttattcgtggattttgtagagatgcgtgttaaggaagaaggtttagttgagaaaaatgttgaagggatgtttttcgttatttcgatatgtgtggttgtatattagagtggttcgggtaatataaaaatatgaattaggcggattggttaggtttagtggaggttggggtcgagagttatgtcgaagtttgtgaggttaatttgtatttagtgatagttatggcgaaatttgtgaggttaattcgtatttagtaacgttgttttaatgtaaggtgtgtatttggtgttatttacgggaagaggaaagagtaaatttttttatggttttggtagttttatatgatggatattttatatttgtagtttttttcgtatgagatggtttttttgtataaaaatattggaatttagtgagtaagaatgatagaatgtaagatggatttttatatgaggaagtgttacgaacgagcgttttgtatttgttagttggatttttttatgtgtacgtatgtgagaatatgtcgtgttttttgtttgtaatggtagaggtagttttgattttggatttttatttgaggatggatagatttttagggtttaagtgggtttgtatttggattttagggtggttttgtaggttttgtgtgagaagttttttttttagtgaatttttttttgtgtgttcgcgtggatagttaatagggggagtagtgcgagcgtgaaggtagatagtggtttggtttagtttgatgttaagtgggttagaggtagtgagtattattttttgatttgattatttaagataggcgtttttttaggtatttttatattttattgcgaggtaggtgttgtttttattttacgggtgtagaagttgagttgtagaggcgttaggtatttgttttataagtggtagagattttagtgttattttgttttttacgttcggagtttttgagggagggtttgtcgggtagtttagtttagtattttgtaaggaaatttttagtgttattgtttaggatgtttttttagggattgggtttgaatgttttgattatgtcgtgttggaggtaggaggggtgtttttatatggaagaattgtatatatttttttggtagatggttgaattttgtgatttcggggtttgttttagttttttgttgttagaaagtagttgtttgggaagaggttgtgattcggttttgtttgagggtcgatattttgaatgggtgaggtttgaaattttttttttggaataaagaaatatgtaatgattttgttgaaggtagaattgggggattaggtagagtggttttttgttttttttagggtggttttgttttttgtaaaggtggttgtatttttaggggaaggtgaggggagaagtagggagtatggagagaagtggttttcgattttttttttttttttggggagtttttttttatgtggttggtttggtgtatagtgtgatgtatttttgtacgtaacgttgttttgatagttagtttaagttgagtttagagttggtaaggtgagtttttagtggtaagagggaagtggtttgttttgtttttttgagatgtgtttttatgagaaggatttagtagtagtttgtagagatgtggggtttgaaaagaggttttgggtagttttttttgataggttttggttttttagattgtttttagtatagttttggggagaaatagggagtgttttttttttagtttatgtatttattttttgagtcgtttgatttagggtttagatgttttagggtagttgattgatatcggtgggagacggagtttggtaagtaggtgatgaattgggaagcgttgtagaaatgagggggtaagcgtggttagttttttttgagaggatgtgtttggaagagagtgggtattggcgtggtattttttttttttgaggaaatggataggatgttacgtggtgttgtagttttgtgtggggtaggttgtggttgtagagaagttttgggtgtagaaatagttttttaagtaggtgcgagggttagggtgttttatgttgttttatatttgttgtgcgatgatatgtggttattgggttgtttagtatagttgtttagaaagtaggtttaaagggtagtgtgttgggaggaagtgttgttgtggaaattgtaagttttggatatgagttgtttaggtttttttagtcgtgtatttttttatagtagaattgtattatttatttgtttagtg

SEQ ID NO: 405 - DNA, 6243 bp, Artificial Sequence
  chemically treated genomic DNA (Homo sapiens)
tattgagtaagtgaataatgtaattttgttgtagaagaatgtacggttgaaaagatttgagtaatttatgtttaaaatttgtagtttttatagtagtatttttttttagtatattgttttttgaatttgttttttaaataattgtgttgggtagtttagtggttatatgttatcgtatagtaggtgtggagtagtatagagtattttggttttcgtatttgtttgggggattgtttttgtatttagggtttttttgtagttataatttgttttatatagaattgtagtattacgtggtattttgtttatttttttagaaggggaaagtgttacgttagtgtttatttttttttaaatatatttttttagaagggattggttacgtttgtttttttatttttgtagcgttttttagtttattatttgtttgttagatttcgttttttatcggtgttaattagttgttttggagtatttaaattttgggttaggcggtttaggggatgagtgtatagattgaaaaaggaatattttttgtttttttttaaaattgtgttgaaggtagtttagagggttaagatttgttaagaagagttgtttaaggtttttttttaggttttatatttttgtaggttgttgttggattttttttataagaatatattttagaaaagtagaataaattattttttttttattattgggagtttattttgttagttttagatttagtttggattggttgttagggtaacgttgcgtataggaatatattatattatgtattagattagttatataaggaggaattttttaaaaggagagagaaaatcgaaagttatttttttttatgttttttgtttttttttttatttttttttaaggatgtagttatttttgtaaaagatagaattattttagggagggtaggaggttattttgtttagttttttaattttatttttagtaaaattattatatgtttttttgttttaaagggaggattttaagttttatttatttagagtatcggtttttaaataaggtcgaattatagtttttttttaaatagttgttttttgatagtaggaggttgaaataggtttcggggttatagagtttagttatttgttaaagaaatatgtatagtttttttatatgaagatattttttttatttttagtacggtatggttaagatatttaggtttaatttttgggaagatattttgggtagtggtattgaagatttttttatagagtgttgggttgagttgttcggtagatttttttttaggggtttcgaacgtgaggggtagggtgatattggagtttttattatttatgaggtaggtatttaacgtttttgtagtttagtttttgtattcgtaaaatgggaataatatttatttcgtaatgaggtgtgaaagtatttagggaagcgtttgttttgagtagttagattaagaaatggtatttattgtttttggtttatttagtattagattgggttaggttattgtttgtttttacgttcgtattgttttttttgttggttgtttacgcggatatataagggaaagtttattgggaagggggttttttatatagggtttatagggttattttaaagtttagatgtaaatttatttgaattttgaagatttatttatttttaggtgaaaatttaggattagggttgtttttattattatagataggaaatacggtatgtttttatatacgtatatatgggggaatttagttgatagatgtaaaacgttcgttcgtgatatttttttatgtggaaatttattttgtattttattatttttgtttattggattttagtgtttttgtgtaaaaaagttattttatgcgaagaaaattgtagatatgaaatgtttattatgtggaattgttaaggttatgagaaaatttgttttttttttttttcgtggatgatattaaatatatattttgtattggaatagcgttattgggtgcgagttaattttataaatttcgttatgattgttattgggtgtaggttaattttataaatttcgatataattttcggttttagtttttattgagtttggttaattcgtttaatttatgtttttatgttattcgggttattttggtgtatagttatatatgtcgaaatagcgaaaggtatttttttaatattttttttagttgaatttttttttttaatacgtatttttataaagtttacgagtgagttgtagaaagtttaagagttttttgacgtagttataaaatttagcgttattttgttttttttttagaagagggtttatatttttttttaggtttttaaatagatttataattttttatttttcgttttataaaaaaaaagattaagaacgtttattaaaaagttatatttgtcgggcgtggtggtttacgtttgtaattttagtattttgggaggacgaggcgggtagattatttgaggttaggagttttagattagtttggttaatatggcgaaatattttttttattaaaaatataaaaattagtcgggtatggtggtatacgtttgtaattttagttatttaggaggttgtggtaggagaatcgtttgaattcgggagatggaggttgtagtgagttgagatcgtattattgtattttagtttgcgcgtcgagagggagattttattaaaaaaaaaaaaaaaaaaaagtcgtattttggaagatacgggattaattaaattttttgggtttttttttatttaaaatatttgttttttaaattaaatgttaaagttatgtagacgtttttttattatttattgtatatcgtatataaggtataaatttttaaatcgtcgtttttagattgtagaatttagtatatggaaaatataaaaatacgagggatatttttagcgatagagagaaaatatagaaatattagcgatatttttagtaaaatattttatttaataagtggtttgttttggttttttttttaaaattttttttatttgttaagtttatttttttttcggtgattttgtatattcggttttttaggggttttttataacgttgagtatagttacgggtagtaaaagtatttaaatgttttttggtcgggtcgtgaaaggcgagttttttcgattattgttattaagaatttggaaaagggggtttaggagtattaggtgtttttagtaagaatttgtattttttgtttttttcgtaggcggaggcgttaaggatttcgttttaggtggaagtttagggcggtttttttatagatagaatcgaaaggtaattttggaggttcggttttaggttgcgttaagtcgaaaataaattttttaggtatttttatttcgttgggtcgggtgatatttttcggtttttttcgtttttcgcgcgtttgttagcgttttcggttaggtcgtcgttcgtcgtaatttaggttcggttttttcgtcgtagttaagtagcgttttcggtcggcgttcgttattttcggttcggtcgttcggttgtaggtaaggaggtattcggttttcgggatttcgggtcgtttcgtttcgtcggattcgggcggtcgtcggattcggtagggtaataaatcggcgcgtttagttcgtcgtcgcgcgtttattagttggttggtggttttggttatgggtttcgcgtcggcgcgggcgtttttttcgtagcgttgcgcggttcggcgtttttttagcgttttttttttcgaagcggagttttagtaatggtcgtttttattttgcgttcgtttcgtcgttcgtcgtttttcgttttcggcgtcgtttcgttttcgcgcggcgtcgggtaggattttcgtcgcgtcgtagtcgacgttcgcgtttattggtcgcgtttatcgtcgtttcgtcgcggttttagtgggtttcgttttcgttttagttgtattttcgggttggggtttggcgggcgggagaggttcgatttcgtttggggagggggatttcgcgcgaattaattttagggtttgcggggcggggttgggcggggttgggcggggtagggggcgagttgttatttcggtattttagatcgggaaattgaggtttagaggggattaggtttcggttaaggttacgttcgaggtagcggcggagttgtgttcgaattcggaattcggatttcggagtcggttttgcgtaaatttagaggcgtaattttgttagttttataattaataagcgtttacggaaggaaatttgggttattaagttatatttacggtcgggtacggtggtttattttgggaggcggaggtcgaggcgggcggattatttgaggtgaggagttcgaggttagtttgttaatatggagaaattttgtttttattaaaaatatataattagtcgggcgttttgtagttgttaatgtcgataatgtttttttgtgtttttttgttttgggtttttggtttttttgagatggaaatttgttttgttgtttaggttggagtgtagtggttcgatttttgtttattgtaattttcgtttttcgggttgaagcgatttttttgttttagtttttcgagtagttgggattataggtatgtgttattatatataggtaaatgtttgtatttttttgtagagatagggttttattatgttggttaggggttggtttttaattttagtgatttgtttgttttcgttttttaaagtgttgggattataggtgtgagttattacgttcggttaattttatttttttttgagatagagtttttgtcgtttaggttggagtgtagtggcgcgatttcggtttattgtaagtttcgtttttcgggtttattttatttttttgttttagttttttcgagtagttgggattataggcgttcgttattacgtttagttaatttttttgtatttttagtagagatagggttttatcgtggttttaattttttgatttcgtgattcgttcgtttttgttttttaaagtgttgggattataagcgtgagttatcgcgttcggttaattttatttttttttatattgatatatgtttatgtagtttttgagtaatgtatagaaaaatcggaagtagtgaaggataaatagtttgaggaattagtatatagtgaattttagaatacggagtttagggtggaggagtttcggggtaggggttaagggttaagggttaagggttataagaagaaagtatttgagtaggtattaggggataggggagagaggggtagttgaaggttaaagaagaaaggatagtttttagttgttttgggggttttagtggtagttagaatgtttggttaagtttaaggtaagttagattaggaaatttttcgttttttggcgatatagataaatttttttatgggttaggtttagtggtttattttaggatatcgtatagatagcggatgttttatttggtttagtacggttttttcgattcgggttggaggaaagagattgatttttttttttattttatttttttttgtcgagaatttttgtttatggttaatggatgattttaggttaagaatgtaataatttggtttgacgttgtgaggttacggtttatttagggaggggtaagaaaatgattataattatttcgggaggggttggaaagttgttttatgtgcgtggtattgtgttgcgtttacgtgttttttattcgtttttataatgtttatggtacgagggaggaaacgggggtgtagaggttaaggaacgtgtttaaagttttatagttggtgtattagttatatattgttgtgtaataaattgttttaaaattttgatgtgtaaaataataaagaaatttatggtttttgcgggtttggaatttaggagaggttaggttgggtggtttggtttaggtttttttgtgaagttgttattaagatgttgttaggattgagttatttaaaggttagagtagggtcgaaagatttattttttaaaaggtttatttttacgtttttatagttgtgggttggaggttttcgttttttattagtgcggtttttttttaggcgtgtgtgtttttaagttttagtagttggttttttttagagcgagtggtttaagaaaaagagaatatatataagatagaagtcgttgcgtttttaatgatttaattttagaagtgatatattattatttttaatatatttgttggttatatataattttgg

SEQ ID NO: 406 - DNA, 6220 bp, Artificial Sequence
  chemically treated genomic DNA (Homo sapiens)
aatttagatagaattagagaattagatggagatttaaggagataagggagagatatagagagaataaaagttagagtgggggtcgggtatggtagttgatgtttgtaattttagtattttgggaggtcgaggcgggtggattatttgaggtcgggagttcgagattagtttgattaatatggagaaatatcgtttttattaaaaatataaaattagaaatataaaattagttaggagtggtggtatatgtttgtaattttagttattcgggaggttgaggtaggagaatcgtttgaattttggaggtggaggttgttgtgagttaagatcgcgttattgtattttagtttgggtaacgagagcgaaattttattttaaaaaaaaaaaaaaaaaaaaaatttagaaggggaaatgtgtaatgaaagatatagatattcggggttttatagttagagattaaatgagggatggttaattaagggtatagttattgggtatagggttagggtgggaggtacgggagggttttgaaaatatagttatatatttttttaggtttattttttttattttgtattttggtattttaatgttagttttttaggatttaggattatttatattaaagttaagttcggtttaattaagatagatgtttggtgggtggggttgtttgttggagtaataggtttttgtaggttttggaggagaagtttagagaggtggttgtttggaagagagtaggtaggatttttttttttaagtaggtatttttattttattaggtgtttagatgttagtgtatggtaagggtggttttttgttttttagatttgggtgagaggatttgaaaatttgaggaatttgtttttattaattgatttttatatttgtttgaagggaattgttggagggtataggtgttaagtgggatttatttaaatgtggtaatgggtttgtatttagttatcgataggttgtatgacggtggtaaagttattttttttttttggtttttgtttttttatttgtaaaattatttttatggttatttttagttgtggtatttggtttttattttagttgattttttagttttgtgtttgatttttttttgttaaatttattgtttagagtgggaaaggagaggagagggattatatttttttttttttggggttttttgtagagtatttgggaagtaaggtttttttatattttttatgtatttttttagagtttttaattttttttttcgtgattttgttaattaagatattgtgattatatagagaaggtggggagaacgtagatattttggtttttgtagttttgaagtttttttttttttttttttttgaagttaaaagaatgaaattgggagaggtagtaaggggtaagaaaggagagtggaaatggagagaaaagggtagttttgagaagtagttggggagggaggtagatgagaatgtattttttttaatagaatatgtagttttggtttagttgtgttgtgagtgggtagttgggttggttttttttttggtgttgttaattcgttgttaggtagaggggaggtttagaggagagggaagttgggtaaaggggatggaaggcgtttagttcgattttattaaattttttgggtttcgtgggaaggggttttttggagagggggattgaggttttagataggatatttattgttgtggtaaggtttgtagagagtttcgaagttaggaggatttaagacggtttttttttggatttttttgaaggtagaattagttttataagtaattaggttgggtgaacgggggcgttggttagtttatggattatagtcggttggtgaggttacgtgtttattgtgtggttttgggtggtttcgggtaagttttttttttttttaggatttttattttttatttgtaaaattgtggagagggggagggttgaaatatatgattgttaagattttttttagttttttcgttagggttgagtttagatggtcggagtaaaagaaggagggaggtgttgcggtggtgggggtgattttggttttattagaatttttagttttttttttttttatagttttgtttttgaggttataaaatttgtggtttttaagatatatatgcgtatatacgcgcgtgtatatatatattttatatatttattttttaatttaggggtttaaaagatgatacgcgttagagttggaaggcgtcgttaattggtttattttttttttttttttttttgcggatgagaaaattgaggtttaggtttgggatttttagagttcgggatttttcggtaacgttcgataattatattttttcggttattttgattcgtttcggtttcgggacgttttttgggagtcgtcgtcgagggtttgttgggattttcgggggatttcgtcgtcggggtagtttttacgttcggcgtcgttcgtcgggaacggtcgtcgttgttgcgtatttgtaggggagtcggcgattgagggcgaggtagggagggagtaagcggggttgggagggttgttggcgcgggttcgcgcgttgtgtatggtttatcgtaggtagttgatttttgaggaggaaatcgttgtttttcgtttttttttgtagtaatagtcgtcgttgtcgtcgtcgttaggaatttcggtcgggagcgagagtcgcggggcgtagagtcggttcggttgtcggacggtgcggttttattaggtgggtgattcggtggcgcgttttcggcggcgcgtcgagaggggatattttattgtcgtttcggtattttcggtattcggagttcgacggtcgggcgtagcgcggggattagttttcggtattgcgagggagttggtttagcgtagacgagggacggggggacgtggggataggggtcggggatgaaaggtagaggttagggagggcgtcgttttggtacgtttcggagagggagtatttgtcgggttggattcggggaggtattagtgtatagatgggggagtagtcgaagaggggagcgtttaagtttttagttttgttttttgaatagttttagttacgtgttcgaaaagttttagtcgtcgagtgggagtcgtcgtggcgttggtttaatttcgggttggaatattttttttttttagaaatcgggttcgaggtgggttgggggatttttgtagttttttttagggggtttgtgggtttttcgtcgttaagttttttttttagtttttggtcgttttttttattagggaagtttcggtggggcgaggggagaggaagacggggagggtatttgtttttgtagagtattttttttttttttttagcgggttttttgttggaggggatgggcggttttttattttttattatttttgttttcgtataggaaagttatttgtgggaggggaggggtttggtttggtcgcggtttagggataggtaggtatggtaaggttaggggtaggttcggttttttggtttttgtagaggagagcgttttagcgttcggttcgttttaggtgaacggttatggcgggttggatttaggtttagtagttgtagggagacgcgttgcgttagatgtaggtgttgtacggttagtatttttttatcgaggttcggtattatttggtttagtggattgagagttagttatggtaggtacgtttcgttttgtttttttttagagggtttttattatttaggttttttggtttttagttttatttatggtggtttggtgtgattttggttttgtttgtttttttttgtgcggaaggggtggtgtttttgggaaaggggaagtttgggaggatagagaatgtttttagattcggatgtttgtggagttgttgggaataagttttgtgggttttggagtgttttcggttatgagtttggggtttttattttattttagttttttgatttttttgtttaaggaggtgttatagtaggttttttttttttgttttgttttaagggatgttattgatttggataatttttaggatagagtttaagttatttagtttttggagggtttggtgtaggagttgtagaagaaggcggagtattaggtgggggaagatgggtttttattgaagattaagttggggtattacgttacgtagttttaggtgggtgtaggttttgggttatttacggggaggaagtattattttgttttagtattagaatttttgggtttttttttggtttggttattgatttattatgtgattacgaatttattgggaattttttttcgattttttttattttttttttttaaattcgatttgtcggatttttttagtatattgtaaagtaagggtgggaggtgtttgttgttaatagagagagatgggtgaattggttttatggaagtagtagaagggatggagggagattgagttaggatttttatgttggagaagggaagattagtagattttagaaatgaggttattagattttttttttggggttttttaaaggtgagagaggagttattttagagataagagttggatataagggttttgaattgagggtttagaaataagatgtagtttttttatttgaggggagtgggtatggaggaagagagggagtttttgtggaagtaggaaaggggtgtgggtagtgatgatagttaagtatttattggaatttacgtatgttttttagagagttttttaatatagatagtagggtgttagggaaatataagtttattttagaagagggggaaaataggagaagtttgaggggaagtaatataggaggttaggggtaggatggtgggaagtattttgattttggtattagatgttttgagtttggagttatttgtttttttatttggttgcgtttggacgagtatataatgtttgagtattagtttttttatttgtgaaatggggattatagtttttgtttatgttttagagtttttatgttgttagtgttttgattttttattattttttggtattagggatcggttttatggaagataatttttttatggatcgggattgggtagggaggtggtttttggatgatttaagagtattacgtttattgtgtattttatttttattgttattatattgtgttatgtaatgaaataattatagaatttattataatgtaggattagtgggagttttgagtttgtttttttgtaattagatagttttatttgggggtgatgggagatagtgatagattattaggtattagatttttttaagaagtgtataatttagatttttcgtatgtgtagtttataatagggttagtatttttatgggaatttagtgttattgttgatttgataggaagtagagtttaggttgtaatgcgagtaataggtagtagttgtaaatatagatgaagcgttatttatttgtttatcgtcgtttattttttgttgtgtggtttagtttttaatagattatcgatttgtattagtttatggtttaggggtttgggatttttgtgttatagttaaaagatacggtagattggaagtgttttataagattgggtatgatggtttatatttgtaattatagtattttgggaggtcgaggcgggtggattatttgaggtcgggagttcgagattagtttgattaacgtggagaaatttcgtttttattaaaaatataaaattagtcgagcgtgatggtatatgtttgtaattttaattatttaggaggttgaggaaggagaatcgtttgaattcgggaggtggaggttgtagtgagttgagattatattattgtatttttagtttaggtaataagagtaaaattttattttaaaaagaaaaaaaaaaaaaagagaaagtgttttataaattgtgggtttttaattcgttttaaattagatatgaagattttggaggggaagatgaggatgaggaatagagatatagaggtgtttggggatagtttttgaggttttttgggaaaagttgaggtagaggttgaaggagaggaagggttgggtatagtatggggttggtatggttggagtagaggatggcgttggaggttattgttggatttttttagaaaatatatgatcgttgttttttggagttggttcgttgtattcggtatattttgtataatgaatagaggttggttcgagaagttaataatgtgagtgttttttggg

SEQ ID NO: 407 - DNA, 6220 bp, Artificial Sequence
  chemically treated genomic DNA (Homo sapiens)
tttaagggatatttatattgttggtttttcggattagtttttgtttattgtatagaatgtgtcggatgtagcggattagttttagggggtagcggttatatgttttttgaaagaatttaatagtagtttttagcgttattttttgttttagttatgttagttttatgttatgtttagtttttttttttttttagtttttgttttagttttttttagggagttttaggaattatttttagatatttttatatttttgttttttatttttatttttttttttaagatttttatatttggtttggagcgaattaaaaatttatagtttatgaggtatttttttttttttttttttttttttttgagatggagttttgtttttgttgtttaggttaaaggtgtaatggtgtgattttagtttattgtaatttttatttttcgggtttaagcgattttttttttttagttttttgagtagttgggattataggtatgtgttattacgttcggttaattttgtatttttagtagaggcggggtttttttacgttggttaggttggtttcgaattttcgattttaggtgatttattcgtttcggttttttaaagtgttgtgattataggtgtgagttattatatttagttttatgaagtatttttaatttatcgtattttttgattgtaatataggggttttaaatttttgggttatggattggtataggtcggtggtttgttaggaattggattatatagtaggaggtgagcggcggtgagtaagtgagtgacgttttatttgtatttatagttgttgtttattgttcgtattatagtttgaattttgttttttgttagattagtaatggtattggatttttataggaatgttaattttattgtgaattgtatatgcgagggatttaggttatgtattttttaagagaatttaatgtttggtgatttgttattgttttttattatttttagatgggattgtttagttgtaggaaaataagtttagggtttttattgattttatattgtggtgagttttataattattttattgtatagtataatgtaataataatagaaataaagtgtataataaacgtgatgtttttgaattatttagaaattatttttttgtttaatttcggtttatggaaaaattgttttttatgaaatcggtttttggtgttaaaaagtggtgggggattaaggtattaatagtatggaaattttaggatataagtagaaattatgatttttattttatagatgagaaaattgatgtttagatattatgtattcgtttagacgtaattaagtgagagagtagatgattttagatttagggtatttgatgttaaggttaaggtattttttattattttgtttttggttttttatattgtttttttttaggttttttttgtttttttttttttttgggatggatttgtatttttttggtattttgttgtttgtattgaagggttttttaggaaatatacgtgagttttaataagtgtttgattgttattattatttatattttttttttgtttttataaaaattttttttttttttttatatttattttttttaagtaaagaagttatattttatttttaaatttttaatttaaagtttttgtgtttagtttttgtttttgggatggttttttttttatttttaaaagattttaagagggaggtttggtggttttatttttagagtttgttggtttttttttttttaatataggaattttgatttagtttttttttattttttttgttgtttttataaggttagtttatttatttttttttgttggtaataaatattttttatttttgttttgtaatatgttaaagaaattcgataggtcgaatttagaaagagggggtgggggaaatcgaagaaaagtttttaataagttcgtggttatatggtgagttagtggttaggttaggaaaaaatttaggggttttgatgttggaataagatgatgtttttttttcgtaggtggtttagagtttatatttatttggagttgcgtggcgtagtgttttagtttgatttttagtaaaaatttatttttttttatttggtgtttcgtttttttttgtagtttttgtattaggttttttaggagttgggtggtttgggttttgttttggggattgtttaagttaatggtattttttggggtagggtagaagagaaaaatttattgtggtatttttttgggtaaggaggttagggagttggaataaagtggaaattttaggtttatgatcgagggtattttagggtttataagatttgtttttagtagttttatagatattcgagtttaaaaatattttttgtttttttaggtttttttttttttaggggtattatttttttcgtataaagaaggataggtaggattagagttatattaaattattatgagtaaaattagaggttaaagggtttggatggtagggattttttgaggaggggtagggcgggacgtgtttattatggttggtttttaatttattgggttaagtagtgtcggatttcgatggggaagtgttggtcgtatagtatttgtatttggcgtagcgcgtttttttgtagttgttgggtttggatttagttcgttatggtcgtttatttagggcgagtcgagcgttgaagcgtttttttttgtagaggttaaggaatcgggtttgtttttggttttgttatgtttatttatttttggatcgcggttaggttaggtttttttttttttatagatagtttttttgtgcgggaatagagatggtgaggagtggagggtcgtttattttttttaataaggaattcgttgaaggggaggggaaggtgttttgtagaggtaggtgtttttttcgttttttttttttttcgttttatcggagtttttttagtgagggggacggttagaaattgaaagagaaatttgacggcgggaggtttataggttttttggagagggttgtaaggattttttagtttatttcgggttcggtttttgggaaggggagatattttaattcgaagttaggttagcgttacgacggtttttattcgacggttagggtttttcgggtacgtggttggggttgtttaggagatagggttgaggatttgggcgttttttttttcggttgtttttttatttgtgtattagtgttttttcgggtttagttcgataggtgtttttttttcgaggcgtgttaggacggcgttttttttggtttttgttttttattttcgatttttgtttttacgttttttcgtttttcgtttgcgttgggttaattttttcgtagtgtcggggattgattttcgcgttgcgttcggtcgtcgagtttcgggtgtcggaggtgtcggggcggtagtagagtgttttttttcggcgcgtcgtcgaggacgcgttatcgggttatttatttggtggggtcgtatcgttcggtagtcgggtcggttttgcgtttcgcggttttcgttttcggtcggggtttttggcggcggcggtagcggcggttgttattataggaaggagcggagagtagcgattttttttttaaaggttagttgtttgcgatagattatatatagcgcgcgagttcgcgttagtagtttttttagtttcgtttgttttttttttgtttcgtttttagtcgtcggtttttttgtaagtgcgtaatagcggcggtcgttttcggcgggcggcgtcgggcgtgggggttgtttcgacggcggggtttttcgggagttttagtaggttttcggcggcggtttttagggagcgtttcggaatcggggcgggttagaatagtcgggggaatgtggttgtcgggcgttgtcgggaaatttcgggttttggaaattttaaatttgggttttagtttttttattcgtaaaaagggaggagggaaaagtggattaattggcgacgttttttagttttggcgcgtgttattttttgagtttttagattaaaaaataaatgtgtggggtgtgtgtgtgtacgcgcgtgtgtgcgtatgtgtgttttgggggttataggttttgtgattttagagataaaattgtagagaggggaagaattggggattttagtgaagttaagattatttttattatcgtagtattttttttttttttttatttcggttatttaaatttaattttgacggaggaattggaaagaattttggtagttatgtgttttagttttttttttttttataattttgtaggtaagaaatggaagttttgagagggaaaggggtttgttcggggttatttagggttatatagtaggtacgtggttttattagtcgattgtgatttataaattagttagcgttttcgtttatttagtttagttatttatgaggttggttttatttttagaaaagtttagggagggatcgttttgagtttttttaatttcgaaattttttataggttttgttatagtagtgaatattttgtttagagttttagtttttttttttaagaggtttttttttacgaggtttaaggggtttggtaaggtcgggttggacgttttttattttttttgtttagttttttttttttttgggttttttttttgtttggtagcgggttggtagtattagaggaggggttagtttagttgtttatttatagtatagttgggttaagattgtatgttttgttggggggggtgtatttttatttgtttttttttttagttgttttttagagttgtttttttttttttatttttattttttttttttgttttttattattttttttagttttatttttttaattttagaggaaaaaaaaaaaaagaattttaaagttgtagaagttaaaatgtttgcgttttttttattttttttgtgtggttatagtgttttagttggtaggattacgaggaaaggaattgaaaattttaagggggtgtatggaggatgtagggaagttttgttttttagatgttttgtagggggttttagggaggaggaagtatagttttttttttttttttttttattttgagtaatggatttggtaggggagggttagatatagagttagggggttaattggaatgaaagttaagtgttatagttggaagtgattataaagatgattttataagtggaaaaataaaggttagagaggggaagtgattttgttatcgttatgtagtttgtcggtggttggatataaatttattgttatatttgggtgggttttatttggtatttgtgttttttagtagttttttttaggtaggtgtggaagttagttgatgggagtagattttttaggtttttaagtttttttatttaggtttggagggtagagggttatttttgttatgtattgatatttgggtatttgatggggtgggggtgtttgtttaagagagggggttttgtttgtttttttttaggtagttatttttttagattttttttttagggtttgtagaggtttgttgttttagtaggtagttttatttattaaatatttgttttggttgggtcgggtttggttttagtgtgggtagttttaggttttaaaaagttagtattgaggtgttagagtatagaatgggaaggatgggtttaaaagggtgtgtggttgtgtttttagagttttttcgtgttttttattttgattttgtgtttagtggttgtgtttttggttgattattttttatttggtttttgattgtaaggtttcgaatatttgtgttttttattgtatatttttttttttgggttttttttttttttttttttttgagatggagtttcgttttcgttgtttagattggagtgtaatggcgcgattttggtttatagtaatttttatttttaaggtttaagcgatttttttattttagtttttcgagtagttgggattataggtatgtgttattatttttggttaattttgtatttttaattttgtatttttagtagaggcggtgtttttttatgttggttaggttggtttcgaattttcgattttaggtgatttattcgtttcggttttttaaagtgttggaattataggtattagttattatgttcggtttttattttggtttttattttttttgtgttttttttttgtttttttaggtttttatttggttttttgattttgtttgggtt

SEQ ID NO: 408 - DNA, 6228 bp, Artificial Sequence
  chemically treated genomic DNA (Homo sapiens)
attttggttaggagggttttttagtttttatttttatgggtagagttagttgttattttgggtttagtagaaagaggatttagaatagaaaattttttttttttatgttggttatttatttaaagattttgtttaattggtcggttttagagtttttatagaagagaggtttaaggtgagaagggatataaggtagtagttatttttaaagatattttagttgaatggttattgtttagtggtttaaaataggaagtatagggaataaaggttaataattttagtattttgggatgttgaggtgagaggattgtttgagtttaggagttttagattagtttgggtaagtaagattttgtttttttttttaaaaaaaaagaaatgttaggtgtagcggtttacgtttgtaattttagtattttgggagtttgatgtgggtggattatgaggttaagagatcgagattattttggttaatatggtgaaattttgttattattaaaagtataaaaattagttgagtatggtggcgtgtatttgtggttttagttatttgggaggttgagttaagagaattgtttgaatttgggaggtggaggttgtagtgagtagagatcgtattattgtattttagtttggcgatagagtaagattttatttaaaaaaaaaaaaagttagttatggtggcgtgtatttgtagttttagttatttaagaggttgagatgggaggattgttttagtttaggaggtagaggttatagtgagttgtaattgggttattgtattttagtttgggtgatagagtgaaattttattttaataaataaataaataaataaataaataaataaataaataaataaaaaataaagagaataaagggatatgaagtttttaattttagaatattttagagttttttgttatgggtaagttagtagtacgtaagtaaaagaatggggttagatgtagtagtttatgttattttgggaggtaggggtgggaggattgtttgagtgtaagagtttaagattagtttgggtaatatattgagattttatttttataaaaatattaataaattagttaagtatggaggtgcgtgtttgtagtgttagttagttgggaagttgagatgggaggattatttgagtttaggaggttgaagttgtagtgagttgtgattatgttattgtaatttagtttgggtaatatagtaagttttggttttaaaaaaaaagaatgggtaaggtatggatgtggtttatgaataagcgatttggggaatttaaggtagtttagggtatgtgggttttatattttcgacgaaatatttttgtaaagatatagttaatattttatatgtttataggtgttgtatatgtggattgtagaagaatttcgggagttcggtattagagtgtaataatttaaagggaataggaagaatggatggggattttatgggttattatgaaatataatttgtttgattgaatatatgaagtatatgattttttaattgttacgggtaattatttttttatttttaattagaatttattttggtattatttttttattgattacgggtgtaagtgttatttggtagttgtagattttggttaggttaaagttagttagtttgattgttttattatttgttattagaatgttttttggttttagatttcggtgaacgatgtaattggtatgaaggaaatttaggttttttagaaattggcgtattagattttagttttaaaggggaggtatagatgtattggaaattaggtattatatttgaaattttagaaggttttattataaaggttttaatttattttttaatgtttattaattttatttattttgatcgtttcggttggtaagtttggtgggggtgttttgtttagatatgtttttaggttttggtttatatgtttaaatattagggttattttgatttttcggttagttcgggatgtggtatagacgtttattagtttgattagagtaaatgtttattttttaattttttttaatttaatatggttttttattatttttttagggtttttatttttttatagattattatattttatttataggttgttttttttttttattttttacgtttaattttttattatttttttatcggataatattgggatgtttaaaagtttttagtcgttttagtaaagttattttacgaattgtgttgatgggaaggttttttttatttttttttttattggggatttttatatttttgagggttataaagtggttattgtggggattacgggttttgtatattgttttataggtatcgatattaattttagttattggtttatatcgagaggtagttatttttagattaagggagattttataattatagatttttattattaaaagtcgtttatagagttaggatggtatgagtttgtagtaataaagggatttttaaaaaaaaagcgtaaagaatattattagtattttatttttcgtttttagttttttttggggtcggttttagagataatataatgatttaatattaatttttttagttacgtgaggttttgtaatagaaaacgtttttttttttgggataatcgcgtttcgtataaagattatatatgatatatgttttgtatcgaagattttatattttagtttttaaaattatatttttttatgattataaaggttttatttttcgtttttgagcgatttttttataattagttcgcgaaacgaacgcgtggaaagttgtgaggggggcgggtattggtttttatttttgggaagggattgtatttattttacgttagttcggggtgttgtgggggcggttcgttatcggggtttcggagtcggtttttacggttttatatattcgagttcggttcggagtagttggacgtagagggttcgattatagatataggtcgtaagttagagaggtttttttatttttatttttattatgtgattagttgttaaagaggcgcgcggaaattgggagggcggggcgaacgtcggacgttttgggtacgtgatcgttatttatgcgttgaggggcggataggaggtgtttcgattgggaggagggcgaagagtgtaagggggcggaggggcgatggtagttacgtgatttgttgttattatacgtgatcgtttgatattgttttgaggagtagaggtgtggttacgcggcgggtacgtgattggttgttataattttcgttgtagggggggagcggtgagggggataagagagggtggagttcgaggcggtgttatggtaatttaggttatttagagtttaattttcggttgaaggattgttttattatcggtttgaaggttgaattttagttttattatcggttttttagtttgtttgtattggggagggggtgggagttggggtattagaggtgatgttgttattttttcgttttattatgagaaaatatatttttatttgtgttattgttttatttattaattttataatattttattgagtgtttgtttttagtgtgtatgtgggtttttattttgtttttggtgtttgttattggttttttaaagtagtggtacgattatttataaagatgtagttaataatggggttttttataatagggagtaaataatgtttatttgagggtaaaattacgattaaaggatgacggaaggtagattaatatagtaatttaataggtttagtgataaggtaatttttttatttttttaatttttaaatttttttgggagtgttaatgtaaagatttgaggttatttggtagagaagttattgatgagtaggagataggaatatttgattttttaagttttttttttttttttagtaggaaggttttatgattatgtgatatttgtatgtgtgtatatatgtttttatgtatatatgtatgtatatgatattatttattatattatatataagacggatataggattgtatatgtgtaagaaagttattattatattttttgtattttttagattattataatgaatgaaaatgatatgtttttttttgtaaattttgtgattatttatttggagttattgtgtttttttttttttttttagtgtcgtttttttagtatttagtattgtttagaatatatttgtttttaaatggtttttgtttagatatttaggtagatataagtagattttttttattttgttttattggttttaaggtttttattttttagttttttgggggtatgggagtaaaggaggaaagcggttagtgttttatttgtgagaatttgtttaaaatttaaagttattttattattttatttgttattttttttattttaatttttgttttttttaattatttggttgagaatataagagtttaaattagaagatgaatataaattatgatttagagtaaaatagaatatatattaatatagatgttttttttttttattttgatatttgtagttttgggttttttttggtaagggtagttggaatattagtaagaaaaattttaaggattgaattgattaaggggtttaagaggtgaatgttttattggttattttgttaggggtgggtgttttgtaagttttttggaaggttaagataattgtttgtgagttttttaaattttttttttatattagtattttttattttagttttattttttatataagatttttatagtttattgtttttgtaatagaagacgttttttttgtttgtttgggttttagtttttttttttgatttatttattagtttatttaaaatatttgaatattttatgggaatattattgtttttttattattttttattgaggaattttaatttggtagtttgttttaggttttgttttttttttttttttgttaattatttttttattaattaaatttttttttagtatgtttgatttaatgagtttttttggaatttttttttttttagttttgtaaaggggaggagagggagaatgtaagtgtaagaaagaaaaaaatgtgatgggggtagaatttggttttagagggaagtttttataaaaggaaaggggtaagtgtgtgtattgtttattttagtgtagtggaggtgagggtaggagagtattaggaaagatatttttatttttttagtacgtttattttttttgtttttttttttattttttttatatattataattataggtttttgttttttagataattcgattttattttttatatattttttttttttagtttttatcgattatattttttagttttttgggtaaagtgtatattgtttgagttttatttttgtttatgtattttttttatattttcgatatttgtatagttttttttttgtatatttttattttgtataagttttattttttttggtatatttgcgttatttaattatttattttttatgtttattcgtttattttttatttttagatatatatttagttaatttgtgtgtatattttttttttttggttatttttttttttttatttttttcgggattttatatttgttttcgtttttgggatatttgttcgtgcggggtagggcggggatgcgtagtcgcggttttttttttttttttttttttcgtttcgtttttttttttattttttattcgtttttcggcgttcgtttcgttcgttcgttatttcgggggggttttcgtcgtcgtcgtcgtcggaaggagtcgttatttgttatcgtcgagcgtacgggtcgagttaagtttgatttcggagtcggagggggattgggatcgagagaacggcgatggggggcggtttcgtcgtaggaggattcgggcgcgtaatttcgggggttcggttcgttttagatttagattcgcggggtgcggtattttgagttttttttttcgttttttgttttggttatggtcgtttatttcgtcgttttcgggtcgttagttcgttcggtttcgtaagtatcggagtttcggcggtggtagtagtgaacggttgtcgtaggtttcgaagatttcggttcggttcggttttttagcgcgcgtttttttttcggttttgttttttttttttttttcgtcgttagcgagttttttttgtacgttgtttttcgttttcggtgttcggacgatgtttaagtttcggtttcgtatgtttttgaacg

SEQ ID NO: 409 - DNA, 6228 bp, Artificial Sequence
  chemically treated genomic DNA (Homo sapiens)
cgtttagaaatatgcggagtcgagatttgagtatcgttcggatatcgggggcggggggtagcgtgtaaggggggttcgttagcggcggggggaggggagaggataaggtcgggaagggggcgcgcgttagagagtcgagtcgggtcggggttttcggggtttgcgatagtcgtttattgttgttatcgtcggggtttcggtgtttgcggggtcgagcgggttggcggttcgggggcggcggggtgggcggttatggttagggtagggggcggggaggggggtttagggtgtcgtatttcgcgggtttgggtttggagcgggtcgggttttcggggttacgcgttcgggtttttttgcggcggggtcgttttttatcgtcgttttttcggttttagttttttttcggtttcgggattaggtttggttcggttcgtgcgttcggcggtggtaaatggcggtttttttcggcggcggcggcggcggagattttttcggagtggcgggcgggcggggcgggcgtcggggagcgggtgaaggatggagggaggggcggggcggggagggggagaggagaaggggtcgcggttgcgtattttcgttttgtttcgtacgagtaggtgttttaggggcgggggtaagtgtgggatttcgaggagggtggaggaaggggagtggttaaggaaggggagtgtgtatataagttgattaggtgtgtgtttgggagtgggggatgagcgggtgagtatggaaggtgagtggttaaatgacgtaggtgtattagggagggtgaggtttgtgtaaaatgggaatgtgtaaagaaagagttgtgtaagtgtcggaggtgtgagggaggtatatgggtaggggtgggatttaagtaatatatattttatttaaagggttgaaaagtgtgatcgatggggattgggaaagagaggtgtgtaaggaatggaatcggattgtttgagaaatagaagtttgtgattgtaatgtgtgaaggaggtgagggagggagtaggggaggtaggcgtgttaaagggatgggagtgttttttttggtatttttttgtttttatttttattatattgaagtgaataatatatatatttatttttttttttttatggagatttttttttgaggttaagttttatttttattatattttttttttttttatatttatattttttttttttttttttttgtaaagttgagggaaaagggattttaggggagtttattgggttaaatatattgggaaaaaatttaattagtgaaagagtaattaatagaagaagggaggggatagagtttgggatagattgttaaattaaggttttttaatagaaagtgatggagagatagtaatgtttttatgaagtatttaaatgttttggatggattaatgaatgaattagaaaaaggggttgggatttaagtagatagagaggacgttttttgttgtaaagatagtaagttgtgaaggttttatgtggaaggtgaggttgaagtggggaatgttggtgtgggaagggagtttgaaaaatttatagataattattttagttttttagaaggtttataaagtatttatttttagtaaggtagttaataaaatatttattttttgagttttttagttagtttagtttttgaggttttttttattagtgttttagttgtttttgttaggaggggtttagggttataagtattaggatggaaagaggaggtatttgtattaatatgtattttattttgttttaagttatggtttatatttattttttagtttgaatttttatatttttagttagatggttaaggaaaatagaagttagagtggaaggagtggtaaatagggtaataaaatggttttagattttagataaatttttataaatgagatattaatcgttttttttttttatttttatatttttaaagggttgggagataaagattttggagttaataaaataaagtaggagaaatttatttgtgtttatttaggtgtttgggtagaggttatttgggaataagtgtgttttggatagtgttaagtgttaagaaagcggtattagggaaaaagagggaagtataataattttaaatgagtagttataaggtttgtagaagggggtatgttatttttatttattgtggtggtttggagggtgtagggggtgtggtggtaatttttttgtatatgtgtaattttgtattcgttttatatatgatgtgataaataatattatatatatatatatatatatagaagtatatatgtatatatataaatattatataattatagaatttttttattggaaaaaaaaaaaaaatttaaaaggttaagtatttttgttttttgtttattaataatttttttgttagatggttttaggtttttgtattaatatttttagggaggtttggaagttggaaaagtgagaggattattttgttattgagtttgttggattattgtattaatttgtttttcgttattttttaatcgtagttttgtttttaaatgggtattgtttattttttattgtagaagattttattgttggttatatttttatagatagtcgtattattattttaaagggttagtgatagatattaaaaataaaataaaaatttatatatatattggaagtaagtatttagtaaaatgttgtagaattaatgaatgaaataatgatataaatgagagtatgtttttttatggtggagcgaaaaggtgatagtattatttttggtattttaatttttattttttttttaatgtagataggttgaaagatcggtagtgagattggagtttagtttttagatcggtagtgagataattttttagtcgggagttgggttttgggtggtttaggttgttatggtatcgtttcgggttttatttttttttgttttttttatcgttttttttttgtagcgggggttgtggtagttagttacgtgttcgtcgcgtagttatatttttgttttttagagtaatgttaagcggttacgtgtgatagtaatagattacgtggttgttatcgttttttcgtttttttatatttttcgttttttttttagtcgaagtattttttgttcgttttttagcgtatgggtggcggttacgtgtttagaacgttcggcgttcgtttcgtttttttagttttcgcgcgtttttttggtagttggttatatggtgagggtgggggtgagggggtttttttagtttgcggtttgtgtttatggtcgggttttttgcgtttagttgtttcggatcgagttcgggtgtatggggtcgtaggaatcggtttcggggtttcgataacgggtcgtttttatagtatttcgggttggcgtgaggtaagtgtagtttttttttaggaatgagaattagtgttcgttttttttatagttttttacgcgttcgtttcgcgagttggttatggaagggtcgtttaagggcgggaagtggggtttttgtggttatgggaaagtataattttagggattgaggtgtaggattttcgatgtaaggtatgtgttatgtgtgatttttgtgcggggcgcgattgttttaaaggaaaaagcgttttttattgtagggttttacgtggttggaggggttggtattgagttattgtgttatttttggggtcggttttaaggaagattgggagcgggggatgggatgttggtggtgttttttgcgttttttttttgggagtttttttgttgttgtaggtttatattattttaattttgtaagcgatttttggtgataggagtttgtgattgtagggttttttttgatttgagaatggttatttttcgatatgagttagtggttgaaattggtgtcggtgtttatgggatagtgtataaggttcgtgatttttatagtggttattttgtggtttttaagagtgtgagagtttttaatggaggaggaggtggaggaggtttttttattagtatagttcgtgaggtggttttattgaggcgattggaggtttttgagtattttaatgttgttcggtgagaaggtggtggagggttgggcgtggggagtaaagggaaaagatagtttataggtggggtgtgatgatttgtagagaagtggggattttgaggaaataatgagaggttatgttgggttaaaggggattgaaaagtgagtatttattttggttaggttgatggacgtttgtgttatatttcgaattgatcgggagattaaggtaattttggtgtttgagtatgtagattaggatttaaggatatatttggataaggtatttttattaggtttgttagtcgaaacgattaaggtgagtggggttggtaggtattgagaggtggattgggatttttgtagtagaattttttgggattttaggtatggtgtttagtttttagtgtatttgtattttttttttgaaattaggatttgatgcgttagtttttaagaggtttagattttttttatgttaattgtatcgtttatcgagatttgaagttagagaatattttggtgataagtggtggaatagttaagttggttgattttggtttggttagaatttatagttattagatggtatttatattcgtggttagtagaaagatggtattaaaatgggttttggttgggagtaggagagtgattgttcgtagtaattgagaagttatgtgttttatgtgtttagttaagtaagttgtgttttatggtaatttatggggtttttatttattttttttattttttttaggttgttatattttggtatcgagttttcgaagtttttttgtagtttatatatgtaatatttgtggatatgtggagtgttggttgtatttttgtagagatgtttcgtcgaaagtatgggatttatatattttggattattttgaattttttaaatcgtttgtttataaattatatttatattttgtttattttttttttttgagattagggtttgttgtgttgtttaggttggattgtaatggtatgattatagtttattgtagttttaattttttgggtttaagtgatttttttattttagttttttaattagttgatattataggtacgtatttttatgtttggttagtttgttaatatttttatagagatggggttttagtatattgtttaggttggttttgaatttttgtatttaagtaatttttttatttttattttttaaagtagtataagttattgtatttggttttatttttttatttgcgtattattaatttgtttatagtagaaagttttgaaatgttttggaattaggaattttatatttttttattttttttattttttatttatttatttatttatttatttatttatttatttatttattgagataaggttttattttgttatttaggttggagtgtagtggtttaattatagtttattgtagtttttattttttgggttaaagtaatttttttattttagttttttgagtagttgagattataggtgtacgttattatgattggttttttttttttttagatggagttttgttttgtcgttaggttggagtgtagtagtgcgatttttgtttattgtaatttttattttttagatttaagtaatttttttgatttagttttttaagtagttgggattataggtgtacgttattatgtttagttaatttttgtatttttagtaatgatagggttttattatgttggttaggatggtttcgattttttgattttatgatttatttatattagatttttaaagtgttaggattataggcgtgagtcgttgtatttggtatttttttttttttaaaaaaagagataaggttttgtttgtttaggttgatttagaatttttgggtttaagtagtttttttattttagtattttaaagtgttggaattgttggtttttattttttatattttttattttgagttattaagtagtaattatttaattaagatatttttgaaaatgattgttattttatatttttttttattttaggttttttttttgtggaaattttgaagtcgattagttgggtaaaatttttgagtaagtgattaatatgggagaaaaagattttttattttgagttttttttttgttgaatttaggatggtaattggttttgtttatggggatgggaattggaggatttttttgattagagt

SEQ ID NO: 410 - DNA, 6139 bp, Artificial Sequence
  chemically treated genomic DNA (Homo sapiens)
ttttatttgaagttagagatttgggaaggttttttagtttagtgttttttaagaggtagaaggaagagtaggaagattgggtagaattattagaaagagggaatttcggtaggaagtagaagttagggtgggttttaaggaaggtattttatagtttttgtgtaagagttttatttttagaatgtttttgttgagtaattgggtaattttattaattttatttttattttattgtttattttatatttttattttttatttttttatatttattttattttattttggtttttaattagttttattttttgatgttgtatttagtgaattatttgtagaaagatagtgttatatataaaaattgtttttagagaaggtatttggaggttttggggttggagggtttttaatataagaatagtgtttatgtgtttaggtggttttttttggggtattttttagtattatgagtttagggtagagtttggtttaggaatagtaagtaggttagttttggttacggttttgtttttttaattttaagtaaaatatttaatttgtatattttttatagtttatttatttttttaaagatttatttatatttaatttttaatgttttgtttatagttttttggattggggggtatagggtgtataagggatagaaaaatggaaagtaaggaattgtttagaaggaattggaataatgatgattttttttttttttttatgttttagagagattgggggaaaaatagttttatttagatatttagttgggattgattagggattatgtttattagtttaattttatttttttattttttattaggaaaaaggtgtttatatttatggttatagttatgtgttttatagaagggtaagtatgatacgttagattagagatttagagttttaagttagagggattttaaagaatattatgtggttaggtacggtggtttacgtttgtaattttaatattttgggaggttgaggtaggtggattatttgaggtcgggagttcgagattagttttgttaatatggtaaaaattttatttttataaaaaatataaaaattagtcgggcgtggtggtgtgtgtttgttatcgtagttatttaggaggttgaggtaggagaattatttgaatttgggaggtagagattgtagtgagttgagatcgtgttattgtattttagtttgggtgatagagtgagattatgtttaaaaaaaaaaaaaagaaaaaaagaaaaaatttatggtaggtagagtgatttatttaaggttatgtaggattgggattagaattgtgttttttggattttattttaatgtttttttttattatattaagttgttttatatatttttatttttttttttttataagtttagagtatttgagatgttgatttaggtatgaatgggttttgaagtttatagatttgtgttttaattttagttatttattgtgggtagttatttaatttttttgaattttaggtttttagtaaaatgtggatagttaaagtaattattttaaaaggttgttataagtgttatattagttaggataatatattaagtgtttagaatatagtaggaatttaataaatggtagtagttatttattttaggtggtaggatttttagatttgaaaaatagtttttgtttagtaaagttaaaagaagggaagagaagtaggtgttagtagtttttatagttttttatttttttttatttagttttaggtttttttagagtttagaaggtgatataggtggttagaggaatttagtgattagagtttcggggagagtaaggtaggggggttaagttaattagaaaggggagggagaaggtgtagggtgatagttaggtttttgttatggatagggagtagtgagttaggtttgtagaggtaagaggagtagtcgtgtgggtggggggtgggggtggggtgagttatagtttagttttgtttagtttaggaggagagggttaggagaatttaggttgtttaggttatgggtaattttagagggttattgggagaggatgaagtatgggagtttaggtttagttttggagtatgtgtttgatttatataaagtagagagagtatttaaggaaagtttttgggaatgagggagaagggtagttgaggagtaggtggaattagaataggtgggtatttgtttaattaaatatagttattttagggtatagtgttgagtttttgttttattttggataatttttttaggtttggaggtaggagagttggtaggttttggattttgttttgtatttgtatttggttatagttaaagaggttggttggaggattttatatagttttttttatttggagtttttttaggaatgtaaggtgtttagtaagttgtaggttttcggtagtatttatagatatttagtattttaatatagttttttaggggtttagtgtttattatttatagttttatttagggcggttaagagttttttatttttttttgtttttttaatttggagataggtggatggaggaggttaatattgtatattttttagagatgtgtttgggtattttcgtatgtgttatttttattttatatataatagttatttgatatgggaattagaattggcgtttatttttatatagtagttttagggaaagtattttaattattttttgtttttattatttagtttatttaagaagaacgtaataattttagataatacgtttgatttaatttgtttcggagtatttagaagggtagtaatttagtaggtgaggtaatgataagagagagagagtgggatttatattttaggattttttagtgtttattaggtcgattagttttttttcgaggttttttatgaatatttttaatttatagtattgtttaaatagtaagaattttggatttgtttattttttaatagtttattaaggtttaaggatggggggtttttatatttattttttaaaaggtttagatttgttttttgtaagttacggatttttcggtttcggtcgttttttaggggtagtagttggttcgtggatatagtgggagggttcgggttgttggttttagtagttagtttttttcgaagtcgttttaggttttcgttagttattagtgtcgagagaattgcgggcgagaggttaggtcgtattagatattcgtttagatttttgattaatacgtatcgatgtcgacgttcgttcgttagagcgtaagggttttattaagtggttcgtgtcgggtgcgttgcggcgatttttttttatgtttttagtataacgtttttattttttcgattttcgggggcgtcggtagtttttttatttgtagttagaaagagttttagtattatcgacggtagtagttttatggtttcgtatcgagaggaggcggcgaggtattagttattttcgaagcggcggttattgggcgttggtattagagttgggcggcggagtttaggagatttcgtcgggtatcgtttgtcgttcgtttttgcgtgtaagtttggtcgggatttaggcgtagttcgttttttttgagtgttttgttttgtttatttagttcgttcgcgcggtcgttcgatttcgcgcgtttaggttaggttagttagtagcgtggttcgcgtagttttttcggtcgaatgagcgttgttcggttcgcggtcgggaataaggttttaggaggcgcggaagtttcgtttcgttcggcgtcgtttttttttttttttcgtgttgggaagttcgttcggttcgcggcgtcggtagcgtagttttcgatttcgcgggcgcggcggaggattgggcgggaggagagggcggcgtttataatttttgggattaggtcgaggtagtcgcggtttgattgtgggtagggttattgatcggtaggtggcggagagcggtttttatttttttttaaacgtttgttattttgtagttttgtgattgattgttgagttgagttttgtttcgggtttggttttttgttttatttaagttttatattaggggtttttatttttgttattttttaagttttagaagtttattttttggtttattaatacggtaagtattaaataataattaatttatttattatttaaaaattagatacgtgaatgttagtcgtttttataaattcgagataattagagttgaagttgtaggtatttagtattaatttagtaaaagtaaaggaagttagtatttttttagtttttggagtggtttttttttatttttttttaggggatattaggatttttgaattatgggttgtaatttttaggtttttgagattggagagatataggttgtgaaataagttttatttttttttttgtttttgattgttatttttttttttaatataaaaaatgagttatttttttataggatttagttggttaatttagattgttgttttatagatattaggtgttttttttttaatttatgtgtttttgtaggggttttttggagttattgttttgatttaaagaaatgagtgttttagtaggtattttagtttttagggacgtgttggggagagagttgtttgatatagggttgggttggtttttagagttttgaaattgtgttagatagagtatttgtcggattttgtttgtgtgtagggataaaaataggtttgttatttatatatagtttattttattgtttttttttatttttatttttgtaggggttagtttggttttgtttttttaatttgttttagtaatttaggtttaggtttttatagtgtattggaattattatagatttgagtttgaattttgtttttgttatttattgtgtgattttggataagaaatttaattttattgagttttagttttgacgttttttaaatggaaaaaataataataataataataatgattattttgtagggagttttttgagaaatgaatgcgggaatatataaaagtagttagtatagtgttaggtatattataagtttttaataaatgtgatttattattattgttgttgttaataataattattaagtatttgattattttatttttttagaggtttttttttttttatttttttagatcgtttgtttttttttaggttatatttgaggttttatgatatagttgggttggttttagatagaagtttatttgttatttatttggttaagagttattgttagattatttttttgggtgatgagtatcgggtttaggattttagtgtatggttatcgtttaagttatgattttgtttttttttagtagttgtttggttatttgtttttttaaaataaagttattttggggttaaggttttttttaggggagggtggagagaaatattttttgatatatggttaaattatttttttttttttattttcgttagagttatattttgtttttttgttttagtttgtttttttttttttatatgttttgttttttcgtttttttatttttatattagttttagttttatttatggggtaattttaaatttttattatatttggagttttattttagttaggtttgtgtgttagttaggttttataggaagggtttgaaaaaagaagataaaaagtttgaattggatttgggatagttatttttttttttagaattttggatgtttttgagtaaagaaaaggaattataatttatgttgaggtaattttattaatttaattatattataaatattaattgaatatttttggggggtattggggatatagaaataaataagatagtttaggatttgtttttatagagtttatattttatagtagataggtagtatattaaggaaataaataaggaaaaatatattttatagtgataattgttaagatgaaagttaaaatataatgatgtgttgtaggataatatgttttagtgtttaggatgatattttaaattgattagtaaagttttttttgagtaggtgatatgtaagttgaggtttgaatgagaagaagaaattagatttgggattatttatgataaaagtattttaagatgtgtaaatagtgtaaagattttgaaatggaaaaaagttgg

SEQ ID NO: 411 - DNA, 6139 bp, Artificial Sequence
  chemically treated genomic DNA (Homo sapiens)
ttaatttttttttattttagagtttttgtattatttgtatattttggaatgtttttgttatagatgattttaaatttgattttttttttttatttaggttttagtttatatgttatttgtttagagaaggttttgttaattagtttaaagtgttattttgggtattggaatatattattttatagtatattattgtattttaatttttattttagtagttattattataggatatgtttttttttgtttatttttttaatgtgttgtttgtttattatagaatataagttttgtgaaagtaggttttgggttgttttatttatttttatgtttttagtgttttttaaaaatgtttagttaatgtttatgatataattgagttaatgagattgttttagtatgaattgtgattttttttttttgtttagagatatttaagattttgagaggggaagtgattgttttaaatttaatttaagttttttattttttttttttaggttttttttgtaaaatttggttgatatataaatttagttggggtgaggttttaggtgtgatgaaagtttggagttgttttatgaatgggattgaggttgatgtgggggtgagaaggcggaaggatagagtatgtgaagggagaaaggtaggttggggtaagagagtagggtgtgattttggcgagggtgggggaaagggggtgatttgattatgtgttaggaagtgtttttttttatttttttttggggagagttttgattttaaggtggttttgttttggggaagtaggtggttaggtagttgttgagggagggtaaagttatggtttgggcggtgattatgtattgaggttttaggttcgatatttattatttaaaaggataatttaatagtggtttttagttaaataggtgataggtgagtttttgtttgaaattagtttaattatattataaagttttagatatggtttaggggaaggtaagcgatttagagaagtgagagaaaagaggtttttaaggaaatagagtggttaagtgtttagtgattattattaatagtaataataataatgggttatatttattgagagtttatagtgtgtttggtattatattaattatttttatgtgttttcgtatttattttttaaaaagttttttataaagtagttattattattattgttattattttttttatttgagagacgttaaaattgaggtttagtgaaattaagttttttgtttaaggttatatagtaagtagtaaaggtaggatttaaatttaggtttgtagtgattttagtgtattatggaaatttaggtttaggttattggagtaagttaagagggtagggttagattgatttttgtaaaggtggggatagggagggatagtgggatagattgtgtataaatagtaggtttgtttttatttttatatataggtagaattcggtaagtgttttatttggtataattttagggttttgaaagttaatttagttttgtgttaaataattttttttttagtacgtttttggaaattgaaatatttattgagatatttatttttttgggttaggatagtgattttagaagatttttgtaaaagtatatgggttggaagagaaatatttagtgtttgtgaaatagtaatttaggttagttagttgggttttatgggagggtggtttattttttatgttgaggaaaaaggtggtagttaaaggtaaggaaaagaataaggtttgttttataatttgtgtttttttaattttagaagtttgggaattataatttatagtttaaaaattttaatgttttttgagggaagatgggaggaagttattttagagattaagagagtattaattttttttgtttttgttggattgatattaagtgtttgtaattttaattttggttatttcgggtttatgagaacggttggtatttacgtgtttaatttttaaatgatagatgaattaattattatttgatatttgtcgtgttggtaggttaaaaggtgggtttttgaaatttagagggtgatagggatggagatttttggtatggggtttagatgaagtaagaggttaggttcggaatagaatttagtttagtagttagttataaggttgtagagtgataggcgtttggggaaaggtaggaatcgtttttcgttatttgtcggttagtagttttatttataattaggtcgcggttgtttcggtttggttttaaaaattgtgaacgtcgtttttttttttcgtttagtttttcgtcgcgttcgcggggtcgggggttgcgttgtcggcgtcgcgagtcgggcgagttttttagtacgggaggagggagggggcggcgtcgggcggggcggagttttcgcgttttttggagttttattttcggtcgcgagtcgggtagcgtttattcggtcgaaggagttacgcgggttacgttgttggttggtttgatttaggcgcgcggggtcgggcggtcgcgcgggcgggttgagtgagtaagataagatatttaagaagagcgagttgcgtttgggtttcggttaggtttgtacgtagaggcgggcggtagacggtgttcggcggaattttttgagtttcgtcgtttagttttggtgttagcgtttagtggtcgtcgtttcgaaagtgattggtgtttcgtcgttttttttcggtgcgggattatgaagttgttgtcgtcggtggtgttgaagttttttttggttgtaggtaagagggttgtcgacgttttcggagatcggggggatgggggcgttgtgttgggggtatgggggaaggtcgtcgtagcgtattcggtacgggttatttggtggggtttttgcgttttggcggacgggcgtcggtatcggtgcgtgttggttaggggtttgggcgggtgtttgatgcggtttggtttttcgttcgtagttttttcggtattggtgattggcgagagtttggagcggtttcggagagggttagttgttggaattagtaattcggatttttttattgtatttacggattagttgttatttttaggaggcggtcgggatcggaaagttcgtgatttgtaagaggtagatttggattttttgagaggtgggtgtggaggttttttatttttggattttggtgggttgttgaagaataagtagatttaagatttttgttgtttgggtaatattgtgggttgagggtatttatggagaatttcggggaaaagttgatcggtttgatgggtattgggggattttggaatataggttttatttttttttttttgttattgttttatttgttgggttgttgtttttttgggtatttcggggtaaattgaattagacgtgttgtttggggttgttacgttttttttaggtaagttgggtgataggaataaggaatggttgagatgttttttttagagttattatgtaaaaatgggcgttagttttaatttttatattaaatgattattatatataaaatagaggtaatatatgcggagatgtttaggtatatttttagaaagtgtgtagtgttggttttttttatttatttgtttttagattggggaaatagaggggaatgaggagtttttggtcgttttagatgaggttgtgaatggtgagtattgagtttttagggggttgtattaaaatgttggatatttgtgaatgttatcggaaatttgtagtttattgagtattttgtatttttgaggagattttaaatggggagggttgtgtaggattttttaattagtttttttggttgtggttaagtataggtatagggtagagtttagagtttgttagtttttttgtttttaaatttgaggagattatttagagtagagtaaggatttagtattgtattttggaatgattatatttggttggatagatgtttatttgttttagttttatttgttttttagttgttttttttttttatttttaggagttttttttggatattttttttattttgtataaattaagtatatattttaaaattgagtttgggtttttatattttatttttttttagtggttttttggggttgtttatgatttgaatagtttggatttttttggttttttttttttaggttgggtagggttgggttgtgatttattttatttttattttttatttatacggttgttttttttatttttgtagatttgatttattgttttttgtttatggtaggagtttggttgttattttgtatttttttttttttttttttgattggtttggtttttttgttttgtttttttcgaagttttggttattgggtttttttgattatttgtattattttttgagttttgagggggtttgggattggatgagaggaaatgaaagattgtgggggttgttggtatttattttttttttttttttttggttttgttgggtaaggattattttttaggtttggggattttattatttaaaataaatgattgttattatttattaaatttttattgtgttttaggtatttgatatgttattttggttaatgtaatatttatagtaattttttgagatagttattttggttatttatattttattgagaatttgaggtttagaggagttaagtgattgtttatagtaaatagttgaaattggagtataggtttatggattttagagtttatttatgtttggattagtattttaggtgttttagatttgtgagagggaggagatgggagtgtgtgaggtagtttggtgtggtgaggaaggatattggagtgaagtttagagaatatagttttaattttaattttgtatgattttgagtaagttattttgtttgttatgagtttttttttttttttttttttttttttttaaatatagttttattttgttatttaggttggagtgtaatggtacgattttagtttattgtaatttttgttttttaggtttaagtgatttttttgttttagttttttgagtagttgcgataataggtatatattattacgttcggttaatttttgtattttttgtagagatgagatttttgttatgttggtaaggttggtttcgaattttcgattttaggtgatttatttgttttagttttttaaagtgttgggattataggcgtgagttatcgtgtttggttatatggtattttttgaagtttttttagtttgagattttaagtttttagtttaacgtattatgtttatttttttgtaagatatatggttgtagttatggatgtgggtattttttttttgatgggggataaaagggtgggattgggttgataggtatagtttttggttaattttagttggatatttgggtgaggttgttttttttttagtttttttgaagtatggaaagaaggagggagttattattgttttagttttttttggatagttttttattttttatttttttattttttgtatattttgtattttttaatttagagagttataaataggatattgggggttaaatatgaatgaatttttgagaaagtgggtgagttgtaaagggtatgtaagttaaatattttgtttgaagttgaaaaagtaaggtcgtgattagggttggtttgtttgttgtttttgagttaggttttgttttgggtttatagtattaaggggtgttttagaagagattatttgaatatatggatattgtttttatattaggagttttttaattttagaatttttaagtattttttttagaagtaatttttgtgtgtgatattgtttttttgtaagtggtttattgagtatagtattaggaaatgaggttgattgaaggttaaaatagaatgaagtgggtgtgggggagtaggagatgggggtgtaaggtggatagtggggtggaggtgaggttggtagaattgtttagttatttaataaaagtattttgagaatgaggtttttatatagagattgtgaaatgttttttttgggatttattttagtttttattttttatcgaggttttttttttttggtggttttgtttaatttttttgtttttttttttgttttttaggaggtattgagttaaggggtttttttagatttttgattttaggtggaa

SEQ ID NO: 412 - DNA, 6237 bp, Artificial Sequence
  chemically treated genomic DNA (Homo sapiens)
tttgttatagagtttatatttaaagaatttaatttgtgatagtattaaattaaaagagatttaggaggttgaggtaggattgtttgaattcgggaggcggagattgtagtgagttaagattgtgttattgtacgttagtttgggcgacgagagagaaattttgttttaaaaaaaaaaaaaaaaaaagagagaaaatatattaggtaggggtattttataaaggagagaggatatataataaagtgtttatatatatatgggaagtaaaatagtattgattttggggttagattatttgggtttgaattttgttttttagttttgtgttttagtttttttatttggaaaatggggataataagagtatttatagggttgtaatgaggaagaaatgagataatgtggataaagtagttttatagtgtttattatatgttaattattgttttaagtggttatttaataaatagttgtgaggttaaatttataggtttcgaggggtagttgggttgggattttttttagattttgggtatgggtataggtatagtgtaggttagggtatgttgaagtatgtatgtttatagaaataggtttgagtagggttagtatgggtgacgttataggcgtgtgtttgtgtgggtgttgggttgttttttttagatagcgtagttgtacgtattgttatttatatttacgtatttatatatatgttgagttgggggaagtttatatagattatattttttgtatgttttgttttttttgtattttttttggtggaaggaggtatttgaggtttgggatgttggtttagaagttttaggaggaaatgggttttgttttttgattataggtttggtaacgggttgaaaatttaagtttttgttggtagggattttttgagtttttagaggtttagatttagaggtaaaagtaaaagtaaggaagttttattttgtatgttaggaagtttttaaaaaaatggagaaacggatgtaaaaagtgtattagagtttataggttgtcggagttagtatagtaagtttaatgagggttgtagtatttaagagggtgttttttgtataaaataggattagatagttagagaggggttttatttagttttcgtttgtttttttggttttattattttttgttttttttttagttaggaaattttagttttgtaattttaaatttaataatttttttttggttttagggtttttgtatatgttgttatttttatttggaatgtatttttttttaatttatttttaataatttatttcgttatcgatttattttttttagatttttgttgaggtttgaagagatttcgatttaatgtttttttttttagtttttattataattgtttttatgtaatagagtgtttatttaatgtttgaatttttagagagttggcgttgtgttttttttgtgttttttatgttgttaatgtttaatatagagaagagtagggtttatagaattttaagtttaagttagtttaagttatattttgtgagtatttacgttttgttggattttttgtgtttaaggttagcggtgagtatgtttttttttatttatgttgattaattagatagtttttatgtttattgattattgattattaggatttatttaagttagtggattttttgtgaggtagaaaatttatggagttaggtcgatttgggttttagtttttatttagttatgttatgtggttttggggtaaattgtagaatttttttgaatttttgtttttttattagtaaattgtggattattatttttgattagaagataattatgaggattaggtgtgattataggtgtatatttttagtatagggtttacgttagtttcgtttcgtttacgtaaagatttgttattaggtggtagtttattttagttattttatcgttttttattttatagaggttggttaggataaagggttttaatgttatgttgaattttgagttttttaggggacgtatttgaggaaattaacgttaatatataagtttttattatagtaagataaagttagaagtagtagttttaggttattatttagttgagtgggttgtttgagtatacgtttttataaattttagtttagttttattattttataatttttaggaagtttggttttttttttggtattagttggaagttttgttgggttttttatttttgaaatgtagtaagttgttttgttgtgtttggtagtcgatttattgtttggtttaatatgttagataggttttatcgcgatcgtgggtgtttttaattttggcggtgttgataagggtagatagattgtaggggtgagttttaagaatggttttagaaagataaagagtatgaattatattttataattagaaaaaggttttgtggttggagaatggagagtgaaggattatttgtgagagatgaaattggtgagatgggtaggttatatagaatttgttaggttaagtagggagtgtggattttaggtgtaatgggaatttacggagggttttagtttggatgtaggggattatgatttaattttattttaaagatttaaagtatgataaatttaggtaaaattaaattgatagatttaggtaaaattaaataaggtgagtagtttgggtgataggagatggggtttttagtttgtgggttgagtgataaggttttgatggattggaggtgaggtaaagggaggaattaaagttagttgtaaggtttttgattttttaatttagagaagtttagcgtcgcgttttgagaaagtgaagattgtggaaggaatcgtttggggagggaaggcgagttgtttaagggggggggatgtggaatatgtagtgggatgttggggtttggaacgtaggggagatgtaggtttggagttatcggtgtttgtgttgttgggtaaagttaggggaaaggttaggtcgttttgggatttggtttagtattgagtgtagaggaagagaagtttttgagatcgagaggtagcggttataggaggaggaagaaagtaaggcggggaaaattaaagtttaggagagtatttgtaggagggcgttgcggggtagggtttgagtcggagtttcgaatcggattcgagttttgtcgcgtggggacggagcgtgtagaggtttatgcgagggatagatataaaggttttgggagttgtaggttagattattggatagcgcggtcgcggatttaacgtttttgtaaggggtgtttacgtttggggggaatttttcgaaagagaggattattgaaagttattttggtagtaggggcggaatagatagacgtgggtttggtcgtcgttagaattgtttgcggattagtttcgcgttgtcgggggggcgggatatgtcggttgtttattagtgttcgcgattaattcgtaggtagtttcgttttcgtttttttcgggagagggcgcgcggaggattcgtcgtcgtcggtgtgaggcggttcgttttggtttttttgttcgggaagttcgtttaggtaattgagtttggtcgggtattttcggaggacgcgttatttttttacgtttcgtttcggtcgttgtatgggcggtgttcgggacgcgggggttgcgtttgtgcgggatcgcggggtagcggtcgttcgtgcgagtacgtttgattgacgcgtcggtcgtcgggtttgcggtttgtgggcggggttgtcgtgcgtgatagggtcgttcgtggtcgtcgggttgtgttcggggtcgcgtgagaaagttttgcgggattgagggttgggtgggtcgatcgggaacggcgcgcgttttcgtcgttatcgcgttttcgttttcgtttgcggtttgtttgggggtcgcggggcgtaggcgcggcgggtcgacgggcgggggttttttttacgggtgcgcgggcgtttttgttttcggcgtcgaagcggggtggggttttagggtagtttcgtttcgtcgcgttgaggtttcgtttcgtgttcgtttgtaggagtcgtcgtcgggtttcgttcgtttgtcgttttagttttagttttaattttagtcgtcgtcgttgcgtttgttttcgggcggttttggtttgtgtcgtcgtcgtttttagcgtcggagttatggcgggcgtcgcgtttttttgcgttaacggttgcgggttcggcgcgttttcggacgtcgaggtgttgtatttttgtcgtagtttcgaggtgggtatcgttatgattttgttttattttaagaagtcgtagcgattcgagcggaagattttttaggttaagttggagacgcgttagattacgtggagtcggggcgtcgataagatcgagggggttagtaagtgcgtttattttttgtttgggttcgtttcgcgcgggggtcgtgggagttcggttcgattgtttgtatttcggtcggtcgttttagcgatttgggtaaattttcgggtttttttagatttttttcgggtttcgttttcgtttcgtttcgggtggttattgggggcggggggtattcgggttttcggttatttgataggatatttttttttttttagttggggggagtgttttaggcgttttgttttgaggtttaaaaattttcgcgggttggagatttgcggtgtaggtatcgggttttttagattttgggagtggtggcggcgtcggcgaggggagttaaggtagtggtttttattttgtacgggaatttggggtttgattagacggttttcgtttattttttatttagaaagagtagtttgtgaaatttttcgggtttttaggttgggtttttatttgtaaaggaatttttgggttttttaagtagaatttaggtagatgttgggtagggttggttttggagtagagttgggtttatttatttttttttgggggagagggaggaaggtggttttgtttggtttggagaagtttgagagaagttagtggttggaatttttttttttttttttttgttatttttgttttaaagttgggttttggaggtttatgtgggtgggtagatatttaatgttagggtagggattttttttgttttgggaagtacgtttttaggagatgggttttataaaggtttgttttagcgttttggagttaggtattttttttaggagtgtagttagtttgtgagtttagttttttgttttttgttcggtggttttagggagcgggagcggttttttttagttttttgttttttcgtttttttaggtttgagtttggttgtttttgcgttggtttttagtgggaggagggagttgggggattttgaaaaattttagatttttgagagttgttttatttagcgcgtgtttgtgttgtggtcggatgggtattttgttttgttttttattttttcgttttttagtgtgaagagatggtgtgtttgtaattttagattgggttgttttttgtagggattttcggagattagggttagagagatttaggtttagaattaggtttgtgtgaaggagggagattaggaagtgatattttaagggggggttttataaatttttttgggtatggtgtgtatgtgtgtagatagttgaggagattgggaggaaggaaggttttgtggtgaggtagttaattatttttagttataaattttagatttgatatagatttaatgtagttgtttaatttagaaatggtagtttttttttttagtgtttttattgattttgttagttattgggagaatattttagtgatttgagagtttgtggattttaaagtaaaggaagaatcgatattgtaaagagttgagataattttgggaatattatttaggtattaggttttaggtatggtttttttttttattttttatgttgtgttgagttggtggtattggttggaagtttttagagattttttgggtaatagattgtattttaaattacgtatattagtaggtaataaatgtagtatagtggttgatggtaagtttggatttgaagtttatatatttattgtgtgtttttcggttagttatttattttttttgagttttgatttttttatgtgtaaaatgggggtaataatatatttagtatatatggttgttttaggattaaatgagataatttatataaaatatttagtattgtttgatatataaatgtttaataaatatgagttgttattagtaataatattaataatagatt

SEQ ID NO: 413 - DNA, 6237 bp, Artificial Sequence
  chemically treated genomic DNA (Homo sapiens)
ggtttattgttaatgttattgttaataatagtttatatttattaaatatttatgtgttagataatgttagatgttttatatgaattgttttatttgattttggagtaattatatatattggatatattattatttttattttatatatgaggaaattaaggtttagagaaggtaagtaattggtcgggaaatatataatgaatatatgggttttaaatttagatttgttattaattattgtgttatatttattgtttgttaatatgcgtggtttaaaatgtagtttgttatttaggagatttttgagaatttttagttagtgttattaatttaatatagtatagggagtaaggaaggggattatgtttggagtttgatgtttgagtgatgtttttagggttattttagttttttgtagtgtcgattttttttttattttggaatttataggtttttaagttattaaaatgtttttttaatggttgatagggttagtgggggtattgaggaagggggttgttatttttaagttgagtagttgtattagatttgtgttagatttggagtttgtagttgaggatggttggttgttttattataagattttttttttttttaatttttttaattatttatatatatgtatattatatttaagaaggtttgtgggatttttttttggggtgttattttttgattttttttttttatatagatttggttttgagtttgggtttttttaattttagttttcgggggtttttgtaagaagtaatttagtttagagttgtagatatattatttttttatattgagaggcgggggaatggagggtagagtagagtgtttattcgattatagtataggtacgcgttaagtggaataatttttaaagatttggggttttttaaaattttttaattttttttttttattagagattagcgtaaaagtagttaagtttaggtttgggaaggcgaaaaggtaggaaattaagagaagtcgttttcgttttttgaagttatcggatagaggataaagggttagatttataaattagttgtatttttgagaagaatatttgattttaaggcgttggggtaggtttttatggggtttattttttgggaacgtgttttttagggtaaggggagtttttgttttggtattgagtgtttgtttatttatataggtttttaaaatttagttttgggataaaagtagtagaaaaaaaaaaaaaaaaattttagttattggttttttttaggtttttttaaattaaataagattattttttttttttttttttagagggagatgagtaggtttagttttgttttaagattagttttatttaatatttgtttaagttttatttagggaatttaaagatttttttgtaaataagagtttagtttgggggttcggagagttttatagattgttttttttggataaagagtgggcggggatcgtttggttaggttttaggttttcgtgtagggtgggggttattgttttagtttttttcgtcgacgtcgttattatttttagggtttggggggttcgatgtttgtatcgtaggtttttagttcgcgaggatttttaggttttagggtaaagcgtttggaatattttttttagttgggggagggggggtgttttgttaggtgatcgaggattcggatgtttttcgtttttagtgattattcgagacgaagcgggggcggggttcggagggagtttgggagggttcgaaagtttgtttaagtcgttggggcggtcggtcggggtgtaagtagtcgggtcgggtttttacgattttcgcgcggggcgggtttaggtaggaagtgggcgtatttattggttttttcgattttgtcggcgtttcggttttacgtgatttggcgcgtttttagtttgatttggaaggtttttcgttcgggtcgttgcgattttttggagtagaataaagttatgacggtgtttatttcgaggttgcggtagaggtgtagtatttcggcgttcgagggcgcgtcgggttcgtagtcgttggcgtaaggggacgcggcgttcgttatggtttcgacgttgggggcggcggcggtataggttaggatcgttcgggagtaagcgtaacggcggcggttgaggttggggttgaggttgaggcggtagacgagcgggattcggcggcggtttttgtaggcggatacggggcggggttttagcgcggcggggcggggttgttttgaggttttatttcgtttcggcgtcgggaataaaggcgttcgcgtattcgtggggaggattttcgttcgtcggttcgtcgcgtttgcgtttcgcgatttttagataggtcgtaggcggggacggaggcgcgatggcggcgggagcgcgcgtcgttttcggtcgatttatttagtttttagtttcgtagagtttttttacgcggtttcggatatagttcggcggttacgagcggttttgttacgtacggtagtttcgtttataggtcgtaggttcggcggtcggcgcgttagttaggcgtattcgtacgggcggtcgttatttcgcggtttcgtatagacgtagttttcgcgtttcgaatatcgtttatgtagcgatcgggacgggacgtgaggggatggcgcgtttttcgggaatgttcggttaaatttagttatttgggcgggtttttcggataagggagttaggacgggtcgttttatatcggcggcggcgggtttttcgcgcgttttttttcgggaggggcgggggcggggttgtttgcggattggtcgcgggtattgatggatagtcgatatgtttcgttttttcggtagcgcggggttggttcgtaggtagttttggcgacggttagatttacgtttgtttgtttcgtttttgttgttagggtggtttttagtggttttttttttcggagagttttttttaagcgtgagtattttttataggggcgttaggttcgcggtcgcgttgtttagtggtttgatttgtagtttttagggtttttgtgtttgtttttcgtatgggtttttgtacgtttcgtttttacgcgataggattcgagttcgattcggggtttcgatttagattttatttcgtagcgtttttttgtaaatgtttttttgaattttggtttttttcgttttgttttttttttttttttgtagtcgttgtttttcgattttagaagtttttttttttttgtatttagtgttaggttagattttaaggcgatttgattttttttttggttttgtttaataatataggtatcggtgattttaaatttgtattttttttacgttttaggttttagtattttattgtatgttttatattttttttttttagatagttcgttttttttttttaaacgattttttttatagtttttatttttttagaacgcggcgttaaatttttttaagttggaaggttaaaaattttgtagttaattttgatttttttttttgttttatttttaatttattaagattttgttatttagtttataagttgaaggttttattttttgttatttagattatttattttgtttggttttgtttggatttattagtttggttttgtttggatttattatgttttaaatttttaaaatgaaattaaattatgattttttatatttaggttaaaatttttcgtgaatttttattgtatttaaaatttatattttttgtttggtttagtaggttttatatgatttgtttattttattagttttattttttataagtgattttttattttttattttttagttataaggtttttttttggttatggaatataatttatattttttgtttttttgaagttatttttgaaatttatttttgtaatttatttatttttgttagtatcgttaaaattgaggatatttacggtcgcggtggagtttgtttgatatgttgagttaggtagtgggtcggttgttaggtatagtaggataatttattgtattttagaggtgagaagtttaatagagtttttagttgatgttagagaaagagttaggttttttgggaattgtgagatagtaggattagattagagtttgtaagagcgtgtgtttaggtaatttatttagttggatagtgatttggggttgttgtttttgattttgttttgttgtagtggaaatttgtgtgttaacgttgatttttttaagtgcgttttttaagaagtttagaatttagtatgatattgagattttttgttttagttagtttttgtggagtaaggagcggtggggtagttgagatggattgttatttagtggtaggtttttacgtgggcgggacggagttagcgtagattttgtgttgaaggtgtgtatttgtggttatatttgatttttataattattttttaattaggaatgatggtttataatttattgatgaggaaatagagatttagagaagttttataatttgttttaaagttatataatatgattaggtgggaattagaatttaagtcggtttgattttatgagttttttgttttataggagatttattggtttaggtaagttttggtggttagtagttagtgggtatggaggttatttggttaattagtatgggtgaggggaggtatgtttatcgttggttttgggtatagggaatttagtagaacgtgagtgtttatagagtgtggtttgaattggtttaggtttgaagttttgtggattttgtttttttttgtgttgggtattgataatatgaggagtataagagagatatagcgttagttttttgggagtttagatattaaataaatattttgttatataaagataattatgatgagggttagaaggaaaaatattgggtcgagatttttttagattttagtagaggtttaaaggaagtgagtcgatggcgaggtgaattattaaaggtgggttggagaaaagtatattttaagtagaggtaatagtatgtataaaggttttgaggttaggaagaggttgttgaatttagggttataaagttagagttttttgattgaggaggggatagggagtgatgagattaggaaggtagacgggggttgaatggggtttttttttggttgtttgattttgttttgtataggaggtatttttttaagtgttgtagtttttattgagtttattgtgttgatttcggtagtttgtgggttttgatgtattttttatattcgtttttttatttttttgggagttttttaatatgtagggtaaggtttttttgtttttatttttgtttttgggtttggatttttaggggtttaagaaatttttgttaataagagtttgagtttttagttcgttgttaggtttgtaattagggaataggatttatttttttttgggatttttgggttagtattttaggttttaggtgtttttttttattaaaggaggtgtaggaaaaatagggtatgtagagggtgtggtttgtgtgggttttttttagtttagtatatatatgggtgcgtgggtgtgaatggtaatacgtgtagttgcgttgtttgggaggagtagtttagtatttatataagtatacgtttgtgacgttatttatgttagttttgtttaggtttatttttgtgaatatgtatgttttagtatgttttggtttatattgtatttgtgtttatgtttagagtttggggagagttttagtttaattgtttttcgggatttgtgggtttggttttatagttgtttattaaatgattatttagaatagtggttgatatatagtaaatattatggaattgttttatttatattgttttattttttttttattatagttttataagtgtttttattatttttattttttagatgaaaaaattgaggtatagagttaaaaggtaggatttaaatttaggtagtttggttttagagttagtgttgttttgttttttatgtatgtatgaatattttattgtatatttttttttttttgtaaaatatttttatttgatatgttttttttttttttttttttttttttttgagatagagtttttttttcgtcgtttaggttggcgtgtaatggtataattttggtttattgtaattttcgtttttcgagtttaagtagttttgttttagttttttgagttttttttgatttggtgttgttataggttgggttttttggatgtggattttgtgatagg

SEQ ID NO: 414 - DNA, 6200 bp, Artificial Sequence
  chemically treated genomic DNA (Homo sapiens)
taggtgatttttttattttagttttttaaagtgttgggattaaaggtgtgagttattattatatttggtttttaatttattttttaatgtttattattttattttgatattaaaaattatgtatgtttaatatgaataaggatatatttttatatatatatgtatatatttatatttatgtttttatattaaaaagtatgggggaaagaaatggggagatgtaggttaaagaatataaagtagtagatatgtaggatgaagaagtttagagatttaatgtataatatgaagattatagttaataatattgtattttatttgcgttttttgttaaataagtagattttagttgttcgttatattttatataagtttttatgtgacggtatagatatgttaatttattttattatagtaattattttattatttatatatattttataatattatgttataaattttaaatatatataataaaatttatttttatttatttaatttatttatttatttttgagacggagttttgttttgtcgtttaggttggagtgtagtggcgcgatttcggtttattgtaagttttatttttcgggtttatattatttttttgttttagttttttgagtagttgggattataggtatttattattacgttcggttaattttttgtattttttagtagagatggggttttatcgtgttagttaggatggtttcgattttttgatttcgtgatttgtttattttagttttttaaagtgttgggattataggtatgagttatcgcgttcggtttattttatttatttttgagatagagttttgttttgttgtttaggttggagtgtagtggtgtaatttcggtttattgtaaattttgtttttttggtttaggtaattattttgttttagttttttgagtagttgggattataggtgtttattattatgtttggttaatttttgtaatttagtagagacggggttttattatgttggttaggttgattttgaagttttgattttaagtgattttttagttttggttttataaagtgttgggattataggtggtagtcgttattgtatttatttagaataatttattttttaaaaaattatgagtttaggtcgggcgtagtggtttacgtttgtaaatttagtattttgggaggtcgaggtgggcggattatttgaggttaggagtttgagattagtttggttaatatggtgaaattttgtttttattaaaaatataaaattagttaggtatggtggtgtatgtttgtaattttagttatttgggaggttgaggtaggagaattatttgagtttgggaggtggaggttgtaatgagttaaggttgcgttattgtatttaagtttgggtaaaaagagtaaaacgttatttaaaaataaaaataaaataaaataaaaatatttttttaaaaaataaaataaaataatgagtttatattgatatttttaattttaatataatagcgtaaggtattttttttttttatatttttaacgttattttattatagtgagaaagttggttttgttatgtttaatatatttagtgatttaattaattattttgaatgtaattaattttttatttaagtttttaggttttttttatttggatgttttgttttttttttttgggttttacggttaagattttgtgtaggattgttttttaggtgtttaagttttttttatttttttaggttttttagtttttttatttgttaggttattaatatttggttgtggataattaggtgtagatgttttttttgttttgtatacgttttttttgttttgtatatttaatgtttttgatatttagtattttaggatgggaaaggggaagaggaatattgaatgtgtatttttaaatgggtattgtgttttttattaagttttttatttatattttatttttttagtaatttatagaattggaatttttggattaaagttttttttttttttgagacggggttttattttgtcgtttaggttggagtgtagtggtgtgattttggattattgtaattttcgtttttcgagtttaagtaattttttgttttagttttttaagtagttgggattataggtattcgttattacgtttagttaattttttgtatttttagtagagatgggttttattattttggttaggttggttttgaatttttgatttcgtgatttattcgtttcggttttttaaagttttggaattataggcgtgagttatcgcgtttggtttggatgaaagtttttttaaagggagttttgttttgtagttttggttggtgtgtagtggtgtgattatagtttattgtagttttaaatttttgggtttaagtgattttttagttttagtttttttagtagtttggacgatagttgtatataattatgtttagttaatagagacgggggatttattatgttgtttaggttagtttcgaatttttgggtttaagtgatttttttgtttgggttttttaaaattgggattataggcgtgagttatcgtttttggttcgaaagagtgtttttaaggttttaaaaaaatattgttaatatggtgaaaattcgtttttataaaaatataaaaaggattcgggtatgacggcgagtgtttgtaattttagttatttaggagattgaggtaggagaatcgtttgaacgtgggaggtagaggtggtagttagcggagatcgcgttattatattttaggttgggtaattgagggagatatcgttttaaaaaaaaaaaagtttttaagtttaaaaaaaaaaaaattattaatttgtttttaaaaattgtcgtaataatttataattttattagtattgagtatttatttttttgtattttttttagtagtattattattaaataaataaaatttatatgcgttagtttgttgggtttaaaggagtttttcgataagttttttattttttacgttgttttttttttggatataggaaggggtttttttttttatttattttgttattttattttcgttaatacggttcggtttggggataggggtcgggggtaggtcggttatcgtagaggtggaggtcgcgcggtatttggtttggagagtttattatatagcgatatagatttttttttagttgggtttatttgtttgtttcggggcgatagagggcgttacggcgttcgcgacggatttcgtttttaggtagtgcgtcgcgttttcgtgacgtattttcgcgttatttgtcgtcgaggtttgtttttattggttgtttgcgaggtaataggggcggagtcgagtgggagtgtggaaagcgtcgtatttcgggtgggaggcgaggttttttttttttcgtttttttttcggtttttagttttttttagggtcgtttcgtagagcggttaggagtacggcggcggcggtatttttttcggtaggagttggagttgggttttggtgcgcgcgcggttgtgtcgttcgagtcggagggattggttggttgagagagagagaggaagggaatttcgggttgtcgaatcgtacgtttagttcgtttcgtttttgtagggtagtttttcggttttttgcgcgcgaagtcgagtttcgggcgggtggggcgggggtttattgagatcgttatcggtttttcggcgttgacgggatcgcgcggggcgtattcgttgaaggtagtttcggggttcgcggttcggatttggttttgcgtagcgggcgcggggtagcgtagcgggaggaagcgagaggtgttgtttttttttcggagttggaagcgcgttattcgggtttaaaatgtttaagaagaagtcgacgtttatttagttgaattcggttttcgacggttttgtagttaacgggattagttttgcggagtaagtatggggcgggcggtgaatttcggggttcggttggggaggttcgagtcggggagtaggagcgcgcgttaggtttcgatttggtttgttacgtacgtttggggttggtagggggcgagaaattttcggtcgtcgaggtatcggtgattaagtattgattgtgtttttgatttagattagttagcggatttcgcgggtttttatttttttttgtattttttttttcgatcgttttagtggtttttggttattgtatagtttttttttaagaaaataaaagttagtacgttttttttgtttttttttagttttgttttaaatgtgattatttgggagtttggtttgtaacggggagaggaggttaatgttttggaaagaattaagatcgtatttgtgtttttgagattagtttagggtattaagtgtggagtattatttttatttttatgtttgatatttgtggggtttgagtgttttgttgtaggttaattgtttggttagcgggggcgtgttggaagttcgtgtggatttcgtggtttttttttgttgattttggaggtttttggtatttggtttttttgggaaattgtttaagaaagcggtttttttttttattttattttttatttatttattgaataaattatttttttattaatgattttttagtttttcgtattttattaggagtttttaaatttttgatttgaggtatgaatattatgatttagaaattatatgttaggtgttttatttttgtagtttttagcgttgtttataaacgagtattttattttattaaataattatgagtttgttttttgggggtttttgagtttttataatttttttgggttttaggtaagggataagattatgtgagggaaagttgtttagttagttagagaaatagttagaaaagattaggttattattatttttttgtttttttttggttgttgtttgtttaatttttaataaggattgggtttttaattttttatttgtatattgtagattttaggaagttaattgatgaaattagaataggtttggattttatgttttttggtgatttttgtaatttttttttttttttttagatttttagaaaattttattttttaaatttttatatagatggggttttgttatattgtttaggttggttttgaatttttggattttagcgatttttttaaagtgttgggattataggtatgagttattatgtttagttaattttttttagattttaataattcggggatttgttggtttgatgatttgttttatttttgtaatgattataaggtcgatggtggatttgtggtgtgtgtttagttgtgttttttagatttgtttttaatagatttttttttttagtttttttttaattttgtggggtttattttgtataatattgatttgtataggtagttggattgtattattgtattgtaaatatttgttttttttttttttttttttttgagtcggagttttatttttgttgtttaggttggagtgtaatggtgcgattttggttaattgtagtttttgtttttcgggtttaagcgatttttttgttttagtttttcgagtagttgggattataggtatgcgttattatgttcggttaattttgtatttttagtagagatggggtttttttaagttgtttaggttggtggtaaattttcgtttttaggtgatttatttgtttcggttttcgaaaatgttgggattataggtatgagttatcgtgtttagtttatttgtttagttttagtatatagtgttttatttttttaaaatagattgaaagttatgattgttgttaggataagttttgattatagtggattttggttgagtgttatggttttattatttttttttatttgatttggaagtggatattgagtagaagtatttgttattattttgttgtaatcgtgatattataattgtatttttttaaggaggaggaattttattaaaatagtaaaagtaggatgagaagaaattattttagatttggtggtagaaaaatttggatggtattgggagagtttaaatagtggttaaaaggtaagggttttggagttaggttaagtttgaagtttagttttgttgtggttttttttttttttttttttttttgatagtttcgttttgttgtttaggttagagtgtagtggtgcgatttcggtttattataatttttatttttcggttttaagcgatttttttgttttagttt

SEQ ID NO: 415 - DNA, 6200 bp, Artificial Sequence
  chemically treated genomic DNA (Homo sapiens)
aggttgaggtaggagaatcgtttgaagtcgggaggtggaggttgtggtgagtcgagatcgtattattgtattttggtttgggtaatagagcgagattgttaaaaaaaaaaaaaaaaaaaaaaaattataatagagttaggttttaaatttagtttgattttagagtttttattttttaattattgtttagatttttttagtattatttaaatttttttgttattaaatttggggtagtttttttttattttgtttttattgttttaatgaaattttttttttttgagagaatatagttgtggtattacgattataatagaatgataataggtatttttatttagtatttatttttaaattaaataggaaaggataatgaggttataatatttagttagaatttattgtggttaaaatttgttttaataatagttatgatttttagtttattttaagagggtgaaatattgtatattaaaattgaataaatgggttgggtacggtggtttatgtttgtaattttagtattttcggaggtcgaggtaggtggattatttgaggacgggagtttgttattagtttgaataatttggagaaattttatttttattaaaaatataaaattagtcgggtatggtggcgtatgtttgtaattttagttattcgggaggttgaggtaggagagtcgtttgaattcgggaggtagaggttgtagttagttaagatcgtattattgtattttagtttgggtaataagagtgaaatttcgatttaaaaaaaaaaaaaaaaaaagaataaatgtttgtaatgtaataatgtaatttaattatttatataagttagtattatgtaaaatagattttataggattgagaggggattaaagaagagagtttgttgggagtaggtttgaaaaatatagttgaatatatattataggtttattatcgattttgtgattattatagggatggaataagttattaagttaataggttttcgggttattaaaatttagagaaagttggttgggtatagtggtttatgtttgtaattttagtattttgggaggatcgttagagtttaggagtttaagattagtttaagtaatatagtaagattttatttgtataaaagtttaaaaaataaaattttttaaaaatttagagaaaggaagggaggttatagaaattattaaagagtataaggtttaagtttattttgattttattaattagttttttaaagtttgtagtgtgtaggtaaaagattaagaatttaatttttattgaaggttgggtaaataataattaaaaaaaggtaaaaaaataataataatttaattttttttggttatttttttagttagttaagtagtttttttttatatagttttgttttttatttagaatttaagagagttgtgggagtttagaaatttttaggaaatagatttatgattatttaatgaaataaagtgttcgtttgtaagtaacgttggaagttgtagagatggagtatttagtatgtggtttttaggttatggtgtttatgttttaggttaggagtttaggggtttttggtgaagtacggaaagttaggaaattattagtgagaaaatggtttgtttaatgaatgaatgaagagtaggatgaagaagaaagtcgtttttttgagtaattttttaggaaggttaagtattaggaatttttaaagttagtaaggaaaagttacgaagtttatacggatttttagtacgttttcgttggttaggtagttggtttgtaataaggtatttaggttttataggtgttaggtatgaaggtgaggatgatgttttatatttaatattttgagttggttttaaaagtatagatgcgattttaattttttttaaaatattagtttttttttttcgttataggttagatttttagatgattatatttagaatagaattgggaggaggtaggggagacgtgttagtttttatttttttgggagaagattgtatagtggttaggaattattaaaacggtcgggaaaaggggtatagagaggaatggagattcgcgggattcgttaattggtttgagttaggaatataattagtgtttagttatcgatatttcggcggtcgggagtttttcgttttttgttagttttagacgtacgtgataaattagatcggagtttggcgcgcgtttttgtttttcggttcgggtttttttagtcgggtttcgaggtttatcgttcgttttatatttatttcgtagagttggtttcgttaattgtagagtcgtcgggggtcgggtttagttggatgggcgtcggtttttttttgggtattttggattcgggtaacgcgtttttaatttcggggggagggtagtatttttcgttttttttcgttgcgttgtttcgcgttcgttgcgtaggattaagttcgggtcgcgggtttcggggttgtttttagcgggtgcgtttcgcgcggtttcgttagcgtcgaggggtcggtagcggttttagtggattttcgttttattcgttcgggattcggtttcgcgcgtagagagtcgaaaggttgttttgtaggagcggagcgggttgaacgtgcggttcggtagttcgggatttttttttttttttttttttaattaattagttttttcggttcgggcggtatagtcgcgcgcgtattagagtttagttttagtttttgtcggggaaagtgtcgtcgtcgtcgtgtttttagtcgttttgcgaagcggttttgggagggattggaggtcgggggaggggcggggaaggggaagtttcgttttttattcgggatgcggcgttttttatatttttattcggtttcgtttttattgtttcgtagataattaatgggggtaagtttcggcggtagatgacgcggaaatacgttacgggagcgcggcgtattgtttgggggcggggttcgtcgcggacgtcgtggcgttttttgtcgtttcgaggtaagtaggtggatttagttgagaagaagtttgtgtcgttgtgtggtgagttttttaggttaggtgtcgcgcggtttttatttttgcggtaatcggtttgttttcgatttttgtttttaagtcgagtcgtgttgacgaaaatgaaataataaaataaataaggaaaaggatttttttttgtgtttagaggagaggtagcgtggggaataggaaatttgtcgagaggtttttttgagtttaataaattgacgtatataaattttgtttgtttaatggtaatattattgagaagggtgtaaggaaatggatatttagtgttgatgagattgtaaattgttgcgatagtttttgagagtagattgatgatttttttttttttagatttgggaatttttttttttttaagacggtgttttttttagttgtttagtttggagtgtagtggcgcgattttcgttaattattatttttgttttttacgtttaagcgatttttttgttttagttttttgagtagttgggattataggtattcgtcgttatgttcggattttttttgtatttttgtagaaacgggtttttattatgttggtaatatttttttaaagttttaaaaatattttttcgggttaggagcggtggtttacgtttgtaattttaattttgggaggtttaggtaagaggattatttgagtttaggagttcgagattagtttgggtaatatagtgagtttttcgtttttattagttgggtatggttgtgtgtagttgtcgtttaagttattgaggaggttgaggttggaggattatttgagtttaggagtttgaggttgtagtgagttatgattatattattgtatattagttagggttatagagtaagattttttttaaaaaaatttttatttaggttaggcgcggtggtttacgtttgtaattttagaattttgggaggtcgagacgggtggattacgaggttaggagtttaagattagtttggttaagatggtgaaatttatttttattaaaaatataaaaaattagttgggcgtggtggcgggtgtttgtaattttaattatttggggggttgaggtagagaattgtttgaattcgggaggcggaggttgtagtgatttaagattatattattgtattttagtttgggcgatagagtgagatttcgttttaaaaaaaaaaagaattttaatttaaaaattttaattttgtgaattattaaagaaataagatgtgaataaagagtttaataagaggtataatatttatttaaaagtgtatatttagtgttttttttttttttttttattttaaaatattaagtgttaaagatattaggtgtatagaataaaggaaacgtgtatagaataaaggaaatatttatatttggttatttatagttaggtgttggtgatttagtaggtaaggaggttgaggaatttgagaaaatgaagagggtttgaatatttgggaggtagttttatataaagttttagtcgtagggtttaagaggggagaataaggtatttaagtggggaaggtttagaagtttagatgggaggttagttgtatttaggatggttgattaagttattaaatatattaagtatgatagagttagtttttttattgtggtagaatgacgttagaagtatgggaagggagaatattttacgttattgtattggaattggaggtattagtgtgaatttattgttttgttttgttttttgggggggtgtttttgttttgttttgtttttgtttttgagtggcgttttgttttttttgtttaggtttgagtgtaatggcgtaattttggtttattgtaatttttattttttaagtttaagtgatttttttgttttagttttttaagtagttgggattataggtatgtattattatgtttggttaattttgtatttttagtagagataggattttattatgttggttaggttggttttaaatttttgattttaggtgattcgtttatttcggttttttaaagtgttgggtttataggcgtgagttattgcgttcggtttgaatttatagttttttaaaaaataaattattttgggtggatgtagtggcggttattatttgtaattttagtattttgtgaggttaaagttggaagattatttgaggttaggattttaagattagtttggttaatatggtgaaatttcgtttttattaaattataaaaattagttaggtatggtggtgggtatttgtaattttagttatttaggaggttgaggtaggataattgtttgaattagggaggtagagtttgtagtgagtcgagattgtattattgtattttagtttgggtaatagagtaagattttgttttaaaaataaataaaataggtcgggcgcggtggtttatgtttgtaattttagtattttgggaggttgaggtgggtagattacgaggttaggaaatcgagattattttggttaatacggtgaaattttatttttattaaaaaatataaaaaattagtcgggcgtggtggtgggtgtttgtagttttagttatttaggaggttgaggtaggagaatggtgtgaattcgggaggtggagtttgtagtgagtcgagatcgcgttattgtattttagtttgggcgatagaataagatttcgttttaaaaataaataaataaattaaataaataaaaataaattttattgtgtatatttgaggtttgtaatatgatgttatgggatatatatagatagtaaaatggttattatagtgaagtgaattaatatatttatatcgttatataaaggtttgtgtaaagtatgacgagtagttaaaatttatttatttaataaaaaacgtaaataaaatataatgttattaattatggtttttatgttgtatattagatttttagatttttttattttatatatttgttgttttatattttttgatttatatttttttattttttttttttatattttttaatatagaggtatagatgtaaatgtatgtatgtgtgtgtagaagtgtgtttttatttatgttaaatatgtataatttttagtattagagtaaaataataaatattaaaaagtgaattgaaggttaggtgtggtggtggtttatatttttaattttagtattttgggaggttgaggtgggaggattatttg

SEQ ID NO: 416 - DNA, 6198 bp, Artificial Sequence
  chemically treated genomic DNA (Homo sapiens)
gtttttaggtttaatggaaaagttatttattttttatatgttgttatagtaatagtaataagaagtattatttatttttataagaaaagttttttttgtaggggatattgagtatttatagaaagattattttattttgaggaatttaaaatttggaaaagtaaatatggaaaatttagtttttaaggtttttatatatagttttatagtttatgttttaagtgaatattttttaattatggttgtttaatacggaaaatatgtgttttaggaaaatttttattgtttattttgaaagatattacgtttaggtaatagagaaaagaaacgtttttttttagttttcgtattggttttttagttttgatttaaatagggaaggtgatttatttcgtttttgtttatttttaatgttattttattttttatgatattattttttaggtttatattcggtttttatttacgggagttgttataaaaataataaagtttatttttggattataaaatttatttttgtattataagattagttgtattttgtgtgtagtttttatttttttttataaatagtttttatatttattattttatttgagttttataatagtttgtgaggtgggtatagttttattatttttattttatagatgataaaattggaatttagtgttaatttttataaataattgatcgttgaatattaaaggagatataaaaaatttgtataaaaaattaaataattaaataattaaaattaaaaaagattaaattaaaaagaattaaagaatttatgatgtttaaaagaatttttagggtcgggtacggtggtttacgtttgtaattttagttttttgggaggttgaggtgggtggattacgcggttaggagatgtagattattttggttaatacggtgaaatttcgtttttattaaaaatatatttaaaaaattagtcgggcgtggtggcgggcgtttgtagttttagttaatcgggaggttgaggtagaatggcgtgaattcgggaggcggagtttgtagtgagtcgagatcgcgttattgtattttagtttgggagatagagcgagatttcgttttaaaaaataaaaaattaaaaaaataaaagaaaataaaataaaaaaattttttagatttgtttgaatttgttattggttaaattatatttattagaaattatttaggtaggtttttaggttgggtgatatttttcgaaggaatggtaaagagtatggagatgagataaacgaaaatttataaatttttttagttatataatttatataatttgtaatgatgtttggaattttatggggtttaaagtaataataataatgatgatgatgataagattaagattttattatatattaggtatttttttgtatatattaaatatatttaataattttattaatatttttattttgtaggtgagaaaaataaggtatagaaaagttaagtaatttgtttaagattatatattttgtttcgtgaatatagaggaggaaatgtaattggaaatgttaagttttcgtgcggtttgtttgttagtgatggaaatttgatatgggagggtagttattataggaatttgggttatgtttttagtgttgttatttgggtaatagtttttatatttttttattgaaaatattaattaatgtttaggttttaagtaattaaatattaatcgagatttttaatagttagtttttttttagattagttttacggaggttttttagatttcgggtagcgatggaatattggttgatttttttggaattgtttttaattatttaagaaaaattagaggggaaagtagttttgaaggaaatgtgtaaagtaaagttatatgtgggaggtagtagttttagtaaacgtatagaatttatagttgtgattttttttttaaagatatataaataaaaaggagtttttattggtgtaaattatttttgttttttttttttttttattttttttaattgtttatattttggaattgtgtgagtaagtttttatatattgattaattttttaaagtttatatattatttttttaaagaaggaaataaagattaagttgaaaagaatatttaggtaaaagagaaaaattatatgatgaatgaatgtagtttttgtgggcgagaattttgggatgggagtgtggggtgtagggatagtttttaaatatttatttaaatgtgtttatttttattattttttgtttttaatttttatcgaataattattttgagattttaggaatttaataggaaatttaatttaataataagttttagggtattttatataatttttttttaaggtaaagttttaaaagagagatgggattataatgattataagttaggtgattttttatatttatattttttttacgtttttcgataattttggtttagttatttattgtggattttgtgtgttttatttttttttgttatataatgagaataatattaatattttttttattcggttggtgtgaaaattgtatgaataaatgtaaagtatttggattgtgtttgatatagagtaaaatgttcgaatagtattagttgttattattattattatttattattattatttgtaaaaatattataagggataattatatttaggaagttttttttgtattggtaatgttttattgttttttttaaaatttaaattagagtaatagttaatatatgtatataaaaaaggtaattttttaaaaatgtgggggaaaagttttttatatttatgttatttgttggtgagttttaggtaagggtgtagttgggagtattcggttttaagattgttttgtattttttttataggatgtttttttttttgttgcggtttttaattagcgtttttagggtaggtttgtaggcggggtcgcgaattttttgtagttgtatacggagttgggtgaggttgcggttttgggtatttttggggaggagttttatggttttttatagattttaattattttgtagcgagtcgtatgttatacgggttaaattcggggtatatcgaacgaataatttattttacggaagattagtaataattaggatatttgcgttattgattagttattttaatattagagagatttattagtataaggggtaagaattggttaggaggcgcgcggcgttgcgtttttatcgcgtttagatagatttttgaattttatcgttaaaaaacgtatcgtttcgtagattcgattcgggagaggggtttaatttttttttattttttttattttttttttatttttaaggatatatttaaaggaaattggtaatattcggtttagggtttcgtttttgttttcggcggatatcgaaattattttttttagggaagttaattaaaggaattattaattcgtttaaaaatttaaaatttatttttaaagtttaagagttttgaaaagagatcgagggcgtttttgtcgattttgaatatttttgttcgtcgttggggtttagaggtgggtagggggtgttaaaggggcgtaggtaagattcggttagagggttagacgtcggttttcgtttcgaggcggtttagtttatacgttagcgacgtcggttgagtcgggtttggaggtagttaggtaagtaggtaggtgtaggtatgtgtttgagtagatatatagttgcggcggattaaagtttaagttcgtttatatttcgttttttttttttaggtgtttttacgtacggtttaggtagttattttttcggggaagtttcggcgttcgatcggatagttttttttttgttatttttaatgattttttttgttttttaggcgttaatttattgagattattcgtttttttttatttttttaggcgggcgtagaaattttcggaaaggggaattcggcggggatcgggggaagtagggtgtcgcgcggcgtagggggcgtcgtagtcggcgtacgtatttagagcgaatagggcgagttgtttagtcgaggggattattttacgggcgggcgggtagtaggttttttagttttttgttttatttgcggtgttcgagtggcggagcggcgtcgcggtgcgggggaaaaagacgtagattaggtagggtttgttttcggcgcgggagggcggagggaggatcgagcgtttttttgttggtattcgtttcgtagcgttgttcgtcgggcggaaataggaaggcggttatcgttattttttcgttattcggcgatcggggtatagttgatttttttttttcgtttcgatgggggtgtttttttgagggtatagagggtgggggtttggggtaaggggcggggacgttgagcgtatcgagtagggcgcgggttgttgggcggggcgatttgggattttagagtttggcggcgcgagtcgggtattcgggtcgacgaaaaggtaggaagcgtttgattttagatattattttcgattgttagcgtcgtgcggtagcggattttagcgtgcggggtcggcgtcggtcgcgtagtcggattgttttgggtcgtagtggcggtttttaggttttaggcggcggagcggagtcgttcgggtattcgttatttatatcgaggggtcgtttttggggtatttttggggcggggaaggttggaggttggggacgtagttaggaaagggatttgtgagtttcgtcggtcgtttgttaagatttggtttaaggaaagtggttttttgaattaatgaagaatttgttaaattaggttttttatttgtgttatagtttttattaattttggtaacgtttgtcgttttattttttaggtaggttatatcgttaagattagttttcgtatttttggtttgggattgataaaaaatgggtttttgtgacgaatttggttatatggtattattagttgaggttaaaagtttgttagtttgttattaagtgtatttcgaaagaggggtgtgtgggttcgagttatttgggtggtttttttaggatttgtggttttgaggtggtttttggtgttggaatttggggaggtggaggggatagagggaagatattttgggcgaagagtggaagatttataggtttttcggtgatttttatggggatagtatattcgggagatttatgttttttaggtattcggagtttacggattgattttttttttttgttttttttggtttacgtgtttcgggtagatttattttttttgaaggtgggggtgggggttgttgggtttggggaattttttgttgtttatttggggaggtttaggtttttacggttgatttttgtttagtttgttttatgtaagtagagtaatttagttttaagaaggaagtattaggttattggttttaatatttgggtaggaagtattagtgtaaattattttttttaatagatttgtcggagtatattttgtttttttagggtaaattttttttttggtttattttatgtatgtataaggtatatatgtattttttttagtaggttgtttttgatttttattttttttaggttgattttgatttgttttggtggtttttttgttttttttttaaattagtttgttttggttatagaaggggaggaattaggggtttttttattttttttttgttttttaggattagagaaggatttgattttttgttttttattggaatacgtaaattaagtttattgtggttgagggatggttgtttagtcggttgagggttatgtttagtagtttttgtttatttgttttttatttttaaagttagaggtggagggaagtagtagaattaagttaattttttttatgattggaaaatattttaaattaagaggtaatttgtaggttaggtatggtggtttatatttgtaatattattattttgggaggttgaggtgggtggattgtttgagtttaggagttcgagattagtttgggtaatatggtaaaattttttatttttattaaatatataaaaaattagttagatatggtggcgtgcgtttgtagttttagttatttgggaggttgaggtacgagaattatttgaatttgggaggtagaggttgtagtgagttaagattgtgttattgtattttagtttggatgatagaataagattttgttttaaaaaaaaaaaaaaaagaaaaa

SEQ ID NO: 417 - DNA, 6198 bp, Artificial Sequence
  chemically treated genomic DNA (Homo sapiens)
ttttttttttttttttttttttgagatagagttttgttttgttatttaggttggagtgtagtggtataattttggtttattgtaatttttgttttttaggtttaagtgattttcgtgttttagttttttaagtagttgggattatagacgtacgttattatgtttggttaattttttgtatgtttagtagaaatggggggttttattatgttgtttaggttggtttcgaatttttgagtttaagtaatttatttattttagttttttaaagtgatggtattataggtgtgagttattatgtttggtttgtaagttattttttgatttaaaatattttttaattatgaaggaaattgatttgattttgttatttttttttatttttgattttgggggtaggggatagataagtagaaattgttgaatatgatttttagtcggttgggtagttattttttagttatagtgagtttgatttgcgtgttttagtaggaagtaaggagttaggtttttttttagttttggggaataggagaagggtgggggaatttttgatttttttttttttgtagttaaagtagattagtttagggaggagatagggaaattattagagtaggttaagattaatttgaaggaagtgggagttagggataatttattaaaggaagtgtatgtgtgttttgtatatgtatggggtggattaaggaaaagatttattttaaaagaataaagtatgtttcgataaatttattgaaaggaatgatttatattggtgttttttgtttaaatgttgagattaatggtttggtgttttttttttgaaattaggttgttttatttatatgaaataaattgggtagaggttaatcgtgagagtttgagtttttttaagtaaatagtaaaagattttttaggtttaatagtttttatttttatttttaaggaaagtggatttattcggagtacgtaggttagaggaggtaggagaagagggttagttcgtgagtttcgggtatttggagaatatgaatttttcgggtgtattgtttttatgagggttatcgaggaatttatggattttttatttttcgtttagaatgttttttttttattttttttatttttttaaattttagtattaggggttattttagagttataaattttgaaaggattatttaggtgattcgggtttatatatttttttttcggggtatatttggtggtaggttagtaggtttttggttttagttggtggtgttatataattagattcgttatagagatttattttttattagttttaggttagaagtacgaagattgattttaacgatgtggtttgtttgggaggtaaggcggtaggcgttgttagaattgatgggaattgtggtataggtgggaaatttggtttaataaattttttattgatttaggggattattttttttgagttaagttttggtaagcggtcggcgaaatttataggttttttttttggttgcgtttttagtttttagtttttttcgttttagagatgttttaggagcggtttttcggtgtaggtaacgggtgttcgggcggtttcgtttcgtcgtttagagtttggaagtcgttattgcggtttaggataattcggttacgcggtcggcgtcgatttcgtacgttggagttcgttgtcgtacggcgttggtagtcgggggtggtgtttgaagttaggcgttttttgttttttcgtcggttcgggtgttcggttcgcgtcgttaggttttgggattttaggtcgtttcgtttagtagttcgcgttttgttcggtgcgtttagcgttttcgttttttattttaaatttttattttttgtgtttttaggggggtatttttatcggggcgggaggggggggttagttgtgtttcggtcgtcgagtggcgaggaggtgacggtagtcgtttttttattttcgttcggcgggtagcgttgcggggcgagtgttagtagagaggcgttcggtttttttttcgttttttcgcgtcgggggtaggttttgtttagtttgcgtttttttttttcgtatcgcggcgtcgtttcgttattcgggtatcgtaggtagggtaggaggttggagagtttgttgttcgttcgttcgtaaaatggttttttcggttggatagttcgttttgttcgttttgggtacgtacgtcggttgcggcgttttttgcgtcgcgcgatattttgtttttttcggttttcgtcgagttttttttttcgggggtttttgcgttcgtttgggagagtggagagaagcgagtagttttaatgggttggcgtttgggaggtaaggggagttattaagaatgataaagaggggattgttcggtcgagcgtcgaggttttttcgggaaagtggttgtttgggtcgtgcgtgagaatatttgggaaggggaagcggagtgtgaacgggtttgaattttaattcgtcgtagttgtgtgtttgtttagatatatgtttatatttatttgtttatttggttgtttttaagttcggtttagtcggcgtcgttggcgtgtagattgggtcgtttcggaacgggggtcggcgtttaattttttggtcgggttttgtttgcgtttttttggtattttttgtttatttttaagttttagcgacgagtagagatgtttaagatcggtagaggcgttttcgatttttttttagagtttttgagttttgggggtaggttttggatttttgggcggattaatggtttttttaattaatttttttgggagaagtggtttcggtgttcgtcgagggtaggagcgaaattttagatcgagtgttgttagttttttttgagtatgtttttggaaatgaaggagggatgggaaaggtgaggggaagttaaatttttttttcgggtcgggtttgcggagcggtgcgttttttggcggtgaagtttaagggtttgtttggacgcggtgagggcgtagcgtcgcgcgttttttggttaatttttgttttttgtgttggtgggtttttttggtgttgagatagttgattaatagcgtaggtgttttggttattgttagtttttcgtgaagtgaattgttcgttcgatatgtttcgagtttaattcgtatagtatgcggttcgttgtagggtggttagagtttgtggaaagttatggaatttttttttagaaatgtttagagtcgtagttttatttagtttcgtgtataattatagggggttcgcggtttcgtttgtaagtttgttttagaaacgttgattaaaaatcgtagtagaaggggaggtattttgtaagagaaatataaggtagttttggaatcggatgtttttagttatatttttatttgaaatttattagtaggtaatatgggtatgggaggttttttttttatatttttgaagaattgttttttttgtgtgtatgtattgattgttgttttgatttaaattttagaaaaagtaataaaatattattaatataagggaagttttttggatataattattttttgtaatgtttttgtaaataatagtagtaagtagtagtagtaataatagttgatgttattcgagtattttattttgtgttagatatagtttaagtgttttatatttatttatgtagtttttatattaatcggataaagaaggtgttaatattatttttattatatagtagaggaaagtaaagtatatagggtttatagtaagtaattggattaggattgtcgaagaacgtggaaggaatgtgaatatgaaaagttatttaatttgtggttattatagttttattttttttttgggattttgttttaaagagagattatgtggaatattttggaatttgttgttaaattgagttttttattgaatttttgggattttaaggtggttattcggtaaaaattagaggtaggaaatgatgaagataagtatatttgagtaagtgtttgaaagttgtttttatattttatatttttattttagaattttcgtttataaagattgtatttatttattatgtaattttttttttttgtttgaatgttttttttagtttgatttttgtttttttttttaagaaaatgatgtataaattttaaaagattgattaatatgtaaaaatttgtttatatagttttaaaatgtgagtagttgaaaaaagtggagaaaaaaaaaaggtaggagtaatttatattagtgaggatttttttttatttatatgtttttaaaagaaaaattatagttgtgagttttgtgcgtttattagaattgttgttttttatatatagttttattttgtatattttttttaaagttgtttttttttttgattttttttaaatagttgaaggtagttttaggagaattaattagtgttttatcgttattcgagatttaggaaattttcgtggggttagtttgagaaggaattggttgttaggagtttcggttaatgtttgattatttggaatttgagtattgattaatgtttttagtaagagaatgtgaagattgttgtttaaatggtaatattggaaatataatttaggtttttgtggtggttgtttttttatgttaggtttttattattggtaggtagatcgtacgggggtttggtatttttagttatatttttttttttgtgtttacggagtaagatgtgtgattttgggtaagttatttagtttttttatgttttgttttttttatttgtaaaatggggatattaatagggttgttgaatatatttaatgtatgtagaagggtgtttggtatgtagtaagattttaattttattattattattattgttgttgttattttgggttttatagaattttagatattattgtaggttatgtgagttgtataattgggagagtttgtaggttttcgtttattttatttttatgttttttattattttttcgaaaaatattatttaatttaaaaatttatttaggtaatttttggtgaatatgatttggttaatgataaatttaagtaaatttggagggtttttttgttttgtttttttttgtttttttggttttttgttttttgagacggagtttcgttttgttttttaggttggagtgtagtggcgcgatttcggtttattgtaagtttcgtttttcgggtttacgttattttgttttagtttttcgattagttgggattataggcgttcgttattacgttcggttaattttttaaatatatttttagtagagacggggttttatcgtgttagttaggatggtttgtattttttgatcgcgtgatttatttattttagttttttaaagggttgggattataggcgtgagttatcgtgttcggttttggaggtttttttagatattatgaattttttaattttttttaatttaattttttttaattttaattatttaattatttaattttttatgtaaattttttgtattttttttagtatttaacgattagttgtttatggaagttagtattaagttttagttttgttatttgtaaagtgggaataataaaattgtgtttattttataggttgttgtaagatttaaatgagatggtaaatatggaagttatttataaaaaaaaataaggattgtatataaaatgtaattgattttatgatataaaaatggattttataatttagagataagttttattatttttatggtaattttcgtaagtaaggatcgaatgtggatttaaagaatgatgttataggaaatgaagtagtattaaggatgggtagaggcgaaatagattattttttttgtttaagttaggattgagggattagtacgggaattgaaagaagacgttttttttttttattatttggacgtgatgttttttagagtagatagtggaggtttttttaggatatatgtttttcgtattgggtagttataattagggagtgtttatttagaatatgggttgtaaagttgtatatggaagttttagaggttgagttttttatatttgtttttttagattttgggttttttaggataaagtgatttttttataaatatttaatgttttttgtaaaggggattttttttataggaataagtgatgttttttgttattgttattgtggtaatatatgaaaaatagatgatttttttattaggtttaaggat

SEQ ID NO: 418 - DNA, 6222 bp, Artificial Sequence
  chemically treated genomic DNA (Homo sapiens)
ttcgggaagttgaggtaggagaattatttgaatttaggaggcggaggttgtagtgagtcgagatcgtattattgtattttagtttgggtaataagagtaaaattgtattttaaaaaaaaaaaataaataaaaaagtaatatagttatgattattgtttatggttatgattattgcgtttattttggaatggtagagtttagtgttcggaaggaagattatttggtttataaagttttaaatattgtgtatcgtttggttttttaagtttgttaatttttgggttggtggcgggtgataatgtaaaaattaatataatggtagaagaatgaatgaattttgaagaatattttttggaagtttataagaatggagtagaagaggatggatgagtagaaaggtttatatttggaatgttagtgtttatttaatatattaaggtaaatatatattatatataaaaattgttttataatatagttagtgggggaatataaaaataaatgtataattttttaaaaggtttattttaatgtggttttaaaattattttgtgtatttaagagtttatatggtatgttttggaaaatgttaggttatggtagttataaattgtttaggaatatgggagtgtatgcgtatgtttgcgtatgcgtggattttcggaattataaaatttgtttgggagaatcgtgttttattgagttgatttttgtagtttttttaatattgttttgtttgattaatagatttttttttatatttcgataggaggagtttattttaagattttattaggttttagtttgttttttgtttttttcgaatattgtttggttttaggtttttagggatggtagttattattttggttttgaagagtggggatattcggaggtagtttcggttatggtggtggatgaagaggaggtagatgggattaaggatttagaggtatatggggggtatttagatttttgttgtttttaggaagtataggtttagtaggttggtggcggtaggtttaggttttgtttggttttagatttgagggaatataaagaggatttttaggatggtataaggtaggggtttttagtttatttgtttagggggttaggtaattttttggatttttaatatttatataaaaatgtattaagtattttttggaatatttattaatttttaattttttttattttgatattaattttaggtagttgtaattatattgatttgtagatgaagaagttgaggattagagaggttgagtaattttgttgattttatttagttgaggagtggaagggttgggatttgaatttagggaattgggttatgtggtttaggagatttgggttttataattattgttaggtatggattgttagttaatttttataataattttaggacgtagatagtattgtttttattttagaaattagtagattgaggtattagtcggggaattgttttttttagggatatataaatgggaagtggtaaagttgattttgatttaggtttatttgattttaaatttcgttcgattggtggttttgatgtatgatttgtttttattttttattattaattaatttatgttttagagatagggttttattttgttgtttaggttgaagtggtataattaaagtttaataaagtttcgaattttttgggtttaagtaatttttttatttcggttttttagagtgttgggattataggtataagtagttttattaggtttggttaattttttttttttatgttttgtagagatgggggtttttttatgttggtttcgaatttttggttttaagtaatttttttgttttagttttttaggtattgggattataggtaagagttatcggtttagtttgatttgttatttttattttagtaggtttgttggttttatttaattttagaagaaatttgaagtttagtggacgtggtttttttaatttttttttcgttgtttttttattttttttggttttataatttatcggttgtgtaaattttaatttttttgtattttagtttttttttttgtaaaagggggaaaacgagattttatttttatgagttgtattaaatggattaatagtagtaaagtttatagtagtatggtataaggttgggtataaggttaggtatagagaaagtttttagtttattgttagtttattgttttaattttttggttttcgaaatgttggtagtttgtaatttttatttttattttatgaattttattttttggagttttttgttaagagtaatggaaaaagaaattagagaggtaagggtttttcgggggtaggagggtttgggggatttattagttttatgtaaagaagagttaaagtttttagtagttgggaggtttggtggttttttaaatagagttgggttttcggttgttggtttggtgaaagaaatttaattcgttgtagtgagggggtcggagtaagttttttcgtttttcgggtttaggaatttgggggttttttttttttttagtatcgtagttcgagagatttgtagttaaattaagtttggaaaaggagagtggggcgcgatggggggtatttattttttgtttcgcgtagggtttagtaggcgcggttatcggcgttttttgtcgtcgtgggttttagcgtttgtttgtcgttaagtttttgggtagattgttcggtcgcgattttgtcggagaagaggcggggttgggttggtcgggttgggttggttcggttgggattcgagtttcgggatcgggaggtttcgggtaaggtttagttgcgcggcgggagtgaggttacgggaggtgaaaataggcgaggtgggggatgggggaagagaggcgttcggggagttgggacgggtatcgggttggggggtttcggaatttttgaaagtttagtgatatttttatagtttttttttttttttgtaataagaattattttagattttttaaatattttggatttagtaatttttaggagtttattttgatgagagaattgaaaggtgtgtatacgttagtaataaggaggtttggtgatcgtttaagcgtttaatcgcggggattatcgggtcgaggtcgagaggatggagatcgcgttataggtatttcgttgttggaatggagggtggtggggagaatttagaagattatgtaatgggttggtagggttatatttagtcgttttggtaagtagaaatttaagaaatttttagggttttgttttttggtcgtatgattttaggagtgtatatgggtttttcgggtgtttgaatagaagggtataggagggagggtcgtagttttgtagttttattttgttggtgtagcggttatttgttaatttttattttattttgtatcgcgggtttttgagtcggtagattaagtattttataaattttattttaaatacgtgttttaaatttgttagatatttgtttttattttagtttttgcgtttttattttttgttgtggtcgtttatttaatattggggggttacgttttgttaagttttagggagagattgtttttaatattcgagggagatattatttttaatattacgttgggtgaatattacgtgtgtatagtttttgatacgattggtaatatttaagggagatattattttaatattttagtgggtgaatattatgtgtgtaaacgttgtggtattattagaaatatttaagggagatattatttttaatattatagtgggtgtatattttgtgatattattcgtaatatttgaaggagattttatttttaatattatagtgggagtatatattgtgatattatttgtaatattcgagggagattttatttttaatattatagtaggtgtataatttgtgatattatttataatatgttagagatatattattttaaattttatggtgggtgtatattttgttatagaattcgtgatattttagggagttattatcgttaatattatagtgagagtatattttgtgatattatttatattattttagaaagatattatttttaatattatagagggtgtatattttgtgatattatttataatattttatgaagatataatttttgatataatcgtaggtgtatattttgtgatattatttgttatattttagggagatattatatttaatattatagtgggtgtatattttgtgatatgatttgtaatattttagggagatataatttttaatattatagagggagtatattttgtaatattatttataatattttagaaagataatatttttaatattatagtgggtgtatattttgtgataatattcgtaattttttagggagatattatttttaatattattttgagtgtatattgcgtgatattattcgtaatatcgtagggagttattgtttttaattttatagtgggtgtatattttatgatattatttataatattttaagaaggtagtatttttaaaattatagtgtttgtatatattgtgatattatttataatattttagggagatgttatttttaattttatagtgggtgtatattttgtgatattatttgtaatgttttagaaagatattttttttaatattatagtgggtgtatattttgtgatatgattcgaaatattttagggcgatattatttttaatattttagtgaatttatattatgcgtgtatacgttgtgattttttagaaagatatgatttttaatattatagtgggggtatattttgtgttattatttgtaatattttatggatattataatattataatgaacgtatattattgtgtatatgttgtgatattatttgtaatatttttgggtgatattatttttaatgttatagtgcgtgtatattttttgatattatttgtaatattttgtggagatattgtttttaatattatagtgggtgtatattttttgatattattcgtaatattttggaagatattatttatattgttacggtgggtgtatattttgtgatattattcgttatattttggggatatattattatttttaatatattgtgggtgtattttttgtgatattatttattatattttggagatataatattatttttaatattatagtgggtgtatattttgtgatattatttattatattttgaagagatattattttttttaatattatagtgtatgtatattttgtgatattatttgttatattttggggagatattattatattatttttagtattatagtggttgtacgttttgtgatattatttattatattttggggagatattattatttttaatattatagtaagtgtatattttgtgatattatttataatattttgggagatattatttatattgttatagtgggtgtatattttgtaatattatttgtaatattttggggagatattattatttttaatagtatagtgggtgtatattttgtgatattattggttatattttggggaggtattattatttttaatattatagtgggtgaatattttgtaatattatttattatattttggggagatattaatttttttaatattatagtgggtgtatattttgtgatattatttattatattttgggaagatattaatttttttaatattatagtgggtgtatattttgtaatattatttattatattttgggaagatattattttttttaatattatagtgggtgtatattttgtgatattatttgttgtattttggggagatattattatgttttatattataatgggtgaatattttgtgatagtattcgttatatttggggaagatgttattatttttaatattatagtggtgtatattttgtgatattatttattatgtagtggggagatagtattatttataatattatagtggatgtatattttgttatattatttgttatatttttgagaaatattattattttttttattatagtgggtgtatattttgtgatattattcgttatattttagggagatattgttatttataatattatagtggatgtatattttgttatattattcgttatatttttgagagatgttattatttttaatattatagtgggtgtatattttgtgatattatttattaaattttttggagatattattatttataatattatagtg

SEQ ID NO: 419 - DNA, 6222 bp, Artificial Sequence
  chemically treated genomic DNA (Homo sapiens)
tattgtgatattatgggtaataatatttttagaaaatttgatgaataatattatagggtatatatttattgtgatattaggggtagtaatattttttaaggatataacgaataatatgatagggtgtatatttattgtgatattatgggtaataatatttttttaggatgtaacgaataatattatagggtgtatatttattgtgataagaggaataataatattttttaaggatataataaataatatgatagggtgtatatttattgtgatattatgggtaatattatttttttattatataatgaataatattatagagtgtatattattgtgatattaggggtaataatattttttttaaatataacgaatattattatagggtgtttatttattgtgatatgagatataataatatttttttaggatataataaataatattatagggtgtatatttattgtgatattagaggaaataatatttttttaggatataatgaataatattatagggtgtatatttattgtgatattagagggattaatatttttttaggatataatgaataatattatagggtgtatatttattgtgatattagaggaattaatatttttttaaaatataatgaataatattatagaatgtttatttattgtgatattaggaataataatatttttttaggatataattaataatattatagggtgtatatttattgtgttattaggagtaataatatttttttaggatattataaataatattataggatgtatatttattgtgataatatgggtaatattttttaggatattatgaataatattatagggtatatatttattgtgatattaggagtaataatatttttttaggatataatgaatagtattataaggcgtatagttattgtgatattaggagtaatatagtagtatttttttaggatataataaataatattataaggtgtatatgtattgtgatattaaaggaaataatatttttttaggatataatgaataatattataaagtatatatttattgtgatattaggggtaatattatatttttaagatatagtgaataatattatagggggtatatttatagtatattaggggtaatagtatatttttagaatataacgaataatattatagggtgtatatttatcgtgataatatggataatattttttaggatgttacgaatagtattaaagagtatatatttattgtgatattaggggtaatatttttatagaatattataaataatattaaaagatgtatacgtattgtgatattaggggtaatattatttaaaaatattataaataatattatagtatgtatataatggtgtacgtttattgtgatattatgatatttatagggtattataaataatagtatagggtgtatttttattgtgatattaggagttatatttttttgggaggttatagcgtgtatacgtatggtgtaaatttattgggatattaggagtaatatcgttttagaatatttcgaattatattatagggtgtatatttattgtgatattaaaaggaatatttttttagaatattataaatagtattataaggtgtatatttattatgagattaggagtaatatttttttagaatattatgaataatattatagtgtgtataggtattgtgattttaggagtattatttttttaagatattatgaataatattatagggtatatatttattgtgaaattaaaagtaatagttttttacgatattacgaataatattacgtagtgtatatttaaggtgatattaggagtagtatttttttaggaaattacgaatattattatagagtgtatatttattgtgatattgaaagtattatttttttaggatattatgaataatattatagggtgtattttttttgtgatattaggagttatatttttttaggatattataaattatattatagggtgtatatttattgtggtattaggtgtagtatttttttaggatataataaataatattatagggtatatatttacggttatattaggagttatatttttatagaatattatgaataatattatagggtgtatattttttgtgatattaaaagtaatatttttttaggatagtatgaataatattatagggtgtatttttattgtgatattagcggtaataattttttaggatattacgaattttatgatagagtgtatatttattatgagatttggagtaatatatttttagtatattatgaataatattataggttgtatatttattgtgatattaggagtaaaatttttttcggatattataaataatattatagtgtgtatttttattgtgatattaggagtaaaattttttttagatattacgaataatattataggatgtatatttattgtgatattaggagtaatattttttttggatatttttaataatattatagcgtttatatatatggtgtttatttattgggatgttaggataatattttttttggatattattaatcgtattagaggttgtatatacgtggtgtttatttagcgtgatattaggaataatatttttttcggatattaggaatagtttttttttgggatttagtagaacgtagttttttagtgttaaataagcgattatagtaagaggtagaggcgtagggattgaaatgaagataaatatttgataagtttaaaatacgtatttaaaatagaatttataaaatgtttaatttgtcgatttaggagttcgcggtgtagggtggggtgggagttggtaggtgatcgttatattagtagagtaagattgtagggttgcggtttttttttttatgtttttttgtttagatattcgaggggtttatgtgtatttttgggattatacgattagaaaataggattttagaggttttttgagtttttgtttattagggcggttgggtatagttttgttagtttattgtataattttttaagttttttttattattttttattttagtagcgaggtgtttgtgacgcggtttttattttttcggtttcgattcggtggttttcgcgattggacgtttaggcggttattaggtttttttgttattaacgtgtgtatattttttagtttttttattaggatgaatttttggaaattgttgggtttaaagtgtttaggaagtttggagtgatttttgttgtagggggaagagggaattatggaggtgttattgaatttttaggggtttcgggattttttaattcggtgttcgttttagtttttcgagcgtttttttttttttattttttatttcgtttgtttttatttttcgtggttttattttcgtcgcgtagttggattttgttcggggtttttcgatttcggagttcgaattttagtcggattagtttagttcgattagtttagtttcgtttttttttcggtaggatcgcggtcgagtagtttgtttagagatttagcgatagatagacgttgggatttacgacgatagaaggcgtcgatggtcgcgtttgttgagttttgcgcggggtagggggtgagtgttttttatcgcgttttattttttttttttaggtttggtttggttgtagatttttcgggttgcgatattggggagaggagagatttttaaatttttggattcgggaagcgaggagatttatttcggtttttttattgtagcgggttggattttttttattaagttagtagtcgagagtttagttttatttaaggggttattagattttttagttattaggggttttgatttttttttgtataaagttagtgggttttttaagtttttttattttcggagagtttttatttttttggtttttttttttattgtttttagtaaaggattttagggagtggagtttatggagtgggggtgggggttgtaaattgttagtatttcgagggttagggagttgaagtaataaattggtaatgaattgagggttttttttgtgtttagttttgtgtttaattttgtgttatgttgttatgaattttgttgttattaatttatttaatataatttatagaggtagagtttcgtttttttttttttatagggaaggaaattgagatatagagaggttaaagtttgtatagtcggtgagttgtgaaattaggaggagtaaaaagatagcggagagagaattgaagaggttacgtttattaaattttaaattttttttagggttagataggattagtagatttgttgagatgaaaataatagattaagttgggtcggtggtttttgtttgtaattttagtatttaggaggttgaggtaggaggattgtttgagattaggagttcgagattagtatagagagatttttatttttataaaatataaaaaaaaaaaattagttaggtttggtgaggttgtttatgtttgtaattttagtattttgggaggtcgaggtgggaggattgtttgagtttaggaaattcgaagttttgttgagttttgattgtgttattttagtttgggtaatagagtgagattttgtttttaaaatataaattaattaataataaaaaataaaaataaattatatattaagattattagtcgaacgaggtttggggttagataagtttgggttagagttagttttgttattttttatttgtgtgtttttgggggaggtagtttttcgattggtgttttagtttgttggtttttgaaatggagatagtattgtttgcgttttggagttgttataaggattaattgatagtttatgtttagtaatgattatggagtttaggttttttagattatatggtttagttttttgggtttaaattttagtttttttattttttagttgggtaaagttagtaaagttatttaatttttttggtttttagtttttttatttgtaaattaatataattgtaattatttagggttaatgttaggatgaaaggaattgagaattagtaggtattttaaagagtatttggtatatttttgtgtaaatgttaaagatttaaaaagttgtttggttttttgggtaggtgagttggggatttttgttttgtattattttaagggttttttttgtgtttttttaggtttggaattagatagagtttgaatttgtcgttattagtttgttgagtttgtgttttttgagaatagtaggggtttgggtattttttatgtatttttgggtttttggttttatttattttttttttatttattattatggtcggggttattttcggatgtttttattttttaaagttaagatggtagttgttatttttgggagtttggaattaggtaatgttcgggggaggtaggggataggttggaatttggtgaagttttaaagtagattttttttatcggggtgtagaagggaatttgttaattaaatagagtaatattagaaaggttatagaggttaatttagtggaatacggtttttttaaatagattttgtaatttcgaaaatttacgtatgcgtaaatatacgtatatatttttatgtttttggatagtttatagttattataatttggtattttttaaaatatattatgtagatttttggatatataaggtaattttagagttatattaggatgaattttttaaaaagttatgtatttatttttatgtttttttattggttgtattataggataatttttatatgtgatatgtatttattttagtgtgttaaataaatattggtattttaagtgtgagtttttttgtttatttatttttttttattttatttttgtaggtttttaaagaatgttttttagagtttatttatttttttgttattgtattaatttttatattattattcgttattaatttaggggttggtaaatttaaagagttaagcggtatatagtatttgagattttgtgagttaggtaatttttttttcgaatattgaattttgttattttagaatgaacgtaatagttataattatagataatagttatgattgtgttatttttttgtttgttttttttttttgagatgtagttttgtttttgttatttaggttggagtgtaatggtgcgatttcggtttattgtaattttcgttttttgggtttaagtgatttttttgttttagtttttcgag

SEQ ID NO: 420 - DNA, 6214 bp, Artificial Sequence
  chemically treated genomic DNA (Homo sapiens)
attaaatgagattttttataatattttatttgtttttggaaaatagatgatttttaattattggtttatttatatttcgaatttttttataaaagatttggaatagttattttgatataaaacgaagtatatgaattgtatttatttggttttgaattatggttttgttatttattatttattatttttgtattttttaaattttgagatttggttttttaatttataataatggggattataattttattttgttgggttataggaaggataaaatgaaatagtaatgtagtatagtatttggtatatagttggtgttaaataaatatgttttgtttttttttatttaaatgtattttagatagaaaaaggataaggtggaattttaaacgatattgtttttttattatattgatatatgttaagtagaaatgtggattgattttgagttgtaattgttaatgtttgtatgtaaaagttaggtttaaagtaaatttaatttttttttataagtttagtattttgcgaatattttattaattttttagttatattatttaatgtaaaaaattttttggggaaaaatatgacgagtttttgtatattgttttttatattatttatttaaaggattattaaatattataaatttggttttttaataaaatatttatagtattagtttggttaataattttaaataaagtttttgtgattttgttagttttaaaaatatgatttttttttttttttttttttttttttaatatatattaatgttttttttattgaagagtagtatttagtttaggttttataagtatgatttaagtcgtaaaatattaagtattaattataagtattattataattttgcgtgcgttaaggagaataagtaaaattgttatatagtagcggaggtgattgggggaaaaagtgaaaagcgatttgaattgatttttcgttttttttattatatcggagaatgtaagtgtttcgtattttaagattaaattgagtttcggttttattgacgtaattagtaattttatttattttttatattgcggaggtcggtagggtagcggttgtcgttaagtatattatttattagagtttgtttcgttttattttcgcgttttagttatgttttttagaaatggggttatttatttagtaattattatatatacgtagtttattattttgtaattttttaaagttcgttgcggggagagaaggtagtaaaaagttaagaaggaagaattatagacgcgttattattaggaattgattttttatttcggagaggagcggtgatattttggaacgggttttgtttggattattttcgtagatttcgagttgttttgggataggggcggtttaggaaagttcggtgtagtgatgcgttcggggaaattttgttttgttttgtttgggtatattgtttgggttttgggtattaggatgggtgatttagggacggttattagatttcgggcgaggaaaattagaaagttttttacggcggtcgttgatttttttgaatattatttttttatttttatggataggaaatttaagttaaatttatagggacgggggtttagttttgcgattttagaaacggagggggtaggggattttaggttttcgtttttttttttgtagtagtagaaatcgttgcggtagacgagggggaggtaaaattttgtattttttattcgaaatttttataggtcgtcgtcgttcgtgtttcgcgcgtcggttttttcgtagtagtttttttttcggttggattcgagagtttttgtttttcggtgaattcgatttttattttttttttattttttaaagtcgttaaggttcgggaaagttttcgattcggttgggttaaattttttaatttttcgtcggttttcgtttcgtttttcgttttttttacgtaaagttgattaaaattggttttttgtaaagttttagcgtttattttaaattttacgcgttattatattggtagtttttcgagcgagggaaggaggtgagggtgaggatggaaggaatagatagatcggttaatagatttattttaataatttaaattaaaattttgagttcgggggaaagacgcgagcgggattagaacgggtcgagtggttagtttcggggagcgaagcgagtcggcgggggcgcgaggaggagatgcgtcggtttcggtcgttttgttgtatttattttagcgttgtcggacgggttttttatagttattttttgttacgggttcgttagttgcgttagcggtattttttttttcggttcgtcgtttttatcgtttttttttttttcgttcgttttacggtcggtttcgtttcgtcgtcgttcgagttttacggtagcggcggcggcggcggcggcggcggtagcggtagcggtagcggtagtagtagtagtagcggcggcggttttagagagggttcgacgtcgacgtcgatcgttcgaaagtcgcgcgtttggttagagacgttcgcgcgttgagcgagagtttcgcgttttcgttgggtatcgggtttcgtttttttttttttttttttttttcgtcgtcgggattacggtttcgtttttttcgtcggttttcgcgttcgtttttagtagaatagcgatcgtcgcgcgtttttttattttcgtttataatatggcgtttaagcgatatttgttttttaaagcgaggttcggtcgtcgttattatcgtcgcgcgtatttaggggttgggttagtggaagatacgttttcggtcgttgcgtttcgtttttttttttttttatttttttttttttgcgttttaattttagtttttgggtttcgtttatttttaggaagggcgagtttaatagatttgggggcgtcggcgggaggcgggggaaagaaatgggaaaggtaggaggggcgaaggttgggagttttttatcgttaagggtttaaggaggtcggaggttttttgggaatgagggagaatagtggttttcgtttagttggggagggaggtgggtaaagtatcgggggcgtagtttcgagttaaggattcggggaggggtgcggagtgttttttcggtttgtttttttcgggggtgcgtgcgtgcggacgcgtttagtttttgggcgtatttcgtaatggtttaagattttttttttttagggttatatgttgggaaattatttgttttttatttttttcgacggaggtaagggaggtttcgtgtttaggagttttttgggggttcggttttcggtttgatttaagtttttttaagttgacgtttttttgttaaattgtggttatttgggattaattttttttgtattagtcgtttttttcgtatcgtttttagtttaaatttttttttttaagtgcgtagagttttcggtttttagttgcgattttggaatcgttgtttttcgttttacgtttgttatttaaatttttaagaggggaaaatagggaggttttttaaggttgtttttttcggtagaggttggagaattatttaaaaatattttgtaggtaggagcgcggggtttttgtttttttgttgattttaaataagagattagatttaaaaattaggttggtcgtgggcggaggaggaggaggagggggatagagggaggggaggggttttgatttttttttttgtttaagatggggaagttttggattaaggaaatttaatgtttcgacggcgacggagttttataggacggcgagagttttggggggaaggtttgggcgttcggggtgcgttttaagaggattcgattttgtgtttattgcgttaggagtcgttgcgcgttaagtgcgttcgggtagaaatgtgtaaaagtcgtagggttgagtggaaagttattgtagtttttggttagtcgtttagcgaggggaagagaaaaagtaaagggagattttcgagtcggtttgtttttttaaatttttaggtcgtggtttaggtatttcggtttttttacgtttagcgattacggcgcgttcgttgttgcgtttttagcgtacgtttattaatagtttttttttattttttcgggatttagatatttggagaattttcgtttgtttttttaagtaggtgtgaggatgagattagagttttaaatttagtcggttaggtttgcgcgggcggtgcgaggtttttcgttgggtttgcgagaggtaggtgttgggttttttttgttgttttcgttagcgcgttttttggtataggttcgaggtcggggaatttcgtggttatttagggaggttttaattgtttagggagtttgagaaggcggtaggaagttttcgttgcgcgttttttttcgaagttttggatttagggggatcgtttaggttggataatatttgggtagatttaacgtggtttggggaagaaggcgaatggggttatttggtttttgtttttgttatttttttttatatgttatatttaggtgttgtaaatttaatttgggtttaaatttagttaatttggtagtattttttttgtgtaattttcgacggtaaaacgtgtttgtagaagtttggaggataaggagttgtgtattattttgtatttatgtataaaatgttttatttatttatattgtagagttatatgattattttttatagcgaaaagaagttcgttaattcggttggtttaaagtaaattagttttttttattttttgattaattattttagttaatatttttgtattagtaaaaatatatatagttgaagagagatcgttatgtggttaatattgtttagtgttaattatttttacgtaaagaatgaatattttaaaataaagtaaattgtatgttatttttagtattaatttttatttatttttgttaattttgagaattagaggaataatttttaaaatagagttatttgatttgtaaaagtaatgtgagcggtggttacgttttagtgaattaagtattatatgaattgttaataatgggttaaagtggtcgggtgcggtggtttatttttgtaattttagtattttgggaggtttaggtgggcggattatttgagtttaggagttttagattagtttggtcgatatggtgaaattcggtttttattaaaaatataaaattagtcgggagtgtatattcgtaatgttagttattcggaagattgaggtaggagaatcgtttgaattcgggagacggaggttgtagtgagtcgagatcgtgttattgtattttagtttgggcgataagattaaaattttgttttaaaaataaataaataaataaataaataaattagttaaagtattattattatagatgttttgtatagaggattaatttgataagtatttatgaattgattgaatttatttagaagaatattatttttttttttgttttaaaagtaaagaaaatgattttttgttgttaataataaatttttttttttttattttttttattaaatttaagagtagtgtaattattttttttggttaggagaatttggaaaaattaaatgaggttggaggattttttttgaaggtggtagtaaaaagagttatttgaatatagaagttgatattgttttaagtaggattattttttttttttgtttaataaaggaaaattttaagtgtagttgtttaaagaatagttgttttagatcgttagatttgtatgggttaatacggtggttagtagttatatatggttattgagtattttaaatgaggttggttggttaaagttgagatgtgttgtaaatgtgaagttttttttagattttagatttagtaaaaaaaaaaaaaaaagaatataaagtattttattaataattttttatatttataatatgttgaaatgatatttttgatatattgggttaaataaaatattttattaaaattaattttattttttaaaaattttttaatgtggttattataaatgtatatttatatatgtggttttcgagatttttatgtatttttataagttatataatgttaagtgatatttttagattttaatgtttttttggtttttttagtgtagaattagtagaaagggttgatttagttatttattgatttttattttttttaataaattttttagttagaattaaaatattggaaagtttttatttgaaattatagtagagcgaaat

SEQ ID NO: 421 - DNA, 6214 bp, Artificial Sequence
  chemically treated genomic DNA (Homo sapiens)
gtttcgttttattgtagttttaagtaagaattttttaatattttggttttgattgggagatttgttggggagggtggggattagtaggtaattgaattagttttttttgttgattttgtattaaggaagttaaaaagatattggaatttgaagatattatttaatattatatgatttgtaggaatatataaaagtttcgaaagttatatatgtaagtatatatttatagtagttatattaaaaagtttttaaaaggtgaaattaattttaatgaaatattttatttaatttaatatattaaaaatattattttaatatgttgtgaatataaaaaattattaatgagatattttatatttttttttttttttttttattaagtttgaaatttagaaagaattttatatttatagtatattttaattttgattagttaattttatttgaagtgtttagtagttatgtgtggttattaattatcgtattaatttatgtaggtttggcgatttgaggtagttattttttgaatagttatatttagagtttttttttgttaaatagaggggaaaagtaattttgtttagggtaatattagtttttatgtttaagtaattttttttgttattatttttaagaaaaattttttagttttatttgatttttttaaatttttttaattaaagagagtggttgtattgtttttggatttaatagaagaaataaaagagaaaaagtttattgttaataataaaaaattattttttttgtttttggggtaaaaggaagaataatgtttttttaaataaatttaattaatttataaatatttattaaattgattttttgtgtaagatatttgtggtagtggtattttaattggtttgtttgtttgtttgtttgtttgtttttgagatagaattttgattttgtcgtttaggttggagtgtaatggtacgatttcggtttattgtaattttcgtttttcgggtttaagcgatttttttgttttagtttttcgagtagttggtattacgggtgtgtattttcggttaattttgtatttttagtagagatcgggttttattatgtcggttaggttagtttggaatttttgagtttaggtaattcgtttatttgggttttttaaagtgttgggattataggggtgagttatcgtattcggttattttaatttattattaatagtttatgtaatgtttaatttattgaaacgtgattatcgtttatattatttttatagattaggtaattttgttttaaaagttatttttttggtttttaaggttaatagagatgaataaaagttgatattgaaaatggtatataatttgttttattttaaaatatttattttttgcgtgggggtaattagtattgaatagtgttagttatataacggtttttttttaattatgtatgtttttattaatgtaagaatgttaattgaaataattgattaaagggtagggggagttaatttattttaagttaatcgaattaacgaattttttttcgttataaggagtggttatgtgattttgtaatgtaaatgaataaagtattttgtatataaatgtaaaatagtatataattttttattttttaaatttttgtaagtacgttttatcgtcgggaattatatagagaaggtgttgttaaattagttgagtttgggtttaggttggatttgtaatatttgaatatagtatgtgaagggaagtgataaaggtaagagttaagtggttttattcgtttttttttttagattacgttgagtttgtttagatgttgtttaatttgagcggtttttttgagtttaaagtttcgggagaaggcgcgtaacgaggattttttgtcgtttttttaggttttttaaatagttggagtttttttaaatggttacgaggtttttcggtttcgagtttgtgttaaggggcgcgttggcgaaggtagtagaaagagtttaatatttgtttttcgtaggtttagcgagaaatttcgtatcgttcgcgtagatttggtcggttgggtttggggttttaattttatttttatatttgtttagggaggtaggcgagggttttttaggtgtttgggtttcgggaggatgaaaggaagttgttaataggcgtgcgttgggagcgtagtagcggacgcgtcgtggtcgttgggcgtgggaagatcgggatgtttgggttacggtttgagggtttgaagggataggtcggttcggagatttttttttgttttttttttttttttcgttgggcgattagttaggggttgtagtagttttttatttagttttgcgatttttatatatttttgttcgggcgtatttagcgcgtagcggtttttggcgtagtgaatatagggtcgagtttttttgggacgtatttcggacgtttaggttttttttttaaagttttcgtcgttttgtggggtttcgtcgtcgtcggggtattgggtttttttaatttagggtttttttattttgggtaggaggaggagttagaattttttttttttttttgttttttttttttttttttttcgtttacggttagtttgatttttaaatttaattttttatttaaagttaatagaggagtaggaatttcgcgtttttgtttataagatatttttaaataattttttaatttttatcgagagggatagttttaaggaatttttttgttttttttttttgaagatttaggtagtagacgtggggcggggggtagcggttttagggtcgtagttgaaggtcgagagttttgcgtatttggggaggagaatttgggttgggggcggtgcgggggaagcgattaatataagaggaattaattttaaatagttataatttaataaaagagcgttaatttgaaaagatttgaattaaatcgggagtcgagtttttaggaggtttttaggtacgaagttttttttgttttcgtcgggggagatggggggtaggtgattttttagtatgtgattttgaagagggagggttttgggttattacgggatgcgtttagagattaggcgcgttcgtacgtacgtattttcggaggagataagtcgaaaagatatttcgtattttttttcgggtttttggttcgggattgcgttttcggtattttgtttatttttttttttagttgggcggggattattgtttttttttatttttaaggagttttcgatttttttggatttttggcggtgaaaggtttttagttttcgttttttttgttttttttatttttttttttcgtttttcgtcgacgtttttagatttgttgggttcgttttttttgaaagtaggcgaggtttagaagttgaggttggggcgtagaaggaggggggtgggaagagggaggagcggagcgtagcggtcgggggcgtgttttttattagtttagtttttgggtgcgcgcggcggtggtggcggcggtcgagtttcgttttgagagataggtatcgtttaggcgttatgttgtgagcggaagtgggggagcgcgcggcggtcgttgttttgttgggagcgggcgcgggaatcggcggggggggcggagtcgtagtttcggcggcggaaggaggagaggaagaaaggggcgagattcggtgtttagcggaggcgcgaggttttcgtttagcgcgcgggcgtttttggttaggcgcgcggttttcgggcggtcggcgtcggcgtcgagttttttttggggtcgtcgtcgttgttgttgttgttgtcgttgtcgttgtcgttgtcgtcgtcgtcgtcgtcgtcgtcgttgtcgtggggttcgggcggcgacggagcggggtcggtcgtggggcgggcggggagggaggaggcggtgaaggcggcgggtcgggggggaagatgtcgttggcgtagttggcggattcgtggtagaagatggttgtggagagttcgttcgatagcgttgaggtgagtgtagtagggcggtcggggtcggcgtatttttttttcgcgttttcgtcggttcgtttcgtttttcggagttggttattcggttcgttttgatttcgttcgcgtttttttttcgggtttagggttttggtttgggttgttggggtgggtttattggtcggtttgtttgttttttttatttttatttttatttttttttttcgttcggggggttgttagtgtggtggcgcgtggggtttggagtgggcgttggggttttgtaagaagttaattttaattaattttgcgtgggggaagcgggaggcggagcgggggtcggcggggagttgggaagtttggtttagtcgggtcgggggttttttcggattttggcgattttgggagatgagggaggggtagggatcgggtttatcggggagtagggattttcgagtttagtcgagggaggggttgttgcggggagatcggcgcgcggggtacgggcggcggcgatttgtgggggtttcgggtagggggtgtagggttttgtttttttttcgtttgtcgtagcggtttttgttgttgtaaagaagaaagcggaagtttaaggttttttatttttttcgtttttgaggtcgtagagttagattttcgtttttgtgagtttaatttgagttttttgtttatggaggtgagagggtgatatttaaggagattagcggtcgtcgtaaaaggttttttggtttttttcgttcgggatttggtgatcgtttttgagttatttattttagtgtttaaaatttaaataatatatttaaatagggtaaaatagaattttttcgggcgtattattatatcgagtttttttgaatcgtttttattttagaataattcggggtttgcgaaaataatttagataagattcgttttaaggtattatcgttttttttcggagtggaaaattaatttttgatggtggcgcgtttgtgattttttttttttgattttttgttgtttttttttttcgtagcggattttaggggattataggatgataggttgcgtgtgtgtaatagttattgagtgagtgattttatttttggaaagtatgattgaaacgcgggggtggaacggggtaggttttgatgagtggtgtgtttggcggtagtcgttgttttgtcggttttcgtagtgtgagaagtagatagggttattggttacgttagtaaaatcgaggtttagtttaattttgagatgcgggatatttgtatttttcggtataatggagagggcgggggattagtttaaatcgttttttatttttttttttagttattttcgttgttgtataataattttgtttgttttttttaacgtacgtagagttgtaatagtgtttatgattggtgtttagtattttgcgatttggattatatttgtaaaatttgaattaaatgttgttttttaatggaaaagatattgatatatgttgaaagaaaaggaaagaaagaaaggaaattatgtttttaagattggtagaattataagaattttatttaaaattgttaattagattaatattataaatattttattaaaaagttaaatttatgatgtttaataattttttagatgggtagtgtgaaaaatagtatgtaagagttcgttatatttttttttagaaaattttttgtattaaataatatagttaaaaggttaataaaatgttcgtaaagtattgaatttgtggaaagaaattaaatttgttttgagtttgatttttatatataaatattaataattgtaatttaagattagtttatatttttgtttggtatgtattagtgtgataggaaaataatatcgtttagaattttattttattttttttttatttggaatgtatttggataaggaaggataaaatatatttatttagtattaattgtatgttaggtattgtgttatattattattttattttattttttttgtgatttagtagggtaggattatggtttttattgttatagattaggaaattaaattttagaatttaaaaggtataaagatgataaatagtaaatggtagagttataatttaaagttaggtggatataatttatgtgtttcgttttatattagggtagttgttttaaattttttgtggaaaaattcggggtataaataagttagtagttagaggttatttattttttagaaataaatagagtattataagaggttttatttggt

SEQ ID NO: 422 - DNA, 6127 bp, Artificial Sequence
  chemically treated genomic DNA (Homo sapiens)
ttggggtcgggtttggtggttcgcgttagtaattttagtattttgggaggttaaggtagatagattatttgaggttaggggtttaagattagtttggttaatatagtgaaattttgtttttattaataatataataattagttaggcgtggtggtgagcgtttgtaattttagttatttaggaggttgaggtaagagaattgtttgaatttgggaggtagagattgtagtgagtcgagaacgcgttattatattttagtttaggtaataaagtaagattttattttaaaaataataataattaaaaaaatttatttagattttagggtgattagggaatttttagtgtgtgtttttgtgtatttttgtatggtttaggtagagtttgggtggggtttttttattttaattgtatttttatgtgttgtgtgtttgtgtttattatatacgtttatatgggattttattttgggtttatatttgtgttattttttttttttttttttttttttgagacggagttttattttgttatttaggttggagtgtagtggagcgatttcggtttattgtaagtttcgtttttcgggtttatattatttttttgttttagttttttaagtagttgggattataggcgttcgttattaggtgtggttaattttttgtatttttagtagagacgaggttttatcgtgttagttaggatggtttcgattttttgattttatgattcgtttatttcggttttttaaagtgttggattataggcgtgaattatcgcgttcggtttttttttttttttttttttttttttttttgagatagagtttcggtcgggtacggtggtttacgtttgtaattttagtattttggaaggtcgaggtgggcggattaggaggttaggagatcgagattattttggttaatatagtgaaatttcgtttttattaaaaatataaaaaattagtcgggcgtagtggcgggcgtttgtagttttagttattggggaggttgaggtaggagaatggcgtgaattcgggaggcggagtttgtagtgagcggagatggttttattgtattttagtttgggtgatagagcgagatttcgttttaaaaaataataataataataaatataaaaataaagaaaaagaaggttgggcgcggtggtttacgtaggtaattttagtattttgggaggtcgaggtgggcggattaggagtttaggagatcgagattattttggttaatacggtgaaatttcgtttttattaaaattataaaaaaattagtcgggtatggtggcgggcgtttgtggttttagttattcgggaggttgaggtaggagaatggcgtgaattcgggaggtagagtttgtagtgagttaagattatgttattgtattttagtttgggcgatagagtaagatttcgtttaaaaaaataaaatataaaaaaaataaataacgaaaaagaaaaagagatagagtttcgttttgtcgtttagtttggaatgtagtggcgttattttagtttattgtaagtttcgtttttcgggtttacgttatttttttgttttagtttttttagtagttgggattataggcgttcgttattacgtttggttaattttttgtatttttagtagagacggggttttagtgtgttagttaggatggtttcgatttttagattttttgattcgttcgttttggttttttaaagtgttgggattataggcgtaagttatcgcgttcggtcgtttatttgacgttttgagtgtttttgtacgtggttttgtttttgtgattgtattttatttcgtgttttttatttgtggtaataggggttatgcgatggtatgattattttatgtgtttgtatgtatttttgtgttattataattattatggaagaagtgtggttgtgtgataaaataagttttggtgtgtaaaattgtgtttttttttgtttttgtttttttttttttttttgagacggggttttttgtgtcgtttaggttggagtgtagtggtataatcgttgtttagtgtagttttgaatttttggttttaagtgattttttcgttttaatttttatatatttgggattatagatacgattataggtatgtattattatgtttagtttattaagaaaaaatatttttgtagagataggggttttgttatgttgtttaggttggttttgaattattggttttaagcgattttttggttttggttttttaaaattttgagattataggtttgagttattgcgttcgttttattttgttggatggggttgttttattaggatgtatttgttatttatttatgtatgaatatggttttgtttgcgtttttattataaacgttatgtgattgacgtgtttgtgtgattgtttgcgtttttatttacgtgtgttcgtgttcgttgcgaggttggttggattagaatgggttggtgttaagatgtggtaggtgtattttgcgttcgtgtgatattgtgggtcggggagtttgtttgtgattttgtgtgtagggggcgggaagtgggagttaaagttatagaggatagtaggttgcgcggacgtagtgatgtgcgtagagggtttttcgtttcgtcgttttttttcgggaggcgtttttttcgcgttgcgggggcgcgtgcgtcgtgcgtgacgtgagatacgacgggggtcgttgcgtgcgtggaattcgacgcggtcgtgcgtgtaagcgcggggggtggaagggcgggagttttgtattggttgcgtgcgcgcgtgcgtgggcggtggcgggggttgggcgagcggaggcgcgtagggtaggattagtttcgtttcggtcgggattttggggcgtcggtgaaattcgggagggggttttcgttaatttttttttgttcgattcgaaatttgtggtttttcgatcgagcgttcgggggtttttttagcgtttgacgggagggtagtttttgttgggggagggattttttttatggagttgagattttttttttagttgttatgggaattagagtttttcgcgtagttaggcgcgtgtttttttttttcgtttagttattttgttttttttttagttgtttagtttattgataatgcgtttttcgttcgtgatttcgggagaagggggttggggttagcgtcgttcgggcgtgcgtgatttaggttagttcgggggttttttggtcgtagttggtttcgttttcgttttttcgttttcgtgatttatttttttcggtttttttcgcgtgtgatttaggtttttggggagggggttgcggagtttgggatttttatagatagtggggtcgagaattaagttttggggatttcgtttttcgcggggaaggttttttttattagcgagtattcgagggttagcgattttttttagtaagttagaggcgttttttttaatttcgtttttgaattggtagattttttatttttatttttgtaaattttcgggaatttagtttttaatttttttttttagtttataggaagttttggtagagttcgtcgcggcgatgaaacggttaaagtcgtttttttatttattttatttaggggtttattttgatttagagtaagtcggcgtttttttcgagtttggttttttgggggtttgggtgtatattttattttatatgtattatttttagagaggggaggatggcgtttggtgagttggttgggggttttgggtagtatatagagttgggtttaaattttgtttttgtttttattgttgtttggattttagtttttttatttgaaaatgagggattattatgtttagtttgttgggttgttgtggggattaggtgaataatagatgggaaattttgtatttagggttgagtacgggagttagaagagggttttttttgttttttaggtttgggtgttagggtgtttagtagaagcgagtttttgtcgggtaggttatgttttatttagatattttaaggttatggggtttattttgtttattttttgttcgaggtaggtatttaggaagtgagaggcggggtaggaatgaggtataatttgttgggttcgttattttttcgttttttatttttattttagtgttttgagagggtttttttacgttgtagttttattttcgtcgttttggacgtttgggttttgattcgcgggtggttcgagggaggggacgtcggatggagattgtgtttcgggaatattttgtggattgttggttggatagacggaggagggttagtttttttcggggtagggtagatattgattgggggtagagtaaatatggtttagggtgattagatagggggcgggcggggggttgtaggaatgtatatatagttatttcgagagagttagtttagatatataaatttttgttattttggttatagagagattgttagttagggatatatagatagggttagatatatagttgggtaagatgatttagtaatgattgttatatatggatatagtgatagattagatttttaagtaagagatatatatcgttaaatatatgaacgtatttattggttaaaaatacgtaggtaggtcgtgtgcggcggggataaattaatttagtatataagtatgatagatataaatatatagagattgatatttaggtgagaggtatatagtaaggtagatataatggcgtgtgatatatatggagataaatataataggttagaaatataggggtaagatagatatagagtgaattatatgtgagataagtaggtaatatgtgtatgttgataggagagatagttatttttagtattagtatttcgagagttatacgagagatatgtagatataggtatgtattattagattttgatacgtaagagaaggtaatatatatatattttagatttttaatttagaagatagagataagataagagagataaatttagggatagagatgatgtgtttatagtatggtagagagtttttggtattttggtttattattgttgtatatatattagagatgtttttagggatattaagtcgaagttttagaggtatatattattttattaggaatatatatatgtgggatttggtaatagattgggtagatttgggtagattgatatatttatagatatggtttggttagatagttatatttagtgtagagaggtatagataggttatagtgggatatttataaatatatcggtatagaaagattatgataaaatttgtttgtatatatatatatgtatatatataaacggagattagtaataggtaatatatagattagttatagaatatatatatggaaataagttatagattttatatatagagattatatatatatattaaatataaattagttatagattttttttttatatatatatatatatattagatcgtatatatatatatatatagattagttatagattttttttttatatatatataaatgtatattatagatcgtatatatatagattagttatagattttttttatatatatataaatagattatatatatatatatagattagttatagattatatatataaatatatatatatatcgatataagttagttataggaattttgaaataatttatacgtatatatatttagattatgtgtaatttattttatagagtttatatatatatagagtggaatagaattttatatagataagttttatatagatttttgtatttagggttgggtatagaagcgggtagagggttatttttgttttttaggtttgggtgttagggttggattagtatatatttttatatgtattttataggttagttatacgtttgttttttggattttgttaaggttttgtgggggtattggatattttagtttgtttttgttttatagagattttggtattttttttttttaaatattatttttatttttttttttttttgtttttgttattttttttaggaggtttagtttagtagtttttgtttttgttggggtgggggtttgttataaagaggttatttagggttttggtgatgtttaggttttttaaggttttattagta

SEQ ID NO: 423 - DNA, 6127 bp, Artificial Sequence
  chemically treated genomic DNA (Homo sapiens)
tgttggtgaagttttgggggatttgggtattattaagattttgggtgatttttttatagtaggtttttattttagtaggagtagaggttgttgagttaggttttttaggggaagtggtaaaagtaaagagggagggaagtgggggtgatgtttggagagaggaagtgttaggatttttgtggggtagagatagattggggtgtttagtgtttttatagaattttggtaaggtttagggggtaagcgtgtgattggtttatagggtgtatgtgagagtgtgtgttggtttaattttgatatttaggtttgagagataggagtagttttttgttcgtttttgtgtttagttttggatgtaaaggtttatgtagggtttatttgtgtagagttttgttttattttgtgtgtgtgtgagttttataggatgggttgtatatggtttagatgtatgtacgtgtaggttgttttaaagtttttatggttaatttgtgtcggtgtgtatgtgtgtttgtgtgtgtggtttgtggttggtttgtatgtgtgtatatgatttgtttgtgtgtgtgtaaaagaggtttgtggttggtttgtgtgtatacgatttgtaatgtgtatttgtgtgtgtgtgaaaaagaggtttgtggttggtttgtatgtatgtgtgtatacgatttggtgtgtgtgtgtgtgtgtgaaaaagaggtttgtggttggtttgtgtttggtgtgtgtgtgtggtttttgtgtgtgaggtttgtggtttgtttttatgtgtgtgttttgtggttgatttgtatgttgtttgttattgattttcgtttgtatgtgtgtatgtgtgtgtgtgtaaataggttttgttatggtttttttgtgtcgatgtgtttatgaatgttttattgtggtttgtttgtgtttttttgtattgggtgtgattgtttggttagattatgtttgtgaatgtgttagtttgtttagatttatttaatttgttgttaggttttatatgtgtgtgtttttggtgagatggtgtgtatttttaaggtttcggtttggtgtttttgggagtatttttgatgtgtgtgtaatagtggtgggttagggtgttagggattttttgttatattgtgaatatattatttttgtttttaggtttgttttttttgttttgtttttattttttgagttggagatttggggtgtgtgtgtgttgtttttttttgcgtgttaggatttgatagtgtatgtttgtgtttgtatatttttcgtgtggttttcggggtgttggtgttgaaagtgattgttttttttattagtatgtatatgttgtttgtttgttttatatatagtttattttgtgtttgttttgtttttatgtttttagtttattgtgtttgtttttatgtgtgttatacgttattgtgtttgttttgttgtgtgttttttatttgaatgttagtttttgtgtgtttgtgtttattatgtttatgtgttgggttgatttattttcgtcgtatacggtttgtttgcgtatttttgattagtggatgcgtttatgtgtttgacggtgtgtgttttttgtttgagggtttggtttgttattgtgtttatgtgtgatagttattgttggattattttatttagttgtatgtttgattttgtttgtgtgtttttggttggtagtttttttgtggttaaggtgataggggtttgtgtgtttggattggttttttcggggtgattgtgtgtatatttttatagtttttcgttcgttttttgtttggttattttgggttatgtttattttgtttttagttaatgtttgttttgtttcgggaggggttgattttttttcgtttgtttagttagtagtttataggatgttttcgagatatagtttttattcgacgttttttttttcgggttattcgcgggttaggatttaggcgtttagggcggcgggggtggggttgtagcgtgggggggtttttttagggtattggaatgagggtggggggcggggaggtgacgggtttaataggttgtgttttatttttgtttcgttttttattttttgggtgtttgtttcgggtagggggtggataagatgaattttatggttttagagtgtttgggtggggtatggtttgttcggtaaggattcgtttttgttgggtattttgatatttaggtttgagaaataggaggagtttttttttggttttcgtgtttaattttggatgtagagttttttatttattatttatttaatttttataataatttaataagttggatataatgattttttatttttagatggggaaattgaggtttaggtagtaatgagggtagagataggatttgaatttagttttatatgttatttaagatttttagttagtttattaagcgttatttttttttttttaaaaatggtatatgtggggtggagtatgtatttaggtttttaggaggttaggttcgaggggggcgtcggtttgttttgagttaaaatgggtttttggatgaaatgaataagaaaacggttttaatcgttttatcgtcgcgacgggttttgttaaaattttttgtgggttgggaggaggggttgggggttgggttttcggaggtttgtaggggtgggggtggggggtttattaatttagaggcggagttggggggggcgtttttggtttgttaaggggagtcgttggttttcggatgttcgttggtgggggaggtttttttcgcggagagcgaagtttttagaatttggttttcggttttattgtttgtaggggttttagatttcgtagttttttttttaggggtttgagttatacgcggggaaagtcgggaggggtgagttacgggggcggagaagcgggagcgaggttagttgcggttaggggattttcgggttggtttgagttacgtacgttcgggcgacgttgattttagtttttttttttcgggattacgagcgggaagcgtattgttagtagattaggtagttggaggaaaagtaggatggttgggcggggaaaggaaatacgcgtttggttacgcgggaagttttggtttttatggtaattggggggggggttttagttttatgggaaaggttttttttttaatagggattgttttttcgttaggcgttggggaagttttcgggcgttcggtcgaggggttataagtttcggatcgggtaggaaggggttaacggaggttttttttcgggttttatcggcgttttaaggtttcggtcggggcggggttggttttgttttgcgcgttttcgttcgtttagttttcgttatcgtttacgtacgcgcgtacgtagttagtgtagagttttcgtttttttatttttcgcgtttgtacgtacgatcgcgtcgggttttacgtacgtagcgattttcgtcgtgttttacgttacgtacgacgtacgcgttttcgtaacgcggggagggcgtttttcggaggggaacggcggggcgggaggttttttgcgtatattattgcgttcgcgtagtttgttgttttttgtgattttgatttttatttttcgttttttatatataaagttataaataaatttttcgatttatagtgttatacggacgtaggatatatttgttatattttggtattaatttattttagtttagttagtttcgtagcgaatacggatatacgtggatggagacgtagataattatataggtacgttagttatatagcgtttgtgatagggacgtaaatagagttatatttatatataggtaggtggtagatatattttgataaagtaattttatttagtaaaataggacgggcgtagtggtttaggtttgtaattttagaattttgagaggttaaggttagaggatcgtttgaggttagtagtttaagattagtttgggtaatatagtaagatttttgtttttataaaaatatttttttttaatgagttgggtatggtggtgtatgtttatagtcgtgtttatagttttaggtatgtgggggttgaggcgagaggattatttgaggttaggaatttaaggttgtattgagtagcgattgtgttattgtattttagtttgggcgatataggagatttcgttttaaaagaaaaaaaaaaaataggaatagggagggatatagttttgtatattagggtttgttttgttatatagttatattttttttatggtgattgtggtggtatagagatatatatagatatataagatagttatgttatcgtatgatttttgttattataaatagggggtacgaaatgggatatagttatagagataagattacgtatagggatatttaaaacgttaagtggacggtcgggcgcgatggtttacgtttgtaattttagtattttgggaggttaaggcgggcggattaggaggtttggagatcgagattattttggttaatatattgaaatttcgtttttattaaaaatataaaaaattagttaggcgtagtggcgggcgtttgtggttttagttattggggaggttgaggtaggagaatggcgtgaattcgggaggcggagtttgtagtgagttgagatggcgttattgtattttagattgggcgatagagcgagattttgtttttttttttttttcgttatttattttttttatattttatttttttagacggagttttgttttgtcgtttaggttggagtgtagtggtatgattttggtttattgtaagttttgtttttcgggtttacgttatttttttgttttagtttttcgagtagttgggattataggcgttcgttattatgttcggttaatttttttgtagttttagtagagacggggttttatcgtgttagttaggatggtttcgattttttgaatttttgattcgtttatttcggttttttaaagtgttgggattatttgcgtgagttatcgcgtttagttttttttttttttatttttatatttattattattattattttttgagacggagtttcgttttgttatttaggttggagtgtagtggagttattttcgtttattgtaagtttcgtttttcgggtttacgttatttttttgttttagtttttttagtagttgggattataggcgttcgttattacgttcggttaattttttgtatttttggtagagacggggttttattgtgttagttaggatggtttcgattttttgattttttgattcgtttatttcggttttttaaagtgttgggattataggcgtgagttatcgtgttcggtcgagattttgttttaaaaaaaaaaaaaaaaaaaaaaaaaaaaaggtcgggcgcggtggtttacgtttgtaatttagtattttgggaggtcgaggtgggcggattatgaggttaggagatcgagattattttggttaatacggtgaaatttcgtttttattaaaaatataaaaaattagttatatttggtggcgggcgtttgtagttttagttatttgggaggttgaggtaggagaatggtgtgaattcgggaggcggagtttgtagtgaatcgagatcgttttattgtattttagtttgggtgatagagtgagatttcgttttaaaaaaagaaaaagaaaaaaagaatgatatagatatagatttaaagtgaggttttatatagacgtatatagtagatatagatatataatatatgaagatgtaattggagtgagagagttttatttaaattttgtttggattatatagagatatataggggtatatattagaggttttttagttattttaaaatttggatgggtttttttggttgttgttgtttttgagatggagttttgttttgttatttaggttagagtgtaatggcgcgttttcggtttattgtaatttttgttttttaggtttaagtaatttttttgttttaattttttgagtagttgggattataggcgtttattattacgtttggttgattattgtattattagtagagatagggttttattatgttggttaggttggttttgaatttttgattttaagtgatttgtttgttttgattttttaaagtgttgggattattggcgcgagttattaagttcggttttaa

SEQ ID NO: 424 - DNA, 6108 bp, Artificial Sequence
  chemically treated genomic DNA (Homo sapiens)
ttttaattttaagggaaaaaaaattagaaatagtaaatatattagtaaagagatatttattttttttaattaagtttaaatttagtgtatataatagaaaggttggttttttttttaaagattttttagaaataattttagtttgttttaagtattaaaaattttataattttaaagtggatattattttttttattaaattttattaaataaaaatttattaaatatttattttattaatgatatattttatttttgtttttttataattaattaatgggttagttggtgttattttaaagttttatgaagttatttagttaaaataatgttataatttaattttaaatataaattttttgggtattgaaaatgttttaaaattagatagtggtaatggttgtataatgtagtgaatatattgaaaaaaaatatattgaatttatattttaaaagagtgaattttatgttatataaattttatggtaataaagttgttagtaaaaaataataataaaaataaattttttattttgtattattaagttttatttagtttttatttgaaattttattttaaattattgtttgtttggttaagtttaattaatatgttgtattaatttaggttatttaaaaataaaaaatatatatatatttttttaaaatgttttttttttttaagaagggttatagttttttagagataagttgagaaaatattttttatattagtttttaacggaaattaaagacgtgtagtcgtgtcgttttttggattttataaatttttggttatcgttgtgatttaaaattattatttttgtagtataaaattttaattattataatgtaatttttaaagtgttagataaaaagagaatatttattaattttttgaataaaaaggattaaattttttatgtaaagataggtttttagtttaaagaaagtttgattttttgttttttagaattttggtttaagtattttaagttgatatagttgttatttatttttaaaaaaaaaaaaaaagttattttgtttaatgataaattatattataaagaatagcggtttattaagttagagtgtagtaattacgttattgagattttattaaggttaaattataaatagatttggtatttgttagtgtttttagtgttgagttgtagttgtagattagagtaatttttttacgggaattacgaaattttaatttttttttttaagggttttttagtttagttgattatttggaagaggaaaagattagtattatttttttaaaaggtgggggttggggcggtgagtagtttgaaatagaggaggttattggaatttatttataatatgaaatgttatattaagaagaatacgaatataattttaattatttaagtatttatgataattaaagatttttttaattatttttattttaaaggatgaagtagaattagtggagtataggagtagagagaggtagggataaaacgatttttttgttatgatataaataatgattgttttgtgtttatagtgattgttgtggtagatattgttaaattattttaagggattaagttattttatgtatgaagggtgtggggaatagtgttttattatttttaatatatttatttttatttttttggaaaaagaggtataattaggagagtaggtaggtttaaagtaggtataaagttattgtttgtggttttgaatataaggatattatcgtttgtgtatttggaatataaaagagggtattttacgtggaggtcggcgaagagttgggaattttgataggtttggaaagaaataaagttttagtttgaagtaagtaagtaagtaaggatggatttttaggttagttattttattgatattatttatatttttttattttttcgtgtttttttttaaagttgttggaatattttttttaaatgtttatttgttttagttattaagagaggaagaaagagaagggatttttgtttgtaaaaaataaatttgttgtttagatatgtataagggtagaagtagaataattaacgtgggagaattttaaagaagtgtttaatagggttgaggttatttagttagttgtttttttttattaagattttttttttattgataaaagtgtagatattttttttgtataatgatattgatttaattgtatggtaggaggagagttgtacgggattattagattggtgtgtgtaagttgtagttattttaatatttatgagtaggtttttattatttttaggtttttaagttgtacgaggaagatattacgttaaagggatacgtatttattatatttattgtaatttatttgttgcgtttttaagtagttttattttttatatacgttgcggattatagtaaaatttagttatttttttttttaagattttttgaaatttttttcgtcgtttttgtgtttatttgtttttagttttttcgtttgtgtagaaattaaatggtttttgtgtgataaatataaagttattcgcggttttgtgtggtagaagcgaaaagagtattggatgatcgtggagagatttgggttgcgttttcggtatagttacggttttgttgcgcgtgtttatgttacgtatttttatttattcgtttgtaaaaacgaaggggatgatttatttcgaaggtcgttggcggtttcgttgcgggttgagtagggtgtttcgagttattcgttgtatagttttttaggtgggcgttttttttagattcgtttcgtttgggatgttcgggttttagggcgtttttatagttcgtttcggtttgtttaggcgagcgcgatttatatttacggttcgcgggcgtagcgttttttggcggtcgcggttagggacgtagttcgcgtttttgttcgtttatttcgattttatttgtttgttttttagtatacgatttcgttattagatttcgggtttataggtttaggaggcggcggtaggagattagggggaggttatacgtcgttttttaagtttttagtgtttttcgaattgttcgtagttttggttatatttcgttacgtttcgaggaaatgtaaaggggtgattttcgtgataatcgagttggagggtaggggtgcggtagtagttattatttatttgcgtttttgttttaggataatcgcgttagtcgtttaattacgttttcgagtatgagttttgtagtaaaataagtttttatagcggtatcggtcgttatatcgcgtaagcgcgttgtataaagtatttttaaggttgaagggaattgtagtttttttttcgagtgtttagggttgcggacgcggcgaaggattatattttttagaagcgtcggtgatatttcgggggcggtgcgggttgtttttttttttatcgagttttcggttttgttttattttttttcgtgtttttgcgagattgtttggaatttttttaggggtcgtgttttttgggggaggtagtcgggaggtttaatcgtggttttgtgttcgtatatagtgttgttcgtaggtagagtagttttattttgcgtggtcgtgtagttgttagaaaagatcgtgaaggttatcgtagttcgcgtttaattcgttgagagtcgttaggtcggttagttttagtttttatttgttgtggtagatacgattgtttgtttatggttcgattttgtagtttgcgtagatatcgttttttttattttaatattaattgtttattaatgtttcgttgtttggtttttagataataaaatgttaggattatagttttagaagtggtaagagttttagaaatgttatgttaatttatttttttttttttataaatgaaattgaagtttttagaaagattgatttttttatttttttgttttatcggtatttttagtattattaaataaaagttattgttgagtttttttttattttgtattcgatgttttatatattatttttgttttttttaatttttattatagttttatgagtaggtattatgagtttttttttttttttaaggagtttggttttgttgtttaggttggagtgtaatggcgcgatttcggtttattgtagcgttcgtttttcgggtttaagtagttttttttgttttagtttttcgagtagttgggattataggcgttcgttattacgttcggttaattttcgtattttttaagtagagatagggtttcgttatattggttaggttggtttcgaattttcgattttaggtaattcgttcgtttcggttttttaaagtgttgggattataggcgcgagttattttatttcgtcgtatttttttttaatttaaagattaaaaaagaagaagaagaagaggaagaggaagaaggagaaggtaaagtgatttgtttatttttataatagttagttagttagttagtgtgaagatattattgtatcgtaaagtagtatatttttgcgtacggattgatagattaatgtaatagaataaagagtttttaaatagattggtgtatttatgtaatttgatttgtgatagaaaattttacgaattcgtggggaaagtaagaagagttagtaaatagtattggaataattggttatatatatgaaaaaataattagggattatcgttttatattatatagaaaaaatttattttaggtagattaaacgtttaaatgtgaaagggaaaatttaaaaatttttagaagaagataggaaatatttttatgaatttgggagtaggaaagaattttttaaataagaaataaagaataaaggaagaaagattgataatttttgttatattaaaagatggtataaattgaaaagataaattataagttataattgataaagtttttgaataataaatatttaaaataatttttaagtttagtaagaaacggtagataatttaataggaaaataggtaaatgatatgaatagatagtttatagaataggaaatttgagtagttatttaaatatgaaaagatatttaattttatttataattagggaaattgatttttttttttttttttttgagatagagtttttttttgttttttaggttggagtgtagtggtgttattttagtttattgtaatttttatttttagagtttaagtaatttttttgttttagtttttggagtagttgggattatagatatcggttatcgtatttagttgatttttgtatttttcgtagagatggggttttattatattggttaggttggttttgagtttttgattttgtgatttatttatttaggttttttaaagtgttgggattataggcgtgagttaatacgtttggtttggaaatgtaaattaaaatagtaatgagatattattttattaaagattttagtattttttaataatgttttaaatattgtaatatttaaaattgtagatttgatattattatattttttaaaaagtttttaaatttcgttgaaatattttatatatgttgattatagtttgttttttattaaaaaagaatagatgaatattagatagttttggtggtaggttttaatatattgtagtattgttttggtttgtttaagtatagtttgagtgaaagaattatatttataaaattatttttttaaaatgtgtttgtgttgtgaattgtttagaggggcgatattttttaatttttaggtaagggggttagagaatttatgttgtagtgtagaattgtgtgtttttttttttttttttttttttttttttagatttcggtttattgtaatttttatttttagggtttaagtgattttgatttttttgttttagtttttagagtagttgggattataggtatgttttattatatttggttaatttttgtatttttagtaaagacggggttttattatattgtttaggttggtttcgaatttttgagtttaagtgatcggtttattttagttttttaaagtgttgggattataggagtgagttatcgcgttcggttagaattgtgggtatttttaaataatatttatgttgtgtaatgtattaaatatatttattaaatatttggtagagatgtagtgga

SEQ ID NO: 425 - DNA, 6108 bp, Artificial Sequence
  chemically treated genomic DNA (Homo sapiens)
tttattgtatttttattaaatatttaatgaatatgtttagtatattatataatataaatattatttagaaatatttataattttggtcgggcgcggtagtttatttttgtaattttagtattttgggaggttgaggtgggtcgattatttgagtttaggagttcgagattagtttggataatatggtgaaatttcgtttttattaaaaatataaaaattagttaggtgtggtgggatatgtttgtgattttagttgttttggaggttaaggtaggagaattagaattatttgaattttggaggtggaggttatagtgagtcgagatttaaaaaaaagaaaagaaagaaaagaaaagatatataattttatattgtaatatagattttttagtttttttgtttgagggttgggaagtatcgtttttttaaatagtttataatataaatatattttgagggggtaattttgtaagtataatttttttatttagattatatttggatagattaagatagtattatagtgtattgaagtttgttattaaggttgtttggtgtttatttatttttttttaataaaaaataaattataattaatatatatgaagtattttagcgggatttagaagttttttaaaaaatatgatgatattagatttgtagttttgggtgttatagtgtttgaggtattgttggaaggtattagaatttttggtgaggtggtattttattattattttaatttatatttttaggttaggcgtgttggtttacgtttgtaattttagtattttggggggtttaggtggatggattataaggttaggagtttaagattagtttggttaatatggtgaaattttatttttacgaaaaatataaaaattagttgggtgcggtggtcggtgtttgtagttttagttattttagaggttgaggtaggagaattatttgaattttggaggtggaggttgtagtgagttgaggtggtattattgtattttaatttgagggatagagaaagattttgttttaaaaaaaaaaaaaaaaaaattaatttttttgattatgaatgagattgggtgtttttttatatttgagtggttgtttaagttttttattttgtgagttgtttgtttatgttatttatttatttttttattgggttatttgtcgttttttattgaatttagaaattattttgaatatttattatttaaaaattttgttagttataatttgtggtttatttttttaatttatgttattttttaatatggtaaaaattattaatttttttttttttattttttgttttttgtttaaaaagtttttttttatttttaagtttataaagatattttttatttttttttaaaagtttttaagtttttttttttatatttaagcgtttgatttatttgaaatgggttttttttgtgtggtatgaagcggtaatttttgattgtttttttatatgtataattaattgttttagtattatttattgattttttttgttttttttacggattcgtaaggttttttgttatagattaagttatatggatgtattagtttgtttgggggttttttattttattgtattggtttattaattcgtgcgtaagaatatgttgttttacgatatagtagtgtttttatattagttaattagttagttgttataaagatggataagttattttatttttttttttttttttttttttttttttttttttttttttaatttttgaattaaaaaaaaatacggcggggtgaggtggttcgcgtttgtaattttagtattttgggaagtcgaggcgggcggattatttgaggtcgggagttcgagattagtttggttaatatggcgaaattttgtttttatttaaaaaatacgaaaattagtcgggcgtggtggcggacgtttgtaattttagttattcgggaggttgaggtaaggagaattgtttgaattcggaaggcggacgttgtagtgagtcgagatcgcgttattgtattttagtttgggtaatagagttagattttttaaaaaaaaaaaaaaatttataatatttatttatagggttgtaatggagattaaaggaaataagaatggtatgtaaagtatcggatataaggtagggaagaatttaatagtggtttttatttaatgatgttgaaggtatcgatgaaatagagaaataaagggattaatttttttgggagttttagttttatttataaaaagaagaagatgagttagtataatatttttaaggtttttgttatttttaagattgtgattttggtattttattatttagagattaggtagcgagatattgatgggtagttggtgttaaagtgagaaaggcggtatttgcgtagattgtagggtcgaattatgagtaagtaatcgtatttgttataatagataagaattggggttggtcggtttgacgatttttaacgggttagacgcgggttacgatgatttttacgattttttttggtagttatacggttacgtagggtgggattgttttgtttacgaatagtattgtgtgcgaatatagggttacggttaagtttttcggttgttttttttagggaatacgatttttgagaagattttagatagtttcgtagaggtacggggaaggatggaatagagtcgggagttcggtgggaagaggggtagttcgtatcgttttcgggatgttatcggcgtttttgggaaatgtagtttttcgtcgcgttcgtagttttgggtattcggaaggaggattatagttttttttagttttgggaatgttttgtgtagcgcgtttgcgcggtgtggcggtcgatgtcgttataaaggtttgttttgttgtagggtttatgttcgggagcgtggttgagcggttggcgcggttgttttggagtaggggcgtaggtaggtgatggttgttgtcgtatttttgttttttagttcggttgttacggggattatttttttgtattttttcggggcgtggcgggatgtggttagggttgcgagtagttcgggggatattggagatttggggaacggcgtatggtttttttttggttttttgtcgtcgttttttaggtttgtgagttcggggtttggtgacggggtcgtgtgttggaagataggtaggtaggatcgggatgagcgggtagggacgcgggttacgtttttggtcgcggtcgttagggggcgttgcgttcgcgggtcgtgggtgtgggtcgcgttcgtttgggtaggtcggagcgggttgtgggaacgttttagggttcgggtattttaggcgaagcgggtttgagagaaacgtttatttgggaggttgtgtagcgggtggttcggggtattttgtttaattcgtagcggagtcgttagcgattttcgaagtaagttatttttttcgtttttgtaagcgggtaaatggaggtacgtgatataagtacgcgtagtaaagtcgtggttgtgtcgggaacgtagtttagatttttttacggttatttagtgtttttttcgtttttgttatatagagtcgcgggtggttttgtgtttattatataggggttatttggtttttgtatagacggagaggttggaggtaggtgggtataggaacgacggggaaagttttaggaggttttggaggaggagatggttaggttttattgtggttcgtagcgtgtatgaaaggtgaggttgtttggagacgtaataagtggattatagtgggtgtggtaaatacgtatttttttagcgtggtgtttttttcgtgtagtttgagggtttggaggtgatggaaatttatttatgagtgttgggatgattgtagtttgtatatattagtttggtaatttcgtgtaattttttttttgttatgtagttgaattagtattattgtgtagggagagtgtttatatttttattagtggaaagagaattttggtaaaaaagggtagttgattaagtggttttaattttattgggtatttttttggggtttttttacgttgattattttgtttttatttttgtatatgtttggataataggtttgttttttataaataaaaatttttttttttttttttttttttgatagttgaggtaagtgagtatttaaaaaagatattttaataattttaaaggaggatacgagaagatagggaaatataaatagtattagtaaaatggttggtttggggatttatttttgtttgtttgtttgttttagattggggttttgtttttttttaaatttgttaggatttttagtttttcgtcggtttttacgtggggtgtttttttttatgttttagatatatagacgatggtgtttttatgtttaaggttatagatagtaattttgtgtttattttgggtttgtttgtttttttgattgtgtttttttttttaggaaagtagagatgagtgtgttagagataatggaatattgttttttatattttttatatatagaataatttagttttttaggatagtttagtagtgtttattatagtagttattgtaggtataaaatagttattatttgtgttataatagggaagtcgttttgtttttgtttttttttgtttttgtgttttattgattttattttattttttgaaataaaagtggttgaaagaatttttggttattatgggtgtttagataattaagattatgttcgtgttttttttgatgtggtattttatattgtggatgagttttagtgattttttttgttttaaattgtttatcgttttaatttttattttttaaaaaggtagtattaattttttttttttttagataattagttaagttagggaatttttgaaggggaaggttagaatttcgtgattttcgtaagaaggttattttgatttatagttatagtttaatattggggatattggtagatgttaggtttgtttatagtttagttttaatgaggttttaatgacgtgattgttgtattttggtttggtgagtcgttgttttttatggtgtagtttgttattggataaggtgattttttttttttttttaaagataagtaatagttatattaatttagggtatttgaattagaattttgaaaggtaagaaattaagttttttttggattggaaatttgtttttgtataggagatttagttttttttatttagaggattagtaagtgttttttttttatttgatattttaaaaattgtattataatggttagaattttgtgttgtagaagtagtagttttaagttatagcgatagttagggatttatggaatttagaaggcgatacggttatacgtttttaattttcgttggaggttagtatgaaaggtgtttttttagtttgtttttgggaggttgtgattttttttagaggggggaaatattttggagaagtatgtatgtgttttttgtttttaagtgatttgagttgatatagtatattgattagatttagttaggtaagtagtggtttagaatagagttttaggtaaaaattaggtaagatttagtaatatagggtggagaatttgtttttgttattgttttttattaatagttttgttgttataggatttatatgatatgaaatttatttttttaaagtataaatttagtgtgtttttttttaatgtatttattgtattgtgtaattattattattatttagttttagaatatttttagtatttagggaatttgtgtttgaagttaagttataatattgttttaattggataattttatggagttttaaaataatattagttaatttattagttaattataaaaaggtagagatggaatatattattggtagaataagtgtttggtaagtttttatttagtaaaatttagtagaagaaatgatgtttattttaaaattgtggagtttttaatatttgggataaattgaaattgtttttagaaagtttttaaaaaaaaaattaatttttttattgtatatattggatttgagtttagttgaagagaatgggtgtttttttattagtgtgtttattgtttttaatttttttttttttagagttggga

SEQ ID NO: 426 - DNA, 6187 bp, Artificial Sequence
  chemically treated genomic DNA (Homo sapiens)
attattttttttagtttattttaattttcgagtggttttggtttttaattttatattcgattttgtgatcgatatttttttattgatatggaaatggagataaattttagttttttatttttattttgggtttagtgttggttttttattttttatttattggttttaagttttaagaatttatgttattttaatttgagttttttttacggtttatttgatagtttttatattagtttttaagttttgttgtttttcgtagatttatgtttcgggggttatgttgttgtatttcggattatatttttgttttatttaattttgagtttttttagagtttttggtagtggaagatagatttatttttagagggtgatagttttaagtggttagggtttgggtgggggagttcggaggaggtatttgatatagattaggggtttaggtaagtttttgggaggaggggatatcgaggtagagtttagggttgaggaggaggaggagaaattttagtagatgttggggaagtcgggttttagtggagaaaattatttttgtgaaacgttgggggttttttggttttgggtttttttttttttttttgttatttagagtaaaatggtaaggttgggatttgaattaatgtttgtttttaaggttcgtgtttttaatttttttgttgtttttatgtgaaattataagagttgtggagtcggtgtttgggtgtggtttggtatgaggttggtttggtttgagttcgtgttgggtttttgaagttagttttggagtttggatttttttttatggttagtggggattaggaggggtcgtaggttaaggggaattcggttaggtttgtatttagcgggtggagatgggtgtgtttggggatttattttttcggtgtttagtttagtttggcggggagaagttttaaggtttataagttggttatagatataagtgtagttttaatgtggtagtttattgaggggttcgtgtggtttttgtagggtgtttttgaatgttttgatttttttgtttttattgagaaagtgatagattttatttttaaagtcgtttttggtatttggtgatagattagttggaggcgagtggtagttgtttttacgggtagggtattggtttttttgggttataggtcgtattcgatttattttagttttacgttttgtttggttttgtggttatttgtatgtaggttttgtttttattaaggtgtttttaaaaatttagtttttgtttggtttgttagatgtgaggtttgtttgtgattgttttagtaggaggtagggtatttgaatttatatatggggttttgtggttagtattgttttggggttttataggtatttgtgtttgttgtttttgatcgggttttaggttttttaggattttttcgattttttgttggtttttttttttttttttttgagagatatttttgttttgtttttttggttggagtgtagtggcgttatttcggtttatgtaattttcgttttttgggtttaagcgatttttttgttttagtttttcgcgtagttgggattataggcgtttattattatgtttatttaatttttgtatttttagtagagacgggttttcgttattttggttaggttggttttaaatttttgattttaggtgatttttagtttttcgaggtgttgggattataggcgtgagttattgttttttgttttaacgttttgttttaatagtaaagtttggttttgtgtttattttgattttttggggtttttgggtaaggttcggttttaggtagatagttacggttaggagagatagggtagcggtagattacggattttgtgggattagtgttttttatacgttataggtaggtttttggttggaggatgtttggtagttttaggtagggttcgggtttcgtgggattagtgttttttatatattagaggtaggttttcggttggaggatatttggtagtttcgggtagggtttttgttagtagggtttacgtttttagtttattgtggtttttgtatagatattttatttattacgtggtttagtaaaagtttattgagtttttgttgtgcgttagatgttggtttaggtgttgagatggagtaggattcgaagtagataggaaaaaataatttttgtttagagtatgtattaggtagagtcgggagtagatagatgtttgtgtgttttgtattagttgttgttaggtgttttaggtagaatgtaggtagggtaggggtcggggagggtaggggttggtattttagatgatgggaggttagtagaagttttattgagaagttgagttttgagtaaagatttgaaggagtggagggagggagttatagggattttgagagttgatgttttaggtagagggagtcgttagcggagaggttttgggcgtaggggggcgggggtgggggagatattcgtgtgtttggaaatggaacgggggtagagggggtttgtaggatacgatttagattatagagggtggggatcgggtgattcgggatgtattggatgttttgtttggtttttatttgtatttgtatttgttattcggtttttgggatttttttgttttttattttgggattaggtttttttgattttttttgttttttattttttgttgtttatgggagtagagagtgtggttttggggttaaggaatattggcgtttatatgggaggaagtgttaggttaggttttggttttagcgttttgttatttgtagttttcggggttgattatggggtgggttaatttttgtttttttttttttaaattttttagggtaggattattttattagtgtgaggaataggagaaaaataaggggggtttttttagggttttatcgagtttagggggtagtagtttggttatggcgattatttttttggtttttgtagttgtgtttttagggaggggaggggttgtattgtttatgttattgttattttatggtatttttttattgcgtttttgttttgtttttgtgtgtgtcgtgttgttttgtttttgcgtgtcggatgtacgttttgtgtgttttattttttgttgggtttttatttattattgtttgggattttagattatcgtgcggggtagtaaaggtgttaaagatggggtttttacgttgttgttggacgagtttgagaatatgtcggtgatacgttttaattttttgcggagagatagttcgtcgtcgttcgttcgtgttcgttaggaaaatgggatgttagaggagtcggttattacggttagagggggtttagggaaggtaggtagtcgaggtcggttcgtcggttatagcgaggcgggtggcggtagtggtgataggcgacgggcggggttagagaagaggtttaagttttttagggagggtttagggggtttttaggagttttttcgggataaacgtttttttttcgggtttgatgtcggtattttttagtttgttggtttggttagtggggcgaaattggtagttggtcggttttttaatatttattcgagggttgatacggattatttatttcggggtgtttaggtaatttatttttcgttttagggtttttattgttttttgttcgttgtttttttgtttttattttttagtttcgttttattatcgtgtattttattttgattatttatgtgtttgttttatcgttgggttttttttttgtttagggagtagagttgttttttggtatttattattgatagttattttttttttgttttagggggagttttatgacgtggtttttaacgggttattagcggggggtttggttattttttagttttttttttttttttttcggttttttattcgagttcgaggtgtttttagttttggagtgttgggattttacgttttagagttttagttggtttttttagtttgtattttcgtcgtttttgttgtttttgggttttttggttttcgtttattatagcgggagttatagcgagtattttatgagtagtttcgggttgttttgtagttggtggtggatttaggcgattttcgtttttatttggataattttattaagattggcgagggttttacgggtatcgtgtgtatcgttatcgtgcgtagttcgggtaagttggtggtcgttaagaagatggatttgcgtaagtagtagaggcgcgagttgttttttaacgaggtgcgggcgttgttgttttgtcgttttgttggtttttttattttttttttttatttttttttttttttttttttttttttttgtattttttcgtgttgggttaggttttttttttttttttatttttttttttttttaggtcgtttcgttcgttttagttgggtttttgtttttgtttttatagtatttttatttatatttttgtttttgagttttagatttagggtttttcgggttattgattttcgatttagtgttttttaggtttttcgtatttattgaggttcgtttgggttttagggtatagtgttttttagatttgttttttttgggttttttgtgtttcgttttggtttttatttttgggtgtttttcggtatagtttatataattattaagagtatgtttttgacgtttaggtttatttttttttcgtttttttttagagattttggtagtgtttcgtagtattttgacgataggaagtttaggtttttttgtcgggtgtgtgaggtttttttcgatttcgttgtttattatagtgtcgggttgtattatggagtttttcgtttgggttttttattttttcgtcgatatacgtttttttttttatttttgtttttgttcgggttttagttttgtgattgaacgttttttttttatttgttttttagtattagtttaggattgatttgagatgggcgtgtgtttaggggggcgcgtttttagaagggaggcgtgggttttaagttggttttgaggtttacgtggttgtggtagtaggggagggtagtttaggtggttttagtgagtataagtttaatgtggaattgtagggggagttaggggggtggcggtggttgggtttggtattggtagttttttcgtttttttttattattgatttagtttttgtataggtggtaattatgagggattattagtacgagaatgtggtggagatgtataatagttatttggtgggggacgagttttgggtggttatggagtttttggaaggaggcgtttttatcgatatcgttatttatattaggtatttttggggttttagattttttttgtgatacgattaagttttttttagattattaggggtggggttatatttttaaattagttgtgtttcgggtttttgggatggggtcgtgttttttattttttttattttagagtggggtcgagtggttttagattttttttattgtaaggtagggttgcgtttttttcggtatttcggggtgttgtttagttggttgtttattttttattttatttcgtaggatgaacgaggagtagatcgcggtcgtgtgttttgtagtgttgtaggttttgtcggtgttttacgtttagggcgttatttatcgggatattaagagcgattcgattttgttgatttatgatggtagggtgaggggacgggcggcggggtacgggggcggtaggttttcggttgcggggtttttttgtttttttttattttttgtgagggtaggtgagttttgatttttaggtttgtgttttgaggagttgggaatttcgtttttttttggtggagtagtttagagttaggttttagtttagtggggattttgtgtagtgggagggtataggttggcgggggttttgttattagtataggatattgggtttaggggtagggatttgggtagatagcgtagttttcgttataggtttttttttttattgaaaagttgttttttgtttagtatttagggcggtttatggattttagttttgttttttatgttttggattgaggttttaaatttgaggttgtgataattataacgtcgggtggatatgattttttgtgagagagggtttttgatttgaatgaaatgtttgtagaagtggatgattttatttttttttttaaggaagattaagttatattattagtttaggtag

SEQ ID NO: 427 - DNA, 6187 bp, Artificial Sequence
  chemically treated genomic DNA (Homo sapiens)
ttgtttggattaatggtgtggtttaattttttttgggggaggggatggagttatttatttttgtaagtattttatttaagttaagggtttttttttatagaaaattatgtttattcgacgttataattgttatagttttagatttggaattttagtttaaagtatggaagataggattggggtttatggatcgttttgggtgttgggtagggagtagttttttagtggaggaagaagtttgtggcgggggttgcgttgtttgtttagatttttgtttttgggtttagtgttttgtgttgatggtagagttttcgttagtttgtgtttttttattgtatagagtttttattgagttggaatttgattttgggttgttttattagggagggacgaagtttttagttttttaagatatagatttgggggttagagtttatttatttttataggggatgggaagaggtagggaagtttcgtagtcggaaatttgtcgttttcgtatttcgtcgttcgtttttttattttgttattatgggttagtaggatcgagtcgtttttgatgtttcggtggatgacgttttgggcgtggagtatcgatagggtttgtagtattgtaaggtatacggtcgcgatttgtttttcgtttattttgcggggtggggtggggggtgagtagttagttggatagtatttcggggtgtcgagggggacgtagttttgttttgtagtgggaggaatttgagattattcgattttattttggagtgggaggaatggaagatacgattttattttaggggttcggagtatagttggtttggagatgtggttttatttttagtggtttggaggggatttggtcgtgttataggaggggtttgaggttttagaaatatttggtgtgggtgacgatgtcggtgagggcgtttttttttaggaattttatgattatttagagttcgttttttattaggtagttgttgtatatttttattatattttcgtgttggtagttttttatgattattatttgtgtaggggttgggttagtggtggagggaggcgggagggttgttagtgttagatttagttatcgttatttttttggttttttttgtagttttatattaagtttgtgtttattggggttatttggattgtttttttttattgttatagttacgtgggttttagagttagtttgaagtttacgttttttttttgggggcgcgtttttttgggtatacgtttattttaggttagttttgggttagtgttggggggtaggtgggaagagagcgtttaattatagggttgagattcggataagggtaaggatgagagaagaggcgtgtgtcggcgggaggatgaggaatttaggcgaggagttttatggtgtagttcggtattgtgatgggtaacggggtcgagaggggttttatatattcggtaaagggatttgggttttttatcgttagggtgttacggggtattgttagggtttttaaggagggacggggagggggtgggtttgaacgttagaaatatatttttggtggttgtgtgggttgtgtcgagggatatttaggagtggaggttagggcggggtatagggaatttaggaggggtaggtttggaggatattgtattttggagtttaggcgggttttagtgggtgcgaggggtttggaagatattgggtcgggggttagtggttcgaggaattttgggtttggggtttagggatagagatgtgggtgagggtgttgtgaggatagaggtagggatttagttggggcggacgagacggtttggggagggagaagagtgaggggaggaggggagtttggtttagtacggaggagtgtagggagaggagggaggaggggagggagggtgggagggaggggtgggaggattagtagggcggtagggtagtagcgttcgtatttcgttgaagagtagttcgcgtttttgttgtttgcgtaggtttatttttttgacggttattagtttgttcgagttgcgtacggtggcgatgtatacgatgttcgtggagttttcgttaattttgatgaagttgtttaggtaggagcgggggtcgtttgggtttattattagttgtagggtagttcggaattgtttatgggatattcgttgtggttttcgttgtggtgagcgggggttagggggtttaggaatagtaggggcggcgggggtgtaggttggaggggttagttggggttttgaggcgtggggttttagtattttagggttgggggtatttcgggttcgggtgggaggtcgggaggaggaggaggaggattgggggatggttaggtttttcgttgatggttcgttaggggttacgttatgaggttttttttgaaatagaagagaggtagttgttagtgatgggtgttagggagtagttttgttttttaagtaggagagagatttagcgatgggatagatatatgggtggttaggatgagatgtacggtggtggggcggggttggaaggtggggatagaggagtaacgggtaggggatagtgggggttttggggcgggggatgggttatttgggtatttcgggatgggtggttcgtgttagttttcgggtaggtgttaaagggtcggttagttgttagtttcgttttattggttagattagtaggttggggggtgtcgatattaggttcggagagggggcgtttgtttcgggaggatttttggggattttttgagttttttttggaagatttgggttttttttttggtttcgttcgtcgtttgttattattgtcgttattcgtttcgttgtgatcggcgaatcggtttcggttgtttgttttttttgggttttttttggtcgtggtggtcggtttttttggtattttatttttttggcgggtacgggcgggcggcggcgggttgttttttcgtagggagttggagcgtgttatcgatatgtttttaaattcgtttagtagtagcgtgagggttttatttttggtatttttgttgtttcgtacgatggtttggggttttaggtaatggtgggtgggggtttagtaaggagtggggtatataggacgtgtattcgatacgtagggataggatagtacgatatatatagagataagatagagacgtaatgaagagatgttatggagtgataatggtatgggtagtgtagttttttttttttttggggatatagttgtaggggttagaggagtgatcgttatggttaggttgttgttttttgggttcggtgggattttggagaggttttttttgttttttttttgttttttatattggtggaatagttttgttttgaggggtttgggggaggaagggtagaaattgatttattttataattagtttcgagggttgtaaatgatagggcgttggggttagggtttggtttggtatttttttttatgtgggcgttagtgttttttagttttaaaattatattttttgtttttatgaataataaggagtgggggatagggagagttagaaaggtttggttttaaagtagagggtaagggggttttaggagtcgggtggtaaatgtaaatgtagatggggattaggtagagtatttagtgtatttcgagttattcggtttttattttttgtggtttgagtcgtgttttgtaggttttttttgttttcgttttatttttagatatacgggtgttttttttattttcgtttttttgcgtttagggttttttcgttggcggttttttttgtttggaatattagtttttagggtttttgtggttttttttttttatttttttaggtttttgtttaaaatttagttttttagtgaggtttttgttggttttttattatttaaaatgttagtttttgtttttttcggtttttgttttgtttgtattttatttagagtatttaatagtagttgatatagagtatataggtatttgtttgttttcggttttgtttagtgtatgttttgggtagggattgtttttttttgtttgtttcgggttttgttttattttagtatttagattagtatttggcgtatagtaggggtttagtgaatttttgttaaattacgtagtgagtgaggtgtttgtgtaaaggttatagtgagttgagaacgtgggttttgttgataaggattttgttcggggttgttagatgttttttagtcggaggtttgtttttaatgtgtggaaaatattgattttacgaaattcggattttgtttggggttgttaggtattttttagttagaggtttgtttgtaacgtgtagaaaatattgattttataaaattcgtggtttgtcgttgttttgttttttttggtcgtggttgtttgtttgaagtcgggttttgtttaggggttttaggaagttaaggtggatataaggttagattttgttgttagaatagggcgttgaggtaagaagtagtggtttacgtttataattttagtatttcgggaggttgaggattatttgaggttaggagtttgagattagtttggttaaaatggcgaaaattcgtttttattaaaaatataaaaattagatgggtatagtggtgggcgtttgtaattttagttacgcgggaggttgaggtaggaaaatcgtttgaatttaggaggcgaaggttgtatgagtcgaggtggcgttattgtattttagttagggagatagagtaggaatgttttttaaaaaaaaaaaaaaaaaaattaatagggagtcgagaaggttttgggaggtttgaggttcggttaagggtagtaaatataagtgtttatggggttttaggatagtgttggttataaggttttatgtgtgaatttaagtgttttgttttttgttgggatagttataggtaggttttatatttggtaagttaggtaggggttgggtttttggagatattttggtgggggtaaagtttatatgtaagtggttatagagttaggtagggcgtggagttgaggtgggtcgggtgcggtttgtggtttagaagagttagtgttttgttcgtggaggtagttgttattcgtttttagttggtttgttattagatgttagaaacggttttggaagtgaagtttgttatttttttagtggaggtaaagaagttaaagtatttaaaagtattttgtaaggattatacggattttttagtgggttattatattgaggttgtatttgtgtttatggttaatttgtgggttttggggttttttttcgttaggttgggttgggtatcgggagggtgagtttttaggtatatttatttttattcgttggatgtaaatttggtcgagttttttttggtttgcggttttttttggtttttattgattatgggagagagtttaggttttaaggttggttttagaggtttagtacgggtttaggttaggttagttttatgttaggttatatttagatatcggttttataatttttatgattttatatggaggtagtagaggggttaagagtacgggttttggaaatagatattggtttaaattttaattttgttattttgttttagatggtaggaagaaaaaaaaaaatttaaaattaaaaagtttttagcgttttataggagtgattttttttattaaagttcggtttttttagtatttgttggaattttttttttttttttttagttttgggttttgtttcggtgttttttttttttagaagtttgtttggatttttggtttgtgttaggtgtttttttcgggtttttttatttaagttttgattatttggggttgttattttttgggaatgggtttgttttttattgttaggagttttggaaaggtttaaggttgggtgagataggagtgtggttcggggtatagtagtatggttttcgggatatgagtttgcgggagatagtagagtttggaggttggtgtgggggttgttagatgggtcgtgggggaggtttaggttggggtggtatgggtttttaggatttggagttagtgggtggagggtgaaaggttagtattggatttaggataggggtggaaggttggggtttgtttttatttttatgttagtgaggaggtgtcggttatagggtcgagtgtggggttgagggttagggttattcgggggttggggtgggttgggggaggtggt

SEQ ID NO: 428 - DNA, 6233 bp, Artificial Sequence
  chemically treated genomic DNA (Homo sapiens)
ttggtttgtagggggtgaggtaggggtatggagtttttggacggatttttatcgatttgggggtttttattttatttatttttttagtggttggtttattgttaataattaattttttttattttttttttttttttttttttgagatagggttttagttatttacgttggagtgtagtggtgtagttttagtttattgtagtttttattttttaggtttaagggattttttcgttttagttttttaagtagttgggattataggtgtttattattacgtttggttaattttgtatttttggtagagacgggttttcgttatgttgttcgggtttgttttaaatttttgagtttaagcgatttttttattatggttttttaaagtgttgggattttaagcgtgagttttacgttcgggttttttatttttttttgcggcgtttaggtgaaatttgttttgttttttatttttagggtagtacggttttcggatttttaattgtttagttgtgtttattagtttttttgttggatttgtttttatgtgttttttaagtatttaatgttttatttttatttgttttatttttattttagggattttttttatatttaggattggtttcgtttataggttttttttttttaggttaatgtttagttttggtttttgtttgttttagataggattttttatttagaatttaaattgtttagttgttcgtttacgagatattttggaaggtttttggatatattttttttttattagtattgttttggatcggttatttttagtcggaggattttgttagagtagattttttagtgtttttttatagtagtttttggagttttcgaaaggaaaagcgattttttggttttttatttgtagagtttgtgttttattcgaagttgtatttcgtatttttttcgtgttaattttgtcgatattttttgtttaggggttttaggtttgtagagatttttttttattttgtttgttaaatatggagcgttttagattcgtgtattttgaggatgacgcggtcgattttagagttcgtaggcgcgtataggattttggggttgttggttatgaggtgtacgaggaggtttaggtttcgttgttttttgttcgtgaagtttagggagtttatgttgtttcgtcgtagcgtttcgggtttaatggtgttggggtaggggatagggggtcgggttaggtcgttagggggtagggtcgcgagagtgggaggggtatcgggatggggtaggatttcggggtatagggtagggcgttaaatgagatttttagagttagagtttagatttagggtttacgttttgtttttggttgttttttttatttttatttttttgtcgtttatttatcggttgttgttatataagatgggttgtaggtcggtttagagttgtacgaaggttgagtattggttttgtagcgtgttcggggtggttagtgttgtagtagagggtgcgttttttttagcggtggcgttggggtttatgattgtttttgttttagtgttattggtcgttttattcgtattattggttgggggttcgggggttcggttagtgtaggtattttggggtagtagtagggttagggtcgataggatatttatattttgtagaattttttgggtatttagtaggttttttagaagcgtttgtagttttcgtgggggtggcgtttgtggcgaggagttcgagtcgttgggggtatttaggtttagttgaggggaaataggtacgtgggtagtgcggggtgagatggattgtaggtgggtgataggttaggagtggagtagggagatagtagtagggagatataagttaggggtgttgggagggagtttgtagtttgggtaacgggagtttaggataggagttgggatggtgagtaggagtggggtattagttatggtgttattggatatttatttataggtagtattttacgtatagtttgggtttaggagttttgagttttttaagcggttttagttttttttttaatttaggtagtaagtagcgtagcgggtagtgggtaggtagggttttatttgttgggagattttggttacgtttagttggtttcggagtttagtagatagtttagagaagcgtttggtacgcgtagtagtttgtttattgtagatagtatttcggtagttttgtagggtttttttttgatttttaggtatagtgaggattcggtttagttttttcgagttcggcgtgtaggtgagttgttttaggagggtaggagttagtagtagtttttgggatgggtataggggttcgtggagttacggtaaggattttgtttttaattattagggttttaggttttattttgttttatttattggttggttttggggttgtttgggttttacgatatgtttttattttttatgtttgttatagatttttgggatttttttttttttttaggaggagttttaagttattaaaggggttttttttttatttacggagtagaagtatttttagaggtaggtagtattttaggtttattttatatatggatgtttttatttttattcggaataggggattgttttttaggcggttttagggtttttgatttttgtggaggttagattgtgaatttagggtagatgagggattaaagagtaggtggtagatttaggaggtgtgggggaatggtttagatggggtgtggggggcgtggtttagatggtgggggcgtggtttcgatggacgtgtgggggcgtggtttagatggtgggggcgtggtttagagagtgggggcgtggtttagatggtgggggcgtggtttcgatgtaggtgtgggggcgtggtttagatggtgggggtatggtttagagagtgggggcgtggtttagatggtgggggtaaggtttagacggtttgggcgtgatttaggttgagtattttgaggatggtttagtaattagggggcgtggttggggtagaagggagtggttagggttgggagttgtttttgttttatttcgggcgggtttatacgggcggttaagagtgtttgggtcgtgttattgggtagcgataagttttgcgttaggaaacgttagagtttttgcgggtttttggttatcgagtttagagagaaggaagatattggataggtaggaaggcgaggttgagaggtcgttgtattttggtaaggtgtttttatatgcgttcggagtcgagtttaatattatagttttgttattgtagtttgtgcgtggttgggaatttagtgtaggtggaggggtttagagtggatgtgggttttagtttagtgatagtagagttttgttcgtagttttgttttttaatttttttgtatagggtatatttgtggatttgtttaggtggtttttcgaggtgttcgggttcgtattgagggtttttagatgttggcgtagggtttcgagttttgagtttaggttgggtcgcgttgggttaaataggttgtttttttttattacgcggtttaggcgtttaagtagttgcgtgattttgtattatggcggatgttatttattggatgggttggggaggggtgggtgtttcgaggggcgggtgggtatttacgtggagttggcgtattgtaggaagtcgaattcgtttcgttggtcgttcgggtatagcgattgtatgataggtaggatgtcggtagacgttaggggcgtcgttgtgtagaaggttggtagatttacgggagagggtagggtcgggggtgaaaggggagagagagagagaggaatttagaaggggagggagatagaggtcgagaggagaaatttagagaaagttaggaaggagaagtagcgttagggagaaggcggtatagagttttggttttagttgggttataggttaagcgttttggggcgaatgattttagtaggttagaggttaaagagttatttattattttttttgttataatttttagagtatttttttttttttagttagtgtaggtttatatgttttggtatttttttttcgaaaacgttttaggtgtggtattgtttatagagtttaggggaggataaaggattttttttgggtagtgatttttgatttttggttagttggttagtagagtgagtgtaagagtttgaaggagtatgaagggagagtagttaggtcgttttagttttagtttaggttagtttagttttagtttagatttagtttagaagtcgaggtattttagttttagaaggtaaggttaggtagagagatgtcgttttagtttgatttaggtattagttgtgtttttaggtggtcgggttttttattttttattattttttattttattgtttgttattttttatttggagttagttgtttttgaggtcggtagggggttcgggagggttgttaatgtaagcggggagggcgtttaagttaggacggtttatgggtttttcgtagttgttgtttaggttagttaggaggaggtggtcgtttatttatagattgtatgttagtcgaggataagagattatgcggggagggagggggattaaaatagaatagaggagattagtgagtgtttatattattaggaagaggcgttggtattattattcgcggttataggttagtttcgatttttatagtttagttaggaggtacggtttaggattatataggggagtaggtatcgtattttagggatttcgggagtaggatattcgtgtgtagatgtgtatatatagcgtaggcgtgcgaggtgtcgcgttttttcggttgtgtttggggttttttgtcgtatttatttttttttacggagatggtgggttttttttgtcgtagttttagtaggataaagaatagtattagggggatgaagatttcgaaggttaggatttattggaaagggtgggtttagtgagggataggatagatttgtgttcgtttaggttttttttagttttttatagggttggtttagtttagataggattacgtgttttttggggttagggaaggtgggtataggtttttcggaattattgaaggtttgagttttttttagggtattgagggtaaggattgtttggtttagtaaattaggtttttcgtttttagtttatattgggtttacgtgttttttgaggagttttagggtttatagggataaatcggttagtttgtggtttattttgatttatgtatattttagtttattttttttttttttatttttagggttatttgggtaaaattttggggattatttgagttattagtttcgtttatattttttatattgtttcgggtttattttttttttattttttttttattaatatcggggtttggggagatgaggaggtttggttgagaggtttggtttgcgtttagggttttgagtttcggagaagatttggtaaggggtttaatagttttagtttttgaagtaaaggtatttttttttttttttttttttgagacggagttttattttgttatttaggttggagtatagtggtgcgattttagtttattgtaagtttcgttttttaagtttatattatttttttgttttagtttttcgagtagttgggattataggcgttcgttattatgtttagttaattttttgtatttttagtagagacggggttttatcgtgttagttaggatggtgtcgattttttgatttcgtgattcgtttatttgggcgtgagttattatatttggtttaaaggtatttttttttgttttgtttttttttttgattcggggtagttagttttgggttttggagtttagtttttttaggtcggtttttgttaatttaggttgggtattaaggtgagttttagtgggatttgcgtggagtgagaaagaggtgttttgtttattttatttgaaaattaaggattttatcggtttttgtgttttagtttttagtttagggaggaggaggagtttgagttagttattttttagagagttttcggtagattagttttttttgagatttataggatagaggggttttgttttttttagttcgagggcgagtatttagttcggaggtattttttgtttttatttttattttaaaattttttagagtttttagtgtgttgtgtggttcgggtcgagttttcggtttttggggtgggggcggttgttgtgtttattgtgtttggataata

SEQ ID NO: 429 - DNA, 6233 bp, Artificial Sequence
  chemically treated genomic DNA (Homo sapiens)
tattgtttaagtatagtaaatatagtagtcgtttttattttagggatcggggattcggttcgggttatatagtatattgggggttttgaagggttttgggatggggatgaggataaaggatgttttcgagttgggtgttcgttttcgggttagggagggtagggtttttttgttttgtgggttttagagagggttggtttgtcgagggttttttggagggtagttggtttaagtttttttttttttttgagttgggggttgggatataagaatcggtaaagtttttggtttttaggtgaagtgagtaaagtattttttttttattttacgtaggttttattagggtttattttggtgtttagtttgggttagtaggagtcgatttggggaaattgagttttaaggtttaagattggttgtttcgggttaggagaggggatagggtagaaagaggtgtttttgggttaggtgtggtggtttacgtttaggtgggcggattacgaggttaggagatcgatattattttggttaatacggtgaaatttcgtttttattaaaaatataaaaaattagttgggtatggtggcgggcgtttgtagttttagttattcgagaggttgaggtaagagaatggtgtgaatttgggggacggagtttgtagtgagttgagatcgtattattgtgttttagtttgggtgatagagtgagatttcgttttaaaaaaaaaaaaaaaaaaaggtgtttttgttttagggattggggttgttagattttttattaggtttttttcgaggtttagggttttgggcgtaggttaagttttttaattaggtttttttatttttttaggtttcggtattggtggggaggaagtgggaggaaggtgaattcggggtagtgtgggaagtgtaggcggggttagtggtttagatggtttttaagattttgtttaggtagttttggaggtggggagggagaagatgagttgggatatatatgggttagagtagattataagttggtcgatttgtttttgtaggttttgaggttttttagagggtacgtaggtttagtgtgggttggggacgggaaatttgatttgttgagttagataatttttatttttagtgttttggaaggggtttagatttttagtggtttcgaagggtttgtgtttattttttttggttttagggagtacgtggttttgtttgggttgggttagttttatgggaggttggggagggtttaggcgagtataggtttgttttattttttattgggtttattttttttagtgggttttggttttcgagatttttatttttttggtgttgttttttattttgttggggttgcgatagaagaagtttattattttcgtgaaggaaggtgagtgcggtaggaggttttaggtatagtcgggggagcgcggtatttcgtacgtttgcgttgtgtgtgtatatttgtatacgggtgttttgttttcggagtttttgaggtgcggtgtttgtttttttgtgtggttttgggtcgtgttttttggttgggttgtggaggtcggggttggtttgtggtcgcgaatgatgatgttaacgtttttttttggtgatgtgggtatttattggttttttttgttttgttttgattttttttttttttcgtatggttttttgttttcggttggtatgtagtttgtaagtgagcggttatttttttttggttggtttgggtagtagttgcggggggtttatgggtcgttttggtttgagcgtttttttcgtttgtattaatagttttttcgggttttttgtcggttttaggaatagttggttttagatggggggtggtaggtagtgaagtgggaggtggtagggagtgaaaggttcggttatttaaaggtatagttggtgtttgggttaagttgaggcggtatttttttgtttggttttgttttttagggttggggtgtttcggtttttgggttgagtttgggttgaggttgggttggtttgggttggggttggagcggtttggttattttttttttatatttttttaggtttttgtatttattttgttaattagttggttagaggttagaggttattgtttagagggggttttttgtttttttttgggttttgtaggtagtgttatatttgaaacgttttcggggggagagtgttagggtatgtgggtttgtattggttgaaaggaaaggaatgttttgggagttatggtagaaggggtggtgagtggttttttgatttttgatttgttggagttattcgttttagaacgtttggtttgtagtttagttggggttagggttttgtgtcgttttttttttaacgttgttttttttttttgattttttttaaattttttttttcggtttttgtttttttttttttttggatttttttttttttttttttttttttattttcgattttgttttttttcgtgggtttgttagttttttatatagcggcgtttttgacgtttgtcggtattttgtttgttatgtaatcgttgtgttcggacggttagcgagacgagttcggttttttgtagtacgttaattttacgtgagtgtttattcgtttttcggagtatttatttttttttagtttatttagtgagtgatattcgttatggtgtagggttacgtagttgtttgagcgtttggatcgcgtggtggaggaaggtaatttgtttgatttagcgcggtttagtttgggtttagagttcgaggttttacgttagtatttggaggtttttagtgcgggttcgggtatttcggggagttatttggatagatttataggtgtgttttgtgtagggaagttggggggtagggttgcgggtaaagttttgttgttattgggttgaagtttatatttattttgggtttttttatttgtattgagtttttagttacgtataggttgtagtggtagagttgtggtgttgggttcggtttcgagcgtatgtgggggtattttgttaaggtgtagcggttttttagtttcgtttttttgtttgtttagtgttttttttttttttggattcggtggttagaaattcgtaggagttttggcgttttttgacgtaaaatttgtcgttgtttaatagtacggtttaagtatttttggtcgttcgtgtggattcgttcgaggtaaggtagggatagtttttagttttggttatttttttttgttttagttacgttttttggttgttgagttatttttaggatgtttagtttgagttacgtttagatcgtttgaattttgtttttattatttgagttacgtttttattttttgagttatgtttttattatttgagttacgtttttatatttatatcggagttacgtttttattatttgagttacgtttttattttttgagttacgtttttattatttaagttacgtttttatacgtttatcggagttacgtttttattatttgagttacgttttttatattttatttgagttatttttttatattttttaggtttattatttgttttttggttttttatttgttttggatttatagtttggtttttataagggttaggagttttggagtcgtttagggggtaattttttgtttcggatggaggtgagggtatttatgtgtgggatgggtttggagtgttgtttgtttttgggggtgtttttgtttcgtgggtgaggaaagggtttttttggtgatttggagttttttttgggagagggggagggttttaggggtttatggtaggtatgaggggtagaggtatgtcgtgggatttaggtagttttagagttagttagtgggtggggtagggtgaggtttgaggttttagtggttggggataaagtttttgtcgtggttttacggatttttgtgtttattttaggagttgttgttggtttttgtttttttggagtagtttatttgtacgtcgggttcgggggagttgggtcggatttttattgtgtttgagagttagaagggagttttgtagggttatcgggatgttgtttgtagtgggtaggttgttgcgcgtgttaggcgtttttttgggttgtttgttgagtttcggaattagttggacgtggttaaggttttttagtaggtgaggttttgtttgtttattgttcgttgcgttgtttgttgtttgagttgaaggaggggttgggatcgtttggagagtttagggtttttgggtttaggttgtgcgtgggatgttgtttgtgggtgggtatttaatggtattatggttggtgttttatttttgtttattattttagtttttgttttgggttttcgttatttaggttgtagatttttttttagtatttttagtttgtgtttttttgttgttgtttttttgttttatttttgatttattatttatttgtagtttattttatttcgtattgtttacgtgtttgtttttttttagttgggtttggatgtttttaacggttcggatttttcgttataggcgttatttttacggaggttgtaggcgtttttgggggatttgttggatgtttagaaggttttgtaggatgtggatgttttgtcggttttggttttgttattgttttagggtgtttgtattggtcggattttcggatttttagttagtggtgcgggtggggcggttaatggtattggggtaggggtagttatgggttttaacgttatcgttgaggagggcgtattttttgttgtagtattggttatttcggatacgttgtagggttagtgtttagttttcgtatagttttgggtcggtttgtagtttattttgtgtggtaataatcggtaggtgggcggtaggggaatgggggtgaggaggatagttaggggtagggcgtgagttttgaatttaggttttggttttggaggttttatttggcgttttgttttgtgtttcgaagttttgttttatttcgatgttttttttattttcgcggttttgttttttaacggtttggttcggttttttgttttttattttagtattattgaattcgaggcgttgcggcggggtaatatgagttttttgggttttacgagtaaggagtagcggaatttgggttttttcgtgtattttatgattagtaattttaaaattttgtacgcgtttgcgggttttgaggtcgatcgcgttatttttaaggtgtacgggtttgggacgttttatgtttgataggtagagtgggagggggtttttgtaggtttgggatttttgggtagagggtgtcggtagaattgatacgggaggggtacggggtgtagtttcggatgggatataggttttgtaggtgggggattagggggtcgttttttttttcgggagttttaggggttgttgtgggaaggtattggagagtttgttttggtagggtttttcggttgggggtggtcggtttagggtagtgttggtggaggaggggtgtgtttagagattttttagagtgtttcgtgggcgggtagttgggtagtttgggttttgggtgaggggttttgtttggaataagtagaggttagggttggatattggtttgggaggggagggtttgtggacgaggttaattttgggtgtagagggggtttttaggatgagggtgggatagatgagggtggagtattgggtgtttaagggatatatggagataggtttagtaaaggagttggtgggtatagttgggtagttgggggttcggaggtcgtgttgttttgggagtggagggtaaagtaggttttatttgagcgtcgtagaaaggagtggagagttcgggcgtgggatttacgtttgaaattttagtattttgggaagttatggtgggaggatcgtttgagtttaggagtttgagataagttcgagtaatatagcggaagttcgtttttattaaaaatataaaattagttaggcgtggtggtgggtatttgtaattttagttatttggagggttgaggcgggaggattttttgagtttgggaggtggaggttgtagtgagttgggattgtattattgtattttagcgtgggtgattgagattttgttttaggaaaaaaaaaaaaaaaaaggtggggagggttagttgttggtaatggattagttattggggaggtgagtggggtgagagtttttaagtcggtgggggttcgtttagaaattttatgtttttgttttattttttgtaggttaa

SEQ ID NO: 430 - DNA, 6233 bp, Artificial Sequence; identical to SEQ ID NO: 428
  chemically treated genomic DNA (Homo sapiens)

SEQ ID NO: 431 - DNA, 6233 bp, Artificial Sequence; identical to SEQ ID NO: 429
  chemically treated genomic DNA (Homo sapiens)

SEQ ID NO: 432 - DNA, 6205 bp, Artificial Sequence
  chemically treated genomic DNA (Homo sapiens)
aaaatgaagaaaatgttgtaattttaagggtagagtttgtggatgaattttaatatatttatagatgtgtaatattttatttagatagagattgttgttttaaaattatgattatgattgtttttagagtgatattttttgtttttattttttttttattggtatatagtttatttatgaaatgggaattatgttgggtgaaggtttatgtgttatatttgagaagattttagttgggagggttgtttttggaattttaaggaggttgtgtaaagttataggagagaaagttatatttgttttttttttaggtgtggatttttgtttattagtgggtatagttttttttttgttttatatttgagagatataatatatgttttagtggttcgtgtattattgtgagtggtttcgtgtattagtaaagaggggagatgtggtttgaaaaagttgtttaggttattttattgtttatttttatagtaggtgaggtgtaaggtttattgatttattttattttttttattttgaaatacgatttttcgttagattttttatgtgtttaatgggatttatattggttattttttatttgttgagtgttttattagatgcgttttttatttttttttgttattttttgtgttttgggaggttaattttagtggattatattgattagtagttttttgttatttggttagagaaggaggtaggaggtgggagagatggtttggtattttttgattttaattttttttttttttttagtaggttatttttggtagtggttttttttttttatttgttggatggttttttttttatggttttaagtttattaggttttaataatatgattgttttttttttttaattttagggatggttattattttttgttgttattaggttttaggtgttttaagtttttttttaattttgtttatatttttataaggaatttttttattaaagtattattttttgaattatttgggttaaagtttgttttttgatggatttatgattgatttataggtttttggataaaaacggtaatatttgtatatttaatagttatcgattataagatatatttggtttttagaaatgttataatattattaaaaagtatggtttattataaagaaatgatggtaggtttatttaggtatgatggatatagaggatagtgtattattaagagatgtaagttgggtatagtggtttatgtttgtaaatttagtaatttgggaggttaaggcgggttgattatttgaggttaggagtttgagattagtttggttaatacggtgaaattttatttttataaaaaatataaaaattagtcgggtgtagtgacgtgtgtttgtaattttagttatttgggaggttaaggtaggagaattatttgaatttgggaggtagaggttgtagtgggtcgagattacgatattgtattttagtttgggagatagaggaagatattgtttttaaaaaaaaaaaaaaaaaaaaaaaaaaaaaaaaaaaaaaaaagatggagtttgtttttaaatttataaggttggaagtatggtaaatagtaaagcgttgggtttaaagttaggtgagatggttttgaatttaggttttgatatttatagttggaaaattttgagtaggttgttgtgatattttgtatttcggttttttttttggtaatttagagttattttgttgtttatattttttttagagatgttatgtgtaaggataaatgaggcgatgtgtgtgaaagggttttatgtattcggtgttgagatgtgtgggttagtatagttttgagggggtagttattttgggattttttattttttaggggttaaatattggttaggatggataaataaggagatcggtaaaagtaaggtaagagaggttttagagatttagagaggtaatgagaagatagtttatttatttttttttttttagtttatttatttttttttttttattttagttttttttttttttttttttttttttatttgatatggttttttttttaagttgagggatgtcgttgaggttatttgtttagtggagaattaaggcgtatttttaagtgtaggataaagttatgtattagataaagattatgttttttaagattagtaagagagagataaagatattttaataggaggtaggttatgttatgttttggggaaaaagaagagtttggtgtcggagaattttagttgtatttttaatagattattaatttattaattagtttttttggataagttatttaattttattgtttttttttgtaattagggaataatatttatttttagcgtttgttgtgagaattttatagaataagttttgtatttagtatggtgtttggttttgattttagtatttaataaagggttatttttatttttagtattttagggagttagaggattttttttaattggatgattttggaatgattttttaaggagagggtatttggagattgaattttttgtatggtaggtatagttcgttgaggtattcgtttaatcgggggaggttagtttcgtagtagtattagggtatagcgttgtgtgttcggcgttggggggattgaaagggggtgagcgggttgcggaacgtaagtttttcggcgggtagagggagttagtacgagttttggagtaggagagggtcgggattaaagcgttttgaggtaggttagggcgtattaaagggaggttagtgaattgtattagtatagatttcgtgatgttttgtagacgtttttaggttgttgggttttacgggaatttataagaaaggaaaggatcggggagttggtagggcgagggcgggcgagggcgcgagggtgcgttcgttcgcgcgttttcggcggcgtttggtcggggttgggcgcgttcgggattgcggaggtcgcggaggaagttttcgttttttttttttcgttttttttttttcgcgttattggaaggattgtgtgggagagatttagaagtattcggattttcgatcgttaggtgggggagggcggggtagtttttattgtttaaaggaaaattaaaagtgcgtttgttcgcgtcgtttcgatacgcggttgttattgggagggtttaggtagggcgttttggtcgcgtttttttttgtagtttttaagatttggttagggcggtttgaggttcgcgtggcgcggggaggggttgagaatcgagtgggaaaatgttacgattttttttgtgtttttttcgtttttatttttatttttagttttttgagttttgttgttgtcgttggggaaggattgattcgttttgcgttaaaggattgtatttatttagttttgttgggagaggcgcgtaaatatttaggtaagttaggacgtagggatggggagggggaagaaaaaagtaaagtatttacggtcggcgcgcgcgttcgtttgttttatattttttttttgggtttgcggagttggggattttgtttagcgggtagtagcggaggtgcgaggagtttggttggtttcgtttcgtcgcgtacgcgcgcgcgtttttggggatagcgtttaggatagaatgtgttttatagttgtaaataatgatttcgagtattgtttgggattatcgtattttggggtttttggggcggttagatgtcgttagtcgtttcggaaatgttagcgttttatatagagttttaggaaagtttcgcgttttcggttttatttttttttgttattaatatttttattttgtagataaggaaattgaggatagaagttgtgtgacggtgtatagcgagttgttagtaatggatttttaatattttttaatattgggtttttataaggattttgtggggtatagatggttggcgttatttaagaattgggtaaattgaggttaatatagattttggattaaaatttaagttttttgattttcgttatagtatttttttatttatatatattattattttagcggaaggattggagttttagagtagagaagggtttaaggttatgtttttaaatttttttattttataggaggaaattgaggtttagagaggttaaggaattcgtttaagattttatagttcgtaaatagcgtagtcgggcgtttttgttttaaggtttgtgttttgtattttgcgtcgcgttttttttagtttcgtttagcgagggaggaggatttaaatgttcggtaattcgcgttttgaatttcgttttaaaatagttgaagacgataacgttggggtatattttttcgttggttttttttttttttttttaattcgtaatagtttggagtttgtttataaacgttcgattatttttattagatgcgttttaattgttcggcgtatagggcggtcggaatgttttgattggttaattttatttttaaggttatttttaacgaattaattgtaggatcgaaaatatgaaaaataaaaaataaaaagggaatcggtaggtagatcgttacggagggaaaaataggtaggttagtttcgttcggcgtcgtgtttcgttaatattcggtcgtagggcggcgcgggtattttgcgcgttcggggcgttcgttgtattcggcggcgtcgcggagggcgtttacgatcgcgcgtagtcgcgttttttttgcgagcggttttgcgcgttcggttttcggtttttcggtggcgtcgtatcgaatcgttcgtttcgtcgttagggttgtgattattttttaaaattcggaggcgagattcgcgcggtcgttttcggggtttcgtttcgagtttttttttagggcgggggagaggtcgtagcgtattcgggagcgggcgagggaatttttttttttttacgttattcgaaagcgaggaaattcgtattcgcgttttttaacgtaaatgattatttttggtaacgtgcgttaatggaatagattaagggcgttgggttcggggggtgagcgggggattggggagggtcggggttgtttcggcgttttcgaatcgtgcgtggcgttcgttttcgttcgtgttatcgtttggttttttcgcgcggggtgcgcggttggcgttagcgcggtcgggagtcggggttgggaggggagagttgcgttcgtttttttttttttcgcgtttttttttttttcgcggtttttttttttcgttttttcgtgcgtttttttttgtaaggtggagtttggggttgacgtgagtgaatttatatggtatagggttggagaataaagagtgtgagttgaattcgtgttattgtagtgatttatttcgggtagagcgttagggtttcgagcgaattagcgagcgagcgaacgagcggcgttcggcggggatagaaagagggagagagagagagagagagagggagaggcgcggtcgggcgaggcgggttcgttcgggagcgggtttcggggaaggggtgcgggtttgggcgtcggagcggggagcggggtcgcgttttttttagcgttagttttatttgagttttacgagtcgttgtttttttggcgcgttcggggtcgcgggacgggcgtacgtcgtttttttttagttaagtattcgagtcgtttcgaaattcgggcggcgagtcggttacgggaagtttatttttcggttttttttttaaaaggaagaaatagaagttttttttagcggatagttttttttttcgtttttttggttttgtttgaaatcgggggtttttagggttggtaggttaggttcgttgggtttttaattttttttttaatttttaatttttgattgggtcgtgggttttcgttgagtttcggttgcgcgcgggggcgggagggcgcgcgtaggggagggatcgagagacgcgtcgattttttagagggagggatcgggtggataattggtttcgcggcgttcgtagagtcggaaagaagtgttgtaagggacgttcgggggacgttgtttttgaggtgtcgtcgtttttttgttttcgtttttcgcggtgggggagaaatttaggagcgaagtttagagttcgcggcgcggtcggcggacgaacgagcgcgtagtagtcggtgcgcggtcgcggcgagggcgggggaagaaaaatattttgtttttttttcggtttttatcgcggattatgtattaggattatttcgggaattttgatatttcg

SEQ ID NO: 433 - DNA, 6205 bp, Artificial Sequence
  chemically treated genomic DNA (Homo sapiens)
cgaggtgttaaagttttcgggataattttggtatatgattcgcggtgggggtcggagaggaaatagggtgttttttttttttcgttttcgtcgcggtcgcgtatcggttgttgcgcgttcgttcgttcgtcggtcgcgtcgcgggttttgggtttcgtttttgggttttttttttatcgcggagggcgaggatagggaggcggcgatattttaggaatagcgtttttcgagcgttttttatagtattttttttcggttttgcgagcgtcgcgggattagttgtttattcgatttttttttttaaaaagtcggcgcgtttttcggttttttttttgcgcgcgttttttcgttttcgcgcgtagtcggagtttagcggggatttacggtttaattaaaaattggaaattaaaaaaaagattaggagtttagcgagtttggtttgttagttttggggattttcgattttagatagggttaaaaaggcggaaagaaaagttgttcgttgggagaaatttttgttttttttttttagaaaaggagtcggagaataaatttttcgtggtcgattcgtcgttcgagtttcggggcggttcggatatttgattaggagaaggcggcgtgcgttcgtttcgcggtttcgagcgcgttagggggatagcggttcgtggggtttaagtagagttggcgttgagagggacgcggtttcgtttttcgtttcggcgtttagattcgtatttttttttcggagttcgttttcggacgggttcgtttcgttcggtcgcgtttttttttttttttttttttttttttttttttttttgttttcgtcgagcgtcgttcgttcgttcgttcgttggttcgttcggagttttagcgttttgttcgagatgagttattataatggtacgagtttaatttatattttttattttttagttttgtattatgtggatttatttacgttaattttagattttattttgtagggaggagcgtacgaggaggcggggggaggaggtcgcggaggaggaagaggcgcgggaggggaggaggcgggcgtagttttttttttttagtttcggttttcggtcgcgttgacgttaatcgcgtatttcgcgcgaggaagttaggcggtggtacgggcgggagcgggcgttacgtacggttcggaggcgtcgaggtagtttcggttttttttagtttttcgtttatttttcgggtttagcgtttttggtttgttttattggcgtacgttgttaaagatggttatttgcgttagaggacgcgagtgcgggttttttcgttttcgggtgacgtggagggagagggattttttcgttcgttttcgagtgcgttgcggtttttttttcgttttgggaaggggttcggggcggggtttcgagagcggtcgcgcgggtttcgttttcggattttagaaaataattatagttttgacggcgagacgggcggttcggtgcggcgttatcgggaggtcgggagtcgggcgcgtagagtcgttcgtagggagggcgcggttgcgcgcggtcgtaggcgtttttcgcggcgtcgtcgagtgtagcgggcgtttcgggcgcgtagggtgttcgcgtcgttttgcggtcgggtgttggcggggtacggcgtcgggcggggttggtttgtttattttttttttcgtggcggtttgtttatcggttttttttttgttttttgttttttatgttttcggttttatagttaattcgttaggagtagttttgaagatgaaattaattagttaagatatttcggtcgttttatacgtcgggtaattaggacgtatttaataagagtaatcgggcgtttataagtaaattttagattgttacgaattaaaaaaaaaaaaaaaaagttagcgagagggtgtgttttaacgttgtcgtttttagttgttttggagcgaagtttagggcgcgggttgtcggatatttgggtttttttttttcgttgggcggggttgggaggggcgcggcgtagggtatagagtatagattttagagtaggaacgttcggttacgttatttacgagttgtgagattttggacgaattttttaatttttttgggttttagtttttttttataaagtgaaggagtttggagatatgattttaggtttttttttgttttggagttttaattttttcgttgagatgatggtgtgtgtgaatggagaagtattgtagcggaagttagggaatttaggttttggtttagggtttgtgttagttttagtttatttaatttttaagtagcgttagttatttgtattttatagggtttttatgaggatttaatgttaagaggtgttgagagtttattgttgataattcgttgtgtatcgttatataatttttgtttttagtttttttatttgtaaagtgggggtgttggtagtagagaaaaatagagtcgggaacgcgaagtttttttggggttttatataaagcgttggtattttcgggacggttggcggtatttggtcgttttaagggttttaagatacggtaattttaaataatattcggggttattgtttatagttataaaatatattttgttttgaacgttatttttaaggacgcgcgcgcgtgcgcgacgaggcgaggttagttagatttttcgtattttcgttgttgttcgttggatagagtttttaatttcgtaggtttaggagaggggtgtggggtaggcggacgcgcgcgtcggtcgtgggtgttttgttttttttttttttttttttatttttgcgttttggtttgtttgggtgtttacgcgttttttttagtaggattgagtaaatgtagttttttgacgtaaaacgaattagtttttttttagcggtagtagtaaaatttagaaaattgggggtgggggtagggacgggaggggtatagaagaaatcgtgatatttttttattcggtttttagttttttttcgcgttacgcgggttttaggtcgttttagttaagttttgggggttgtaaagggaggcgcggttaaagcgttttgtttgagtttttttagtagtaatcgcgtgtcggagcggcgcgaatagacgtatttttggtttttttttgagtagtagaggttgtttcgtttttttttatttggcggtcgaaaattcgggtgtttttgggttttttttatatagtttttttagtaacgcggggggaaagaggcgggggaaggggagcgggagtttttttcgcggttttcgtagtttcgggcgcgtttagtttcggttaggcgtcgtcgggagcgcgcgggcgagcgtattttcgcgttttcgttcgttttcgttttgttagtttttcggttttttttttttttgtgggttttcgtaaagtttagtagtttggagacgtttgtagagtattacggaatttgtgttgatgtaatttattagtttttttttggtgcgttttggtttgttttagagcgttttgatttcggtttttttttattttagaattcgtgttggttttttttgttcgtcgggaggtttgcgtttcgtagttcgtttatttttttttagtttttttagcgtcggatatatagcgttgtgttttggtgttgttgcgggattgatttttttcggttgagcgagtgttttagcgaattgtgtttgttatatagagaatttagtttttaagtgttttttttttgggaaattattttagaattatttagttagaaagggttttttggttttttggaatgttaaaaatagaggtgattttttattgagtgttaaaattagagttaggtattatgttgaatatagggtttgttttgtgaaatttttatagtaaacgttggaggtgggtattattttttggttgtagaagaagatagtgagattgaataatttgtttaggggaattggttagtgagttagtgatttgttaggagtgtagttgagatttttcgatattaggtttttttttttttttaggatatggtatgatttgttttttgttggaatgtttttgttttttttttattggttttgaaaggtatggtttttatttggtgtatgattttattttatatttagaggtgcgttttaattttttattgaataaatagttttagcggtattttttagtttagagaagaggttatgttaagtgagggaagggaaggggaagagggaagttggggtgggaagaaaagggtagatgagttgggaagaaaagggtaggtgagttgtttttttattgtttttttgggtttttgagattttttttgttttatttttgtcggtttttttgtttgtttattttggttagtgtttggtttttgagagatgaggaattttagaatagttgtttttttagagttgtgttggtttatatattttagtatcggatatatgaagtttttttatatatatcgttttatttgtttttatatatgatatttttgaaagggatatagatagtagagtgattttggattgttagaaaggaggtcgaggtgtagagtgttatagtagtttatttaaaattttttagttgtaagtgttagagtttgagtttaaagttattttatttgattttaaatttagcgttttgttgtttgttatgtttttaattttgtaagtttaggagtaaattttatttttttttttttttttttttttttttttttttttttttttttggagatagtgtttttttttgttttttaggttggagtgtagtgtcgtgatttcggtttattgtaatttttgttttttaagtttaagtgatttttttgttttagttttttaagtagttgggattataggtatacgttattgtattcggttaatttttgtgttttttgtagagatggagttttatcgtgttggttaggttggttttaaatttttggttttaagtgattagttcgttttggttttttaaattgttgggtttataggtatgagttattgtgtttaatttatattttttaatgatatattgttttttatatttattatgtttgaatgaatttgttattatttttttatagtaagttatattttttgatgatattgtaatatttttgaaagttagatgtattttataatcgatgattattgaatatgtaagtgttgtcgtttttgtttaaagatttgtgaattagttatgggtttattaggaaatagattttaatttagatggtttaaaggatgatgttttaatggagaaattttttatagaggtatgggtagagttaagagggaatttgaggtatttagagtttagtaatagtaggaaatgatgattatttttagggttgaaaagaggaggtaattatgttattggagtttagtgagtttgggattatgaaagaggggttatttagtaggtagagggaaggagttattgttagagatagtttgttgaaagggagggaggagttggggttaagaaatattagattattttttttattttttatttttttttttggttaaatggtagggggttgttgattaatgtagtttattaaggttggttttttagggtatagagaatggtaaagaagggtagagagcgtatttagtggggtatttagtaaatggggaataattagtatagattttattaagtatatgagggatttaacgagggatcgtgttttagaatgaaggaaataaggtaaattagtgagttttatattttatttattgtggaagtgaataatggaatagtttgaatagtttttttaaattatattttttttttttattgatatacgaagttatttataatgatatacgagttattgaggtatgtattgtattttttaggtgtggagtagagaaaaggttatatttattgatgaatagggatttatatttggggaagaagtaagtatgatttttttttttgtggttttatataatttttttgaaattttaagagtaatttttttagttaaagtttttttagatgtgatatataagtttttatttaatatgatttttattttatgaatgggttatatgttaatggagaagaaatgaagataagaaatattattttagaggtaattataattatagttttaaaataataatttttatttgagtggggtattatatatttgtgggtatgttaaagtttatttataggttttgtttttaggattatagtattttttttatttt

SEQ ID NO: 434 - DNA, 6127 bp, Artificial Sequence; identical to SEQ ID NO: 422
  chemically treated genomic DNA (Homo sapiens)

SEQ ID NO: 435 - DNA, 6127 bp, Artificial Sequence; identical to SEQ ID NO: 423
  chemically treated genomic DNA (Homo sapiens)

SEQ ID NO: 436 - DNA, 6161 bp, Artificial Sequence; identical to SEQ ID NO: 400
  chemically treated genomic DNA (Homo sapiens)

SEQ ID NO: 437 - DNA, 6161 bp, Artificial Sequence; identical to SEQ ID NO: 401
  chemically treated genomic DNA (Homo sapiens)

SEQ ID NO: 438 - DNA, 6174 bp, Artificial Sequence
  chemically treated genomic DNA (Homo sapiens)
aaaatttaaaagggttagaaagagtttagggatggtaggggaaagttgtaggaattgatataaatatttgtagagggagtagaataattagtaattttaaggaaggataggaaataaaaggttaagtttgatagaataaatattaagattgaaatttaaagatgttaatgtaaaaatttgtaataaggtttgggaattattaatagaaataaaatagtaagtatttgttttattgatatattaggtttagatttgtgtgtgtaataagtaagtttaataatagtattatggttagattagtttgtttttttaagttattattttataatttattaagtaaataagggattaaatgtttttttatttatttgatgtgatttttttatatgtatatagttaatgagttttatttagttgaaaattttttagtaaaagttttaaagatgagtttatgaatttattttaaattttattagttaaattaggttaaatggaaggaatttaaatgagtattgtttaattagagtttattatttgtaagttattagtaattttaaaattttatttagatttaattattgaaaatttgtatataatgaagtgaaagaatttttatttattaattttttaattttaggtttttaaagaaaaatttaaggaatatttattaaaattagataagaaaatttaaatttgtatagttattagatttgttttattataattagtttgtatatagttatatattaattcgttttgtatatattttagaattgaatagaataaagtttagtatagaaaagttgtaagaaataggtttttaattacggaagttgtaaagtttaaaagggtatgaaaaaaattaatgtaaattcgatatttttttcgttttaaagaaatagattttttgtaaaaatatatataatttttataaatatatttataagttgttttaagaattgaggatatttatatttataattaattattgagtttttcgttaagtattattggtgataaattaggttaataaagtaagaattatggaaattaagttaaagtataataggtataaaagttttgaatatttggattttttaagaagtatattgggaaagttaattagagagaggaaaagttttttttgtatagtattgaggtttatagttatagttttattatttgtaatttttatataggttattggtatttttagtgttttttttaatattatagtaaattaatgaattcggcgggtaattaattttatgatttgtttggttattggttatttttttgtttttaataaggaaattaagtttttttattttattatttttattaaatttaaaagtttttttttatagttttttaaataaagtttgtttgttgttgaaattgaattttgttttttttagatagtgattttttaattaatggggagtattttttttatgtatttatttttgttagttataatttttttgttatttgtttttttggttaggttgttagggtgtaattttaggaagttatagtttggagtttaattgtataaattggttttggtggtggtggtggttggttaaaagttaattattgtatttatagtaaggttattttattagatatgttaaattagtttttattttagtaatatttgtaaaagttagtagtatatttttgatgttattttttaggttttttatatggaagaattttataaatttattttagaaaataaaaaagaaaagtatatttttaagtatgggtttttgtttttttataatattattatttagagagaaggtaaattaaaatatttaaggtttttttttaaagtaatagtaaattaattattatttatttcggggtaaaaaaagaaaataagttttttagttttttaagcggggatttatgataattaaattttattttatagtattattttggttttattaggatttattttaataaaaggatttttagagtttttatgaggtaaaagacgaaaatttttatttttaaatttttattatttaatattttagtaacgttttaattgcgtagattagttttttttaacgtagttaagtatattttgtattagatttgggtttgtttaaaacgtaggttttattttatattttttttattaaaataggtatcgttttaggaattattttagttatttttttttggtgatttatttttttatggtttgaatttattgaagagtatttaattgaattggaataaaaaattgtttagagaaaattaagatttttgatataatttaagatcgttatattattatttttaaggatttattatttaaattaatattaaataaataatggttttttagttagagtttgtaaatagtcgtgcgttataaaaatttttagatatttttatttttttaaaaaaaattttttattttatttttattttaaggttttttttatttttaaggtaaatttatttagtttttttgtttaattagttagtttcgttttgtttttacgagaacgtttgtgatattttttgttaatggttcgatgtagtttttttggtttatggtttttaagtgtttagttataaaggtattaaaagaaatgagagttataattttgttttagtttgttacgtcgtcgttgaaaatatggattattattcgagataacgattttatatcgttttcgtttttgatgtttagttttcgaagtatgtttgagaaagaaaagtatgtaggtttttacggttttttttgtttaaatcggcgtaagattcgtttgtttattcgcggcgggaaaatcgttattgggatttatagaatttaggttgattttatttgaaattgatattttatttttttcggtttttgaataagagttgttatttttaaaagaattaagatgggcggaaataatgatttatggttagaatattttggttttaggaataggatgagatacgttttaatattgattcgtttcggtttttaatttatttttggcgggtgagttcggggagagatggaaaaaagggagtgaggttttggcgattaatgaatttttttattttggaaggtcgtttcgtggttgcgttgtacgttatttttaattcgtcgtaaggtttttagcgtttttttgttggtggttttagatttgtttattggttttgtgtttttggcgtcggtggtttgttttcgaaggtatcgagagataatttttagcgattgtcggtataattcgtttttttttttttttgttggcggcggcgtcgagggtagtgattcgttcgtattggtgttattattagatttttcgattaattttagtagcggtaggatagtcggtcgtttttcgagaggtttcggttcgtattcgtttagttttttttcgggcgatatgatggcgttagcggtcggggtttttatttttttaagcggcgtcgcgcggcgggtgggcgcgaagaaaagtagtttcgcgggggtcgcggtgacgtcggggatttcggcgttaatgggcggcggtcgcgcgatttttcgggagtttggcgtgagggtggacggggggtttgcgtcggcgttttcgttaattatcgcgtcggttttttttttttttatttttcgtcgggtcgaggttttttttttcgtagttaaaagtcgttttttcgggcgggtggcgtcgtcgttgtcggtttttaagtcggtttttttatagtagaggttgagttcgattatcgcgttttttttgaggttaaatattgttagtcgtcgtcgtcgtttggttgagaaaattggggaagatttcgattttttattggaaggaagcggaagtgagaagtggcgagtagtttttttattacggttttagggcggttagttttacggggtggcgttagcgaattttttttttttaaaaaaagtatttttataaaaggggaaaggggcggtagttttcggagggttgcgtacggtatttattagttgttcggtcgggtcggggcggggtcggggtcggggtcggggtcggggtttgagtcggggtttgagcggggtttttcggttttcggaggttttgagtgtcggttacgtaacggcggtttcgagcgtttggggtttttttagagtttttgggttcgagttttttttatgagtatttcgggttttttcgtggttatttttgtgtttttttgagatttgatttgtgagttttttttgttggttttcgttagaggttttttattaaattaaaattttaattattgattaatataggggttgaaggaagaggacggggaagtttagtgatggatgggaataatagttttagatgatagggataattaagagggtatagttggggatttgtggttattttgtatagttttttatttttagtttaatgtttggaaatgaggatgttttacgtgttattttaaagaattatttatgtaagtggattaagttaaaattgttatagttaaattatttttgtttttttgtttgttttttttatttttgttttatagtttttggtgttatttatatataggttttaatttattagaatttcgtttgagagttttgatattattttttgtttgttttgagatagtttagttttgttgtttaggttggagtgtagtggggcgatttcggtttattataagttttattttttacgtttagacgattcggtattttagtttttcgagtagttgggattataggcgtgcgttattatatttggttagtttttgtatttttggtagagatggggtttttacgatgttggttaggttggtttcgaatttatggttttaagtgatttgtttgtttcggttttttaaagtgttgagattatagttgtgagttatttcgtttagttgattattgtatttttagtagagatgtgttttatgcgcgtttgtgtgaagatattattaaataggttttgtgtgagtaatatggttgtttattttatttgggtgtaggcgggttgagttcgaaaagagagttagtaaagggtgatggattattattagtttttataggttttgggataggtggtgaagttgagagtaatgttttgtgggtaggggtggattttataaagtatatttttaagggtggggagaattataaagaatttttttaagggtgggggagattataaagtatattgattagttcgggtggggtagaaataaattataatggtggaatgttattagttaaggttatttttattttttttgtggatttttagttattttaggttatttggatgtatacgtgtaagttataggggatgcgatggtttggtttgggtttagaggtttgataatgtggttttattatgttggttaggttggttttaaatttttggttttaggtgatttatttgttttagttttttaaagtgttgggattataggtgtgagttattgtatttagttgatattatttatttttgtattgataataaggtatatttgattttagaggtttgtaaagtttttgagaataaggatttttttatatgttatgtatgttagttaacgttaattaaagtagtttttttgttaaaagatttgtaaaaataatagttaaaatttaaaagtaaggtgttgagagatataggaaaggtgagtaagtttattttttatttatttttttgagatgaggttttgttttgttatttaggttggagtgtagtggtattattagtgtttattgttgttttaattttttgggttgaagtgatttttttattatagtttcgcgagtagcgaggaatataggtgtatgtttttatatttggttaatttttttattttttgtagagatggggtattattattttgtttaggtcggttttgaatttttggatttaggtgatttttttattttggttttttaaagtgttgggattatagatcgggttttgtgttttatgttaataattttagtattttgggaggttgaggtgggtggatcgtttgagtttaggagtttgagattagtttgggaaatatggcgaaattttgtttttattaaaaatataaaaattagatgggtgtggtggtgcgtatttgtaatattagttattttggaggttgagataggagaattgtttgaatttaagagacggaggttgcggt

SEQ ID NO: 439 - DNA, 6174 bp, Artificial Sequence
  chemically treated genomic DNA (Homo sapiens)
atcgtaattttcgttttttgggtttaagtagtttttttgttttagtttttagagtagttggtattatagatgcgtattattatatttatttaatttttgtgtttttagtagagatagggtttcgttatgttttttaggttggttttaaatttttgggtttaagcgatttatttattttagttttttaaagtgttgggattattggtatgaggtatagagttcggtttgtaattttaatattttgggaggttaaggtaggaggattatttgagtttaggagtttaagatcggtttgggtaaaatagtgatattttatttttataagaaataaaaaaattagttaagtataggggtatgtatttgtgtttttcgttattcgcgaggttgtggtgggaggattattttagtttaggaggttgaggtagtaatgagtattgatggtgttattgtattttagtttgggtgatagggtaagattttattttaaaaaaataaataaaaagtgagtttgtttattttttttatgttttttagtattttgtttttgaattttagttattatttttatagattttttaataaaaaggttgttttaattaacgttaattaatatatatggtatataagaagatttttgtttttaagggttttataaatttttagagttaaatgtgttttattattagtataaaaataaatggtgttagttgggtgtagtgatttatatttgtaattttagtattttaagaggttgaggtaggtggattatttgaggttaggagtttgagattagtttggttaatatggtgaaattatattgttaggtttttgagtttaagttaagttatcgtattttttgtgatttgtacgtatatatttagatggtttgaagtaattgaagatttataaaagaagtaaaaatagttttaattgatgatattttattattgtgatttgtttttgttttattcgaattgattaatgtattttgtaattttttttatttttaagaaggttttttgtaattttttttatttttgagaatgtattttgtgagatttatttttgtttataaaatattgtttttaattttattatttattttaaaatttgtaagaattaatgataatttattattttttgttgatttttttttcggatttagttcgtttgtatttaggtgaaataaatagttatgttgtttatataaagtttgtttggtggtgtttttatatagacgcgtatgaaatatatttttattaaaaatataataattagttgggcgaggtggtttatagttgtaattttagtattttgggaggtcgagataggtaggttatttgaggttatgagttcgagattagtttggttaatatcgtgaaaattttatttttattaaaaatataaaaattagttagatgtggtggcgtacgtttgtaattttagttattcgggaggttgaggtatcgaatcgtttgaacgtgggaagtggagtttgtagtgagtcgagatcgttttattgtattttagtttgggtaatagagttagattgttttaaaataaataaaaaatggtgttaagatttttagacgagattttaatggattaaggtttatatgtaaatagtattaaagattatggaatagagatgggagaagtaagtagggaggtaggaatagtttagttgtggtagttttagtttagtttatttatataaatggttttttagggtagtacgtggagtatttttatttttaaatattggattgagagtagagagttgtgtaaaataattataagtttttaattatgtttttttaattatttttattatttaagattgttgtttttatttattattgaattttttcgttttttttttttaatttttgtgttagttaatggttgaaattttgatttggtaaaaaatttttggcgaaaattagtaaaaagggtttataaattaggttttagggaagtatagaggtagttacgagaaggttcgaggtgtttatggaaagagttcgagtttaggagttttgggaggattttaggcgttcggagtcgtcgttacgtaatcggtatttagagttttcgaagatcggaaggtttcgtttaggtttcggtttaggtttcggtttcggtttcggtttcggtttcgtttcggttcggtcgggtagttggtaggtgtcgtgcgtaatttttcggaagttgtcgtttttttttttttttatgggaatattttttttaaaaaaaaagagttcgttggcgttatttcgtaggattggtcgttttaaaatcgtgataaaggagttgttcgttattttttattttcgtttttttttagtaaggagtcggggttttttttagtttttttagttaggcggcggcggcgattggtaatgtttggttttaaaagaaacgcggtaatcggatttaatttttattgtgggggggtcggtttgggggtcggtagcggcggcgttattcgttcgggagggcgatttttggttacggagaaggaggtttcggttcggcgagagatagggggaggggaggtcggcgcggtgattggcggaagcgtcggcgtaagtttttcgtttatttttacgttagattttcggagggtcgcgcggtcgtcgtttattggcgtcgaggttttcgacgttatcgcgattttcgcgaggttgttttttttcgcgtttattcgtcgcgcggcgtcgtttgaggagatggaagtttcggtcgttgacgttattatgtcgttcgaagaggagttggacgggtacgagtcggagtttttcgggaagcggtcggttgttttgtcgttgttggagttggtcggggaatttggtaataatattagtacggacgggttattattttcgacgtcgtcgttagtagaggaggaggaggacgagttgtatcggtagtcgttggagattatttttcggtattttcgggagtaggttatcggcgttaaggatataaagttaatgggtaggtttggggttattagtaggaaggcgttggagattttacgacgggttggggatggcgtgtagcgtaattacgagacggttttttaaggtaagggggtttattaatcgttaaggttttatttttttttttttattttttttcggatttattcgttaagggtgggttggaaatcgaaacgagttagtgttgaaacgtgttttattttatttttgaagttagaatattttggttatgagttattgttttcgtttattttgatttttttggaaatggtagtttttgtttaaagatcggaaagggtgggatgttaattttaagtggggttaatttgagttttgtaaattttagtagcgattttttcgtcgcgggtgggtaggcgaattttgcgtcggtttagataaaggaggtcgtgaggatttgtatgttttttttttttaggtatgtttcggaaattggatattaaaaacgaagacgatgtgaaatcgttgtttcgagtgatgatttatgtttttagcgacggcgtaataaattggggtaggattgtgatttttattttttttggtgtttttgtggttaaatatttgaagattataaattaagaaagttgtatcgaattattagtagaaagtattatagacgttttcgtaaggataaaacgggattggttagttaaataaagaggttgggtaagtttgttttaaggatgaaaggggttttggagtggaagtagaatgaaggattttttttagagaggtggggatatttaaaggtttttatgacgtacggttgtttgtaggttttaattaaaggattattgtttatttgatgttgatttaagtagtggatttttagagatagtggtatggcggttttgaattgtattaaaaattttggttttttttaggtaattttttgttttaatttagttgaatattttttagtggatttaaattatgaaaaaataagttattaggggaggatagttgaaataatttttaaggcggtgtttgttttaatggagaagatatggggtggagtttgcgttttaaataaatttagatttgatgtaggatgtatttaattacgttgagaaaaattgatttgcgtaattgaggcgttattgaaatattaggtggtggagatttgagaataagggttttcgttttttattttatgggaattttggaagtttttttgttaggataaattttaataagattaagatagtattgtaaaatgaagtttaattattatgggttttcgtttaagaaattgaagaatttattttttttttttgtttcggggtgaataataattggtttattattgttttagggggaaattttagatattttaatttattttttttttggatagtagtgttgtaagagagtagaaatttatatttgaaaatgtgttttttttttttgttttttaggatgggtttgtggagtttttttatgtagaggatttagaaggtggtattaggaatgtgttgttggtttttgtaggtgttgttggagtaggagttggtttggtatatttaataagatagttttattgtaagtgtaatagttgatttttaattaattattattattattaaaattagtttatgtagttggattttaagttgtaattttttagagttgtattttagtaatttagttagaaaagtaagtggtaagaggattatggttaataagaataaatatatgggaagagtgttttttattgattgaagagttattgtttgaaagaagtaaagtttagttttagtaataaataaattttgtttgggaagttatggaggaggatttttagatttagtgaagatggtagggtggaaagatttaatttttttgttgagaataggaaagtggttagtagttaggtaagttatagaattgattattcgtcgaatttattaatttattgtagtgttaagagaagtattaagaatgttagtgatttgtgtaaaagttataagtaatagaattatgattgtaagttttagtattgtataagggaagttttttttttttttaattagtttttttagtatattttttagaaagtttaagtgtttaggatttttatatttgttatattttggtttggtttttatgatttttattttattagtttagtttattattaataatatttgacggaaggtttagtaattagttatgaatatggatatttttaatttttaagatagtttgtaaatgtatttgtaaaaattgtatatatttttatagaaagtttatttttttgaaacgaaggaagtatcgaatttatattagttttttttatatttttttgaattttgtaattttcgtaattaggaatttgttttttatagtttttttatgttaaattttgttttgtttagttttagagtgtatatagaacgaattgatgtgtaattgtatgtagattggttgtagtggaataaatttgataattatgtaggtttaaatttttttatttgattttggtaagtattttttaggtttttttttgaaaatttgggattgagaggttgatgaatggaaatttttttattttattatatgtaagtttttaataattaggtttaagtggagttttaaggttattgatgatttataaataatgggttttgattgggtaatatttatttgagttttttttatttgatttaatttaattggtgaaatttaaagtgaatttatgggtttatttttaaagtttttattaaaagatttttagttgaatggaatttattagttgtgtgtatataaaaagattatattaggtggatggagagatatttgattttttgtttgtttaataaattataaaatgatggtttggaaaagtaggttagtttaattatggtgttattattaggtttgtttgttatatatataggtttaagtttagtatgttaataaagtaaatatttattgttttgtttttattaatgatttttaaattttgttgtaagtttttgtattggtatttttggattttagttttgatgtttgttttattagatttaattttttattttttgtttttttttgaaattgttgattgttttgttttttttatagatatttatattaatttttatagtttttttttgttatttttgaattttttttagtttttttagatttt

SEQ ID NO: 440 - DNA, 6244 bp, Artificial Sequence
  chemically treated genomic DNA (Homo sapiens)
tgaatattttggggagttgggaaagaatatagatttttgggttttattttagagattttgatgtaagaggtttgatgggaaggaggggttgaggttttgtatttttttttttttgatatggagttttatttagtcgtttaggttggagtttagtggttcgattttggtttattgtaattttcgttttttgggtttaagtaattttttcgttttagtttttttgagtagttgggattataggtatatattattacgtttggttaattttttgtattttagtagagacggggttttatcgtgttagttaggatgattttgattttttgattttgtgatttatacgtttcgattttttaaagtattgggattataggcgtgagttattatatttagtcgaggttttgtatttttaataagtttttttgggataggagttattgtagtatattattaattttttttaagttttaataatttatgttagtagattttaaataaattatatgggaagggggagggagttttttgtggaatattatgaaatgcgaataaggtgaattttttttttatataaattagaaggaattttagtagtaggaaatgattatattttatatatggatatttattattaaagtattaaaagatagaaaatatttttgagaaattatattagtaagatggaaattgttgaaatttaagtgtttaatgtaataggagaagttgtttgattggttgtttagagatatatagaggtgtataaatttatattttgatatttatttattttttagtaggttttaggagtttaagatttgggtaaaaatttggaaatatagttattaattttgttttgttttgttgttatttaatagaatatggttgtttaatttagtggtttttaggaagggagttagagaataataggaaatttttattatatttagttttgtttttttgtttttatgatagagttagtgttaggttaattatgaaagtttgttagttttagtataatgttttgaaagaatgcgtatgtgattttaagagggttttgataatatttttgttgagtgagatatatatgagggtaattatagtaaagaataaggtttaagttagatagatagatagatttgggtttgagtttataataatacgatttttttttttttttttttttttttttttttttttttttttttttttttttttttttttttttttttttttttttttttttttttttttttttttttttttttttttttttttttttttttttttttttttttttgacggagtttggttttgtcgtttaggttggagtgtagtcgtacgatttcggtttattgtaagtttcgttttttgggtttatgttatttttttgttttagtttttcgagtagttgggattataggtatttgttattatgttcggttaattttttgtatttttagtagagacggggttttatcgtgttagttaggatggtttcgatttcgtgattttttattttcggttttttaaagtgttgggattataggcgtgagttatttcgtttagtcgattttttttttaagtaagattgttgtgtggattaaaagagaaaaattagtgtgaaatttattagtagtgtttgaagttttatatatgagattattttttggttgtattttttttataggtaggaggagatttgttagaggttatatagaagtttagtggtagagttaggataagaatttattattttgatattagagtaatgaaattttttatgagtttttatcgttttataattttgaaattttaatatttgtttgttgttgggtttttatttagttggtaaatattgatttgtatttaatgttatttttttgattaggtattggggatatggaggaggataagatataaagataattattatgggttaggtgtggtggtttattcgtgtaattttagtattttgtgaggtcgaggtaggcggattattcgaggtcgggagttcgagattagttttattaatatggagaaattttatttttattaaaaatataaaattagtcgggtttggtggcgtatgtttgtaattcgagttatttgggaggttgaggtaggagaatagtttgaatttaggaggtggaggttgtagtgagtcgagatcgtgttattgtattttagtttgggtaataagagtaaagttttgttaaaaaaaaaaaaaaagaaaaaaagaaagaaagaaaagaaattagatgaaggtgttaagtgggttttttgttttttttattttatagttttaatttttttttggttttatttatgttttgttgatgatatttaaatttatatttttatagtaatatttttttatttttaaattagaatatttaatttttttttgcgagtttttatataattagaatagaatttgttgttgttttttataaatttgttttttttttgatgaattttatttaggtatttaagttttgagtatttgttttttatattttattttttttaaattttatggattttgttgtttaagtatatagtattttgaatttttttatttatttttatttttagagtttgtagtttagtttcggttattgttattttttttttgggcgtgaaatagatttagagttaggtgtttttagtgattaggatatgttggtttttgttttttttttaggatttggtacgtgttgttttttttttggaattttcgttattatttttgatttgggttcgcgatttcgtttcggaagttgtttttgtttttcgtttcgggtttttatattttatagtttattatttttttttgtatcgtaggaatagtgtttgttttgattatttttttatttagtaattagtcgcgtttagtattgtatttatttattatatgaatgaatgaagaatgaatgatagacgggttagattatcgaaagttttaaaacgtttataaggaaatcggtcgtattttatcgttaggatttaggttagtgtttggaaaggtttcgaggtaacgatacggtcggttgtttaggttggttttattttacgggttcgttcgtttttattttggataaagtttggttttaatcgtttttcgttgtagttttaattggttttagttttattggtttatatgtttcgatatcggttcgatttaaaggtagaagattcggaaagtttgggattagtgcgcgttagtttaatttttttattagatattagttgtttcgtttttacgaagggttttagttataaggtttttcggttttcggaattttaattttttgttagattttttttttatatcgtttttttcgaggaaacgtgatttatgtcggtcgtcgtggtcgttttaatttattagttcgtttttttttcgcgaacggttttttcggttttcgcgtcgttatttaggtttagggggcggggtttcgatgcgatttagtgcgtttgcgttgatcgtttcggttaggtttaaagagtaggcggggtagagatttatatttttggcgttgagtcgaggttaggaaggggcggtcgatgagagggcggttttagtattaggagtgcgtcggttgtattttggcggatggattttgggaaggaggggaggggattatcggggtcggcggggagttacgggtatgtatagtttatagagcgttagagttgacgacgattagtggaagatggggaaattaatgtttagagcgggatagttattattttaggggtatataattgataagggtgggggtggtcgtggtaatggaggttttaaggaggggtaggggtttatagtacgttaggggttgagtttgtattagaatttaggtttgttttttagtttagttaagttttagaaaaatttttttgattttatttatttttttttaatttgggatattagtagggaaagtattagaggtaaaaggaaaggatttttatttttttaggaatgttgaagttaggattgtttgaggggagttttgtgttttttagatttttttgtatcgtttatattaggatttggggtagtttttaaaaatatgcggatttatgatttttattttttattttattgtttggtagtttttaggtgttttttttgttttttttttttgggttgtgataggtttgtttgtagttcgaagtatttgatacgaattttagttaaatggaatgtattagtttagtttttagggaattaattataaataagatatagttattgtttttagtttgataagataggtaataaattgtttttttgaaggaattagggatggtttttggggttttgaaggatggataggaaggtataggtagtgaaggaggtaggggtagaggtgagaggttgggatggggatagtgttttaaattgtaggaataaaagtagtaaaggttggttgggtgtagtggtttagatttgtaattttagtattttgagaggtcgaggtaggtggattatttgagtttaggagttggagattaggttgggtaatatggcgaaatttcgtttttattagaaatataagaattagtcgggtgtgttggttcgtgtttgtaattttagttattcgggaggttgcggcgtgagaatttttgagtttcggagacggaggttgttgtgagttgagattacgttgtagtatttttgtttgggtgatagcgtgagattttgttttaaaaataaaataaacgagtagcgaaggtatataattttgagggttgttcggtttgttttatagatattgaggagtttggtgtggataatgaggaagggtttgagggttgtaataggatttaggcgtttaggtttggagaggtagttttagacgttagttttattgagtaataggagttaagggttttaagtaggggaaggatatggttagttttgtgtgttaggtattggttatagcgtgataaatggtttggaagtggggagatgggttagagaaagtagagagagttaagatgtgagattatgaggttgtagttagtgtagtagttgtggagatggagcgaagcgaatagattaaagaaatttaggagtgagaatttttagtgatcgtaaattagtggtttaatttagggattaagatttttttgattttttttttttttttttttttttgagacggagttttcgttgttgttgtttaggttggagtgtagtggtacgattttagtttattgtaatttttattttttaggtttaagtaatttttttgttttagttttttaagtagttgggattataggcgtttattattatattcggttaatttttgtatttttggtagagatagggttttattatgttggttagattggtttgaaatttttgagtttaggtgatttattcgttttagttttttagagtgttaggattataggcgttagttattgcgttcggttttttttgattttttaaataaattatgtatattatttgattataggataggttgagttttttagtttttcgtgtgtggttacgggatggggggagatggtggtagataggtgtttggttatttttagaataatgttttttgatgtttttttttcgttggtttttgtatttgaggggataagtagttgttaattagaataggttttaggtggtaggaagaggtttttgggttaattaggaataaaagaagttatttttagtgtagtatgaaattaaaaattaaaagtatgatttagggttttttgtgtaggttttttttttttaagacgggtgttaagtgatgagtattaggtgtttatggtgagatttggggaggattttagattttaatagttttttggttgaaattttttataatgtggtaggtaagatgtttttatttttattttgtagatgtggtagttgagttttagaagttacgtgatttgtttaaggtgatttagtttgtggtaggattgggagtgaaggatttttgattaagaatttttttagggagcgtttgttttttttgtattttttgtttgggtgtttttttttaaaattttggtatgattggtttttttggttatttagatgttttatttttggaggttgttttattttataagtttattacgttattttttttttttttttgagatggagttttattttgttgtttaggttggagtgtagtggtgcgattttggtttattgtaatttttgttttttgggtttaaataatttttttgtttt

SEQ ID NO: 441 - DNA, 6244 bp, Artificial Sequence
  chemically treated genomic DNA (Homo sapiens)
gaggtaggagaattgtttgaatttaggagatagaggttgtagtgagttaagatcgtattattgtattttagtttgggtaatagagtgagattttattttaaaaaaaagaaaaggataacgtgatagatttatagggtggggtagtttttagggatgaaatatttgaatgattaaaggagttagttatgttaggattttggaggaaagtatttaggtagagagtgtagaaagggtaaacgttttttggaaagatttttagttaagagttttttatttttagttttattataaattgggttattttgaataagttacgtaatttttgaggtttagttgttatatttataaaatgggaataaagatattttatttgttatattgtgagaggttttaattaaagggttgttaaggtttgggattttttttaaattttattatagatatttgatatttattatttggtattcgttttggaagaggggaatttgtatagagaattttgggttatgtttttgatttttaattttatgttgtattagaaatagttttttttgtttttggttgatttaggagtttttttttgttatttggggtttattttagttaatagttgtttatttttttaggtataaaagttaacgaggaaaggatattaggaaatattgttttgggaataattagatatttatttgttattatttttttttatttcgtgattatatacgggagattggaggatttagtttgttttgtagttagataatgtatatggtttatttaaagagttaaaaggggtcgggcgtagtggttaacgtttgtaattttagtattttgggaggttggggcgggtggattatttgagtttaagagttttagattaatttggttaatatggtgaaattttgtttttattaaaaatataaaaattagtcgggtgtggtggtggacgtttgtaattttagttatttgggaggttgaggtaggagaattgtttgaatttgggaagtggaggttgtagtgagttgagatcgtgttattgtattttagtttgggtaataataacgaaaatttcgttttaaaaaaaaaaaaaaaaaaaaagagttaaaaggattttggtttttgggttgggttattgatttacgattattaggagtttttatttttaaatttttttgatttgttcgtttcgttttatttttatagttgttgtattggttatagttttatgattttatattttaattttttttgttttttttggtttatttttttatttttaaattatttgttacgttgtaattagtgtttaatatataaaattaattatgttttttttttgtttaaagtttttagtttttgttgtttagtggaattggcgtttgaggttatttttttaagtttaagcgtttaagttttgttgtaatttttaggtttttttttattatttatattaaattttttagtgtttgtaaaataagtcgagtaatttttagaattatatgttttcgttgttcgtttgttttgtttttaggatagggttttacgttgttatttaggtaggagtgttgtagcgtgattttagtttatagtagttttcgttttcggggtttaagaatttttacgtcgtagtttttcgagtagttgggattataggtacgggttaatatattcggttaatttttgtatttttagtagagacggggtttcgttatgttgtttagtttggtttttaatttttgagtttaagtaatttatttgtttcggttttttaaagtgttgggattataggtttgagttattgtatttagttagtttttgttgtttttgtttttgtaatttggaatattgtttttattttagttttttatttttatttttattttttttattatttatatttttttatttattttttaagattttaaaaattatttttgatttttttagaaaggtagtttattgtttattttattagattgaaagtagtggttgtgttttatttatggttaattttttagaagttggattgatatattttatttaattaaaattcgtattaggtgtttcggattgtagataagtttattataatttagaaggaagaaatagggaaggtatttgggggttgttaagtaatgaggtggggggtaggaattatgaattcgtatatttttaaaaattgttttagattttgatgtaaacggtataagagagtttgagaaatatagggttttttttaaatagttttgattttagtatttttggaaaaatgaaaattttttttttttgtttttaatgttttttttgttggtattttaggttaaaaaaaaatagataaaattagggggatttttttgggatttggttgggttgggaaataagtttgggttttaatataggtttagtttttgacgtattatgggtttttgtttttttttggggtttttattattacggttatttttatttttattaattgtgtgtttttgaggtagtgattgtttcgttttgagtattagtttttttattttttattagtcgtcgttagttttgacgttttatgagttatgtatattcgtagtttttcgtcgatttcgatggttttttttttttttttttaaggtttattcgttagggtgtagtcgacgtatttttaatgttaaggtcgtttttttatcgatcgtttttttttggtttcgatttagcgttaaaggtatgggtttttgtttcgtttgttttttaagtttagtcggggcggttagcgtaagcgtattgggtcgtatcgaggtttcgttttttgagtttgggtagcggcgcgagggtcgggagaatcgttcgcggaggaaaggcgaattagtaggttggggcggttacggcggtcggtatgggttacgttttttcgggaggaacgatgtgagggaggggtttggtaagagattggaatttcggaggtcgggagattttgtggttgaaatttttcgtaggagcggggtaattagtgtttagtgagggggttgggttggcgcgtattgattttagatttttcggattttttgtttttagatcgggtcggtgtcggggtatgtaggttagtgagattggagttagttagagttataacggggagcgattagggttaaattttgtttagggtggaagcgagcgggttcgtgaagtggggttagtttgggtagtcgatcgtgtcgttgtttcggggtttttttaggtattggtttaagttttggcgataaagtgcgatcgatttttttgtgggcgttttgaggttttcggtgatttgattcgtttgttatttattttttatttatttatgtgatgaatgaatatagtattaagcgcggttaattattaggtagagaagtgattaagataaatattgtttttacggtatagggaaaagtgatgggttgtagaatgtagaagttcggggcggagaatagggatagttttcggaacgaaatcgcgagtttagattaggagtggtggcgagagttttaaagagaagatagtacgtgttaagttttggaagggggatagaggttaatatattttggttattgaagatatttgattttgaatttgttttacgtttagggaagagatgatagtggtcggggttaggttataaattttggaaatggagataaataaaggaatttaaagtattatatatttaggtagtaaaatttataggatttggggagagtgagatgtaggaaataagtatttaaggtttgggtatttgggtggggtttattagagaagaagtagatttgtgggagataataataaattttattttggttgtatggagattcgtaggaaaaaattggatattttagtttgaaggtaggaaagtattgttgtgaagatgtagatttgaatgttattagtaaaatataaataaagttaagggagggttgaggttgtagaatgagaaaaataaagggtttatttagtatttttatttgattttttttttttttttttttttttttttttttttttttttgatagagttttgtttttgttgtttaggttggagtgtaatggtacgatttcggtttattataatttttattttttgggtttaagttatttttttgttttagttttttaagtagttcggattataggtatgcgttattaggttcggttaattttgtatttttagtagagatggggtttttttatgttggtgaggttggtttcgaattttcgatttcgggtgattcgtttgtttcggttttataaagtgttgggattatacgagtgagttattatatttggtttatggtgattatttttatgttttatttttttttatatttttagtatttagttaagggagtggtattaaatgtaaattagtgtttgttaattaaataaaagtttaatagtaaatagatgttggaattttagagttgtggaacgatgggggtttatggagggttttattattttaatgttaaggtaatgggtttttgttttggttttgttattaggtttttgtgtgatttttgataagtttttttttatttataaagagagtatagttaaaaaatggttttatgtatagagttttaaatattgttgataaattttatattgattttttttttttaatttatatagtaattttatttgaaagggaagtcggttgggcggggtggtttacgtttgtaattttagtattttgggaggtcgagagtgggggattacgagatcgagattattttggttaatacggtgaaatttcgtttttattaaaaatataaaaaattagtcgggtatggtggtaggtgtttgtagttttagttattcgggaggttgaggtaggagaatggtatgaatttaggaggcggagtttgtagtgagtcgagatcgtgcggttgtattttagtttgggcgatagagttagatttcgttaaaaaaaaaaaaaaagaaagaaagagggagggagagagagagaaagaaagaaaaagaaggaaggaaggaaggaaagaaggagggaagggaaagggaaagggaaaaggaaggaaggaaagaagggaaagggagaagtcgtattattatggatttaaatttaggtttgtttgtttgtttgatttgaattttgttttttattatgattgtttttatgtatgttttatttaatagggatattattaggatttttttgagattatatgcgtatttttttaaagtattgtgttgaggttggtagatttttataattggtttggtattggttttgttatggggatagggggatagagttgaatgtgatggaggttttttattattttttaattttttttttggggattattgagttgggtaattatgttttgttaaatggtaatagggtagaataaaattagtgattgtgtttttagatttttatttagattttaaatttttgaggtttgttgaaaaatgaatgagtattagggtgtgagtttgtatatttttgtatgtttttgggtaattaattagataattttttttattatattggatatttgggttttagtaatttttattttgttaatgtgattttttaaaaatattttttgttttttggtgttttgatgataaatgtttatatatggaatgtagttattttttgttattaagattttttttggtttgtataagggaggagtttattttattcgtattttatggtattttataaagagttttttttttttttttatgtaatttatttgagatttgttgatatgagttgttggagtttgaagggaattaataatgtattgtagtgatttttattttaggaaaatttgttaaaaatataaagtttcggttgggtgtgatggtttacgtttgtaattttagtattttgggaggtcgaggcgtgtggattataaggttagaagattaagattattttggttaatacggtgaaatttcgtttttattaaaatataaaaaattagttaggcgtggtggtgtgtgtttgtaattttagttatttagggaggttgaggcgggagaattatttgaatttaggaggcggaggttgtagtgagttaagatcgagttattgaattttagtttaggcgattgagtgagattttatattaaaaaaaaaaaaatataaagttttaattttttttttttattaggttttttgtattagagtttttgggatggggtttaggaatttgtatttttttttagttttttagaatgttta

SEQ ID NO: 442 - DNA, 6112 bp, Artificial Sequence
  chemically treated genomic DNA (Homo sapiens)
aaagtcgtttttaaaaaaggtatgaaggggtaatggataaaaagtttattagggtttaaggttaaattagtttgagttcgaatgtttaatttattattaagtggtggatgatgttagaaaaattatatttttaagtttgtttttttaattgtttattattttttttttataattgttgaaaagtgaaatttttaatatagtattagatatataaaaggtattatggaaatgttttatttgttttaagttttataatttttaaggtttttagaaaaattttaaagagattagataatatatatttttgaagattttaaataagttattaaaagtatattagagaagtgtttgttatgtttgttgggagaggttgtatatatatatatagaaaatattattaatgtaggtaatggtatttttttataattataatataggatgggattgtgtcggaaatgggtattattaggaaagtttatattttatgattttaaatattttaatttttttttttggttttttattttagtaatatgtaatatgtaaattttttttgttaagaaaaatgttttaagataaggaattggttagttagggtggtttatgtttgtaattttagtattttgggaagttaaggtaggtgggtcgttagggacgaggagtttgagattagtttgggtaacgtattaagattttattattattttttaaaataaataaataaaataaaatattttttaaaaaagatgatggagttaattggatttaaattgaagttttaaaaagatgaagagttagagatttttaaggataaagataaaattagtttgttttttttattaaatttttatttgttggtagatttcgatttagagttagagaaagtttaattgtttaagttttattatttttaaagttttggttaagtttttagaaaatttatttttattgagtagtaatgtataaagttaagtatttatattagatttttaaatgtaagagatatattatattttgaagtttatttcgggtatgattttattaaattaaaatattatggaatttattgttatagttgaaatgttttttgtgtttttaaatatattagttaaattttaaaaataaaataaaaaaatatggtttgtttttataattataatataggatggggttgtgttggaaatggatattattaggaaagtttgttttatgattttaaatattttaattattttttttagttttttattttagtaatatatagagtaagaaaaattttatatataatagtgattgataaattggggaggtggaagtaataaaaaggatttattaattatttgaaaatgatttatattttaagttaaatttttattataatttttaatttatataaatttttttttttttttatatgttaaaataaatatatttaattttaatgtgttgaagtttataaattattatataaagattttataagtgattaaaaatagtttagattagtagataaaaatattttatagttataataaaattataagtatttttaagtatttaaaagttagaattttgatattaattttaaaataaaattaataaaatttgttttatgttttttgaaaaagttttgtttaataaaaatattaaaaattagttttttaattaatgtttaatgtaataaaggattttggaaatatgaatttagaaaatttttgtataagagttttaatttataaatatgttatttaattgttttttttttaaatataagattatattagttttttattgtttttattatttttaaaagaatatttagtatattattatttagtaaagtgttttatgtgtttgttttattttttattattttatagagaatagtgttttaatttttgaatttaattataaaaagtgaaaaaagataggaaaacgatttgttgaaagttacgtttagaatagaaataataaatgttagatgaaaaaggtttttttaatagagagtttttcgtatataattttttttaaaattaaatatttattattagtttttaatttataatgtgtgttttgtttgatgaattggattgaaaaaaattaaataaaacgtgtaataaaaaaatgaatattataaattataatagaagtttgtttacgtagtattattttcggattcggtagaatataggatagaaatatatttggttttgtagttataagttaaagtggtaaagaaaaaaatagaaataatatattatatgaaatagatattttttaaattattaaaggttatagatatttatttaaagtattttttaaatttttttaatcgttgtttttaggtatattttgaggtttttaagtttattttggggtaagttaaaaagtttatttaaaataaagtattttaagtaagaataaaatgatgtagttggttttagaatatatcggaaataaaaatcgttgtttttaaaattcgaaataagaaatgatatgtttttagtaaatttgatttttatgtgtaggggggagggggtattgttttgataatttattaattatattgtatatttattttatttgaaagtttaacgaaattttttaagttgggttatttagggatcgaatttttattttaagagatttaatttagtttataaattaaagaatatttttaaatggtttatttttttttcgattaaatttttttttttgggcgatagaatgtttttaagaatattaatatatttttttgtgatttttttttaaatataggatataggaagaatcgaggttattagttttagataagcgggtgatgattgttgttattttacgggcggtttttttgtagaatggggtcggttaggatcggcgcgtcgggtaaagaataatatacgagtttagttgtaaataatataattttttacgagtttgcgcggcgggtttcggcggcggagaggatttcggaattcgttatcgggtaggggttgggggaggaatggtgagtaggatgagcgttgaacgaggacggcgagatcgttagtttcgttgcggttgtttgtatcggcgttcgtcgagtagattggagggatgtagttattagtttgggttttatcgtttttattaggcgacgcggatgtttcgatttcgtttttttgggaggcgattttcgtttttcggggtcgttagggcggtggggggcggggaaggtttcgtcggaggtttgggagttttttcggttcgttatcgaagggaaagcggtcggggcgcgggggataatagggagcggggagcgcggttcgttagagtggcgtcgttggtcggttgggttgattgacgcgtacgtcgcgaggcgcgattgggtttcgttcggttcggtcgtcgtttcgtcgtggtcgcggcgttttcggcgttcgtagtcgtgttttattttttattttcgtcgtttaggagaggagtagaattaatatttttagtaatattatttttcgttgtcgttgtcgtcgtcgtcgtttttttacgggttaatagtagtatatcgattcggagggagaagttgaaggggtttggttcggagtttttacgggaagtcgggattttttttggtaggagaaacggcgaagtatttttttttcgttttattttaggggtcggtaacgtttttagtttttttaaaatagggatttttttttttttcgttcgttttttttttttttttttcgtttttttttttttgttcgtttttttttttttttttttttttttcgaaatttagattttcgtttttttttttattacgtgacgcgcgggtatttaattggtacgcggagtcgcgtttttatttttcgtttttattcgttttttaggcgttttaggggcgcgcgtatgcgcgcgggggacggttttcgtgttgttaggtttgtcgtcgttttttgttcgtcggcggagagttgggattgggtttgggaggcggggtttgttttggtttcgtttcggggcgggagcgtttttacgcggagatagtgtttcgttacgtgttagagttgttgaggatttttttttgggttaaaatggttcgtggaagatgtaagtagggttgttttcgattttttaacgttataagtaatagaggtttttttttttttttttttgttttttttggtgtattatagttattaagtaaataaaaagttttaataagtagtaattatagcggtagttgttttagtgatgcgaatataaatgtaaagatttttaagtagtaggaaaaaaagatattatgttcgagatgtaatttttcgagttttttataaatttatgttatagattaaggttttagtttttgtaaaagtatgtaatttgaattagattgttttgaatttttagtttagaaaatgtttttttttttttttgttatatttttgaagcgaatttacgtatattttttttttaattttttaaagtttgtgtttgttttttcgtaatttattttgattttttaaatttggatgttatgaattagaattttttatggttatttaattagatattttttatttatttggtatcgtgtttgagtaggtcgaattagggagagtgtgtgtgtgcgtgtgtgtgtgtgtgtatgtgtaaattgttttgttttgttttttaaagataaggttttcgttgtttcgttaggttgaagtgtagtggtgtgattatagtttattgtaatttttaatttaagtcgaattagggagagtgtgtgtgtgtgtgtgtgtgtgtaaattgttttgttttgttttttaaagataaggtattcgttgtttcgttaggttgaagtgtagtggtgtgattatagtttattgtaatttttaatttaagcgattttttcgtttcggttttttataagtgttgggattataggcgtgagttattgcgttcggttttaatgttattgatattgtaataaattggaatttttatattgttatttgtatattttatattatttattattattaatataagtgaagagaatttttttttttttgagacggagtttcgttttcgttgtttaggttggggtgtaatggtgtgatttcgatttatcgtaatttttgttttttaggtttaagcgatttttttgttttagttttttaagttgttgagattataggtatgtattattacgtttagtaaattttttgtatttttaatagagacggggttttattatgttggttaggttggtttcgaatttttaattttaggtgattcgttcgttagttttttaaagtgttgggattataggtgggagttatcgagtttggttataagagttttttttaatttttagtttgagaaatgaatgattttagttttgttgtaatattaataggtttaaaaacggacgttttaaaattattataattgtatttatttataatgagatatatggaattattaaaggatggtagaattttacgaatggttttttttttttttattaaaatatttagttttaggaaatagttatttgtagatattatattttatattatttgtgttttttattaattttttgtggtagtgttgttaataaatgatatttttattttttagtttttaaattattttatagtatgttttttgttgtatagtatttttataatgaattttagtgattagaggtaaatggtatttttttttaaaatttaattggaaaaaattttaaagttatattttgtattattaagatgattattgaaaattatatttataaagattgtatttttttttttaatttttaaaatgtatttattttggttagttacggggtttatagttgtaattttagtattttgggaggttaaggttcgtagattatttgaggttaggagtttgagattagtttggtcgatatggtgaaatttcgtttttgttaaaaatataaaaattagttaggcgtgatggcgggcgtttgtagttttagttattcgggaggttgaggtaggagaatggcgtgaattcgggacgtagagtttgtagtgagtcgaggtcgcgttattgtattttagtttgagcgatagagttaggaaaaaaaaaaaagtcgggcgtggtg

SEQ ID NO: 443 - DNA, 6112 bp, Artificial Sequence
  chemically treated genomic DNA (Homo sapiens)
tattacgttcggttttttttttttttttagttttgtcgtttaggttggagtgtagtggcgcgatttcggtttattgtaagttttgcgtttcgggtttacgttatttttttgttttagtttttcgagtagttgggattataggcgttcgttattacgtttggttaatttttgtatttttagtagagacggagttttattatgtcggttaggttggttttaaatttttgattttaagtgatttgcggattttggttttttaaagtgttgggattatagttgtgagtttcgtggttggttaaaataaatatattttaaaaattaaaaaaaaaaatatagtttttataaatgtaatttttagtaattattttagtaatgtaaaatatggttttggagttttttttagttgaattttaagggaaagtgttatttgtttttaattattggaatttattataaaaatattgtgtaatagaaaatatgttataaggtggtttaagagttggaaaataaaaatattatttgttgatagtattattataagagattagtaaaaagtataggtgatatgagatgtaatgtttgtaggtaattattttttaagattgaatattttaatgaaggaaaaaaaaattattcgtgagattttgttattttttgatgattttatgtattttattataaatggatataattatgatggttttgaaacgttcgtttttgagtttattaatgttgtagtaaaattagaattatttattttttaaattgagaattaaagaagatttttatggttaggttcggtggtttttatttgtaattttagtattttgggaggttggcgggcggattatttgaggttgggagttcgagattagtttaattaatatggtgagatttcgtttttattaaaaatataaaaaatttgttgggcgtggtggtgtatgtttgtaattttagtaatttgggaggttgaggtaggagaatcgtttgaatttgggaggtagaggttgcggtgagtcgagattatattattgtattttagtttgggtaacgagagcgaaatttcgttttaaaaaaaaaaaaattttttttatttatgttaatggtaataaatggtataaaatatataggtaatagtataggaattttagtttattatagtattaataatattaaggtcgagcgtagtggtttacgtttgtaattttagtatttgtgggaggtcgaggcgggaggatcgtttgagttggaggttatagtgagttatgattatattattgtattttagtttggcgagatagcggatattttgtttttagaaagtaaaataaaataatttatatatatatatatatatatatattttttttaattcggtttgagttggaggttatagtgagttatgattatattattgtattttagtttggcgagatagcggagattttgtttttagaaagtaaaataaaataatttatatatatatatatatatatacgtatatatatattttttttaattcggtttatttaagtacgatattaaatagatgaagaatatttaattaaatggttataaaaagttttagtttatgatatttaagtttaaagaattaaaatgagttacgagaaaataaatataagttttaagaagttggggagaagatgtgcgtggattcgttttaaagatgtgatagagagaaaagaggatattttttggattggagatttaagatagtttggtttaggttgtatgtttttgtaaaggttaaagttttagtttgtgatataaatttgtaaagagttcggaaaattatatttcggatatggtgttttttttttttgttgtttgaaggtttttgtatttatgttcgtattattggggtagttgtcgttataattattgtttgttgggattttttgtttatttggtagttgtggtgtattaagagaggtagaaaaagaagaaaaaaaatttttgttatttgtgacgttaagaagtcgaaagtagttttgtttatattttttacggattattttagtttaagggaaggtttttagtagttttaatacgtagcggagtattattttcgcgtaggagcgttttcgtttcggggcgggattaggataaatttcgttttttaagtttaattttagtttttcgtcggcggataggaagcggcggtaggtttagtagtacgggaatcgtttttcgcgcgtatgcgcgcgtttttgaagcgtttgggggacgggtaggggcgggaggtaggggcgcggtttcgcgtgttagttgggtgttcgcgcgttacgtggtgaggaaggaggcggaggtttgagtttcgaaggagggggggagagaagagggaacgagtaagggaaggaaagcggggaaaggaggaaggaaacgaacgagggggagggaggtttttgttttggaggagttaggagcgttgtcggtttttgaagtggagcgagagggaggtgtttcgtcgttttttttgttaggggaggtttcggtttttcgtggaggtttcggattaagtttttttagttttttttttcggatcgatgtgttgttgttaattcgtgaggaggcggcggcggcggtagcggtagcggaagatggtgttgttgagagtgttaattttgttttttttttgggcggcggggatgggaggtgaggtacgattgcgagcgtcgggggcgtcgcgattacggcggagcggcggtcgggtcgagcggagtttagtcgcgtttcgcggcgtgcgcgttagttagtttagtcggttagcggcgttattttggcgggtcgcgtttttcgttttttattgtttttcgcgtttcgatcgtttttttttcggtggcgggtcgaggaggtttttaagttttcggcgaggtttttttcgttttttatcgttttggcggtttcgggaggcgggggtcgttttttagagaagcgaagtcggggtattcgcgtcgtttggtgagagcggtggaatttaggttggtggttgtatttttttagtttgttcggcgggcgtcggtgtaggtagtcgtagcgaggttggcggtttcgtcgttttcgtttagcgtttattttgtttattattttttttttagtttttgttcggtggcggatttcgaagtttttttcgtcgtcgagattcgtcgcgtagattcgtgggaagttgtgttgtttgtagttgggttcgtgtattgttttttattcggcgcgtcggttttgatcgattttattttgtagaggggtcgttcgtggagtggtagtagttattattcgtttatttgagattagtggtttcggttttttttgtgttttgtgtttggagagagattataggagggtgtgttggtgtttttgaaaatattttgtcgtttaggggaaagggtttggtcgggagaagggtaaattatttggggatgttttttgatttgtaggttggattgggttttttagagtagaagttcggtttttgggtgatttaatttgaagagtttcgttaaatttttaggtggagtagatgtatagtgtagttagtggattgttaaaatagtgtttttttttttttgtatatgaaagttaaatttgttaaaagtatgttattttttgtttcgggttttgaagataacgatttttattttcggtgtgttttaggattagttgtattattttatttttgtttaaagtgttttattttaggtaagttttttgatttgttttagagtaaatttaaaaattttaaggtgtgtttaaaagtaacgattgaaaaaatttgaggaatgttttggatgagtgtttgtagtttttgataatttagaaaatatttattttatgtaatgtattgtttttgtttttttttttgttattttgatttatgattgtaggattaagtgtatttttgttttgtattttatcgagttcgagggtggtattgcgtaggtagatttttgttatagtttgtagtgtttatttttttgttatacgttttatttaattttttttaatttaatttattaagtaagatatatattatagattaagagttgataatagatgtttagttttaaaaaggattatgtgcgggagattttttgttagaggagttttttttatttgatatttgttatttttgttttaaacgtggtttttaataaatcgtttttttatttttttttattttttgtgattaaatttaggagttaagatattgttttttataaggtaataaaaagtaagataaatatatgaggtattttattgagtagtagtatattaaatgtttttttaaaaataatgaaaatagtaagaaattgatgtagttttatatttgaagaaaaaataattgaataatatgtttgtgggttaaaatttttatataaaaattttttaaatttatatttttagagttttttattgtattaagtattggttaaaaggttaatttttggtgtttttgttaagtagaatttttttaaaaaatataagataagttttattagttttattttaaaattagtattaagattttagtttttgggtatttggagatatttgtaattttattgtaattatggggtatttttatttattaatttgagttatttttggttatttgtaagatttttgtatgatgatttgtagattttagtatattgagattgaatgtatttgttttagtatatgagagaaaggagaaatttgtgtagattagaagttgtggtggaaatttaatttaaaatgtaaattatttttaggtagttaataaattttttttgttgtttttatttttttaatttgttagttattgttgtgtgtgaaattttttttgttttgtatattattaggatgggaagttggaaggaataattaaagtgtttagaattataaaataaatttttttaatggtgtttatttttagtatagttttattttatgttgtagttgtaggagtaaattatgtttttttattttatttttaaaatttaattggtgtgtttgagagtataaaaggtattttagttgtagtagtaaattttataatgttttggtttgatgaaattatgttcgaaatgaattttagagtatgatatgttttttatatttaaaaatttgatgtaagtgtttagttttgtatattattgtttaatagaaataagttttttggaaatttgattagagttttaaaggtagtagagtttaagtagttaaattttttttgattttgagtcggaatttattagtaaataagaatttaatgaaagagatagattaattttgtttttatttttaaggatttttgattttttatttttttaaaattttagtttgagtttagttaattttattattttttttaaaaaatgttttattttgtttatttattttaaaaagtagtgatggggttttaatacgttgtttaggttggttttaaatttttcgtttttagcgatttatttattttggttttttaaagtgttgggattgtaggtatgagttattttgattggttaattttttgttttaagatattttttttaataagaaaaatttatatattatatattattaggatgggaagttagaaggaagaattaaagtgtttagaattataaaatgtaaatttttttgatggtgtttattttcggtatagttttattttatgttgtagttgtaggaaggtattattgtttatattaatggtattttttgtgtgtatgtgtatagttttttttagtaggtatggtaggtatttttttgatgtgtttttagtaatttgtttaagatttttaaggatgtgtattatttgatttttttaaaatttttttaaggattttaagggttgtagggtttggggtaaatggaatatttttatgatgttttttgtgtgtttaatattgtgttaggagttttattttttaatagttatgagagaggggtgataggtagttgaagaaatagatttggaaatataatttttttagtattatttattatttagtggtgaattggatattcgaatttaagttggtttgattttaaattttaataagttttttatttattgtttttttatgttttttttgaaagcggtttt

SEQ ID NO: 444 - DNA, 6223 bp, Artificial Sequence
  chemically treated genomic DNA (Homo sapiens)
gttattagaattatgaaggatgtagttagttgggttatagtttttgaaaagatgatatttatgttttagaatttgtgattaggattttattttttttttaaatggttttttgtagatgtaattttttttttttaagagacggagttttgttttgttatttaggttgtagtgtagtggcgcgattttggtttattgtaatttttatttttcggggtttaagtaattttttgttttagttttttgcgtagttgggagtataggtatacgttattaggtttggttatgtagatgtaattaaatgagagatgttaagatgagattattttgaattatttatttgggttttaaatttagtgataagtgtttatataagagaacggtttataattgtaattttaatattttgggaggttaagataggataattattttaagttagaagtttaagattagtttgagtaatatagggagattttttttttataaaaaaaaattaaaaattataatcgggtatggtggtaggagtttgtaattttagttattttggaggttgaggtaggagaatcgtttgaatttaggaggcggaggttgtagtgagtcgaaattgtattattgtattttagtttggttgatagagggagattttattttaaaaaaaaataaaaaataaaaaaaataaataggttaggcgtagtggtttatgtttgtaattttagtattttgggagattgaggtgggcggattacgaggttaggagtttaagattagtttggttaatatggtgaaatttcgtcgttattaaaaatataaaaattagttgggcgtggtggtgtattcgtgtagttttcgttatttaggaggttgagatagaagaattgtttgaatttgggaggcggaggttgtagtaagtcgagatcgtgttattgtattttagtttgggtgatagagagagattttatttaaaaaataaaaataaaagattagttggtcgtggtggtttatatttgtagttttagttttttgggaggttgaggtgggaggatcgttttagtttgggagttgaaggttgtagtgaattaagattgtattattgtattttagtttgggtgatagagtaagattttgttttaaaaaaagagagaggtagttaaaaggagatttgggtgggagaaggaagagaagaagatagagatagggattggagtgagatagttattagttgagaaacgtttggagttattagaagttgtaagagttagtttttttttgggtttttatggagaggtttagttttgtcgatattttgattttagatttttaatttttagaattttaagagaataaattattattgtttaagttatttagtttatggtaatttgttagagtagtcgtaggaagttaaattatagggttaagggggatagaatgatggggttaaggaggtggaattttatttttatagatatatgaaggtaaggagggggttatggggttttttggggaacggtattttaggtagagggaatagtaaatgaaaagttttagatttatgtttaagcgcggtggtttacgtttgtaattttaatattttgggagatcgaggtaggtagattatttgatattaagagttcgagattagtttgattaatatgaagaaatttcgtttttattaaaaatataaaaaattagttaagtgtggtggtatatgtttgtaattttagttatttcggaggttgaggtaggaaaatcgtttgaatttaggagatagaggttgtagtgagttaagatcgagttattgtattttagtttgggtaataagagcgatattcgattttaaaaaaaaaaaaaaaaaggaaaaggaaaaaaagaagttttagattttaggatataattacgtaggtatatatagataggtttagaaattatagttatatatatagagggatatattaattggacgttatggtttggttagtatttaagatattaatttatagtattttacgcggaaatgagtaatttttatttatagggatagatagtagggtttttataaatttttaagttttttttttgggatttatatagttttttatgtagggatgggagggtggagggttggggtattgatattattgttggtatttttattttgggggggtggttttttaatttgtagttttttttttaagtttattaaggagtgtgaggaattggaattgggaggggttggttttaagattggaaatttttaaggggtattagcggggttagagggaggggtttagagaagttagagagtttaagtttcgtttttcgacgttgttaatttttatttttttttatttttttatttttcgtttttggcgcggttgtttttttttcggtttgttttagacgtttgagattgaatttaataagcggttgatttagtttttagcgttattcgtaagattttttttatttcggtttttagcgaaataggtcggggtacggtcgagtaagtaagggtgcgggtggcgttgggaggggagggtatagttttcgtttttttttttaaggttcgtagggcgattattgcggtttcgatcgcgcgtcgggagggggcgcgttgcgttgggcgtcgaggatagttggttttatcgttaggtagggcgcgattcgcgcgggttttttttcgacgtttcgggcgggtttttacgttttgcgtttcgcgttttcgtcgatcggtcgggtcggttttagttttagttcgcgtttcgttttacggtttaagttttgggggagacggaggggggagcgtagatttagttagggggggtacggcgggtgaggcgaggattaggagatggggacgaggtttatggaaacgtttgttgtcggtgggggggttttgggggatttatgggtggggtgatagtttgggggtatttttgaaaggatttgagtatttgagatcgtgaaagagattcgtggggggtggagggcgtgtagggagtggtttttatagtttaattcggaggattgagttcgttttatttcgggcgattcgggtttcgggcgtcgcgcgcgtcggtgatttatttgtcgaagggcggggtagtcgcgggtttatttatttgtcggtagtattttaggcgcggagttttattgcgtaggcgttcggttttatcgttcgtttttttaggtgtgtggttttaggtaaggttatatttttttttatttcgttttattttcgtagattttttagttttaggaaatttttttagttaggtttagttttttataaaggtgagttcgagtgggagatttagttaaaataaatgtaggtgtaattttaaagcggttttttttggtttaaaattattttagatttatttagtttgggtttgatttagtatttggtatatatgatgttgaataaatgaatatattaatgagttaattaatggttattgcgtgaattgttgttattaatgatagtatgaaaggagttaagtatttttttataattttgagagatttttttttagagtatttgttttttgtttttttattattattatttataataatgtttatgttgagtatatattatattttgagtatttaatgtatgttgagtgtatataggagttattattgttttattttttagatgtaaaaattgaggtttaaaaagtttgaatgtttaaggtgttttagattttagaatttaagttgagttttttttgtttttgtttagtttttttttagtttttgttttgttttttgtaattttttgtttttttttgtgatatttaataattaaattgttaagtttttttatagtcgttagtgaagtattttttattttataggtgtaatgatgattagagagggaaagtgattagtttaaagttatattgtaagtaagtggtagtgtgggattgtattataggttttttatgtttttttttattaaatgttgagagatgggaggggtgtggagggtgtgagttattgcgattggtttttgatagtttgttgattgaataatatttattttatggggggttttatatgtgattttaggtggttaagaattgtgaagttgggattattgggtttattttgtagattatgatattgagatgtaaagagtttaatttttagtcggttagtaatatgatgtgggatttgaatttatgttaagaagagtgtagagtttttgtttagtttttaatggggaaatacgagaggttgtttaagttatatatatgtaggaagtggtagagatatttatggtgaatatagaggtagagggagaagataaatcgtttttttttttcgtttttatatatagggtttattggtggttttgagttaggtatttataggtaggtagtttttcgggagggtagttgggtgtaacgatttttatttgtatacgggttttcgtttaggtaagggggggttgtgtgggggtgaaggaaggtggaggattagttaggtgtttaggaattttaggtttaagtgataaattttttttttttttttattaggtaatagttgtatggggatgggggcgtttttgcgggtgtagggagtttttttatttatagtttttacgtttttttttttttcgttttagttttagttgttgaggttgtagttgtttttgttagttcgagttttgggaattataaagtaggggaaggtaggaggaggggttgttttatgttagatgtgggggttcgggaagttgttagagttaagatgtgtagaatggggtgtgttgagataggaagtaagggtgttgagtgttatagggaggtttggggttttatgtttaggtttaggggtaatagaaggggaaggggtaggggattttagggttacgggtttttttttttttgatgggtatttattttagttaggtaggtttgcgtggtgtttttgggagagggattaaggtatgtatttacgagtgagtatagtatttttagaagtagttagcgttgggcgttgttggaatagggtgtgtgttgaagggaggggtaattggtataaggtatgtgttgttttgtttaatatcgttatttttaagggttgtgtttttttagggtgtggtatagtttaattgttttgttagaagggtttagggtgtggttgggtttgagttagtggagaattgtgtgtatgcgattaggtgtggggatatagtgcgtgtgtttatgtatgtttttgttagagagagggtgatggagagaggaaggaagatcgagaaaaatataaagacgtgagaatgaattagaagtagatagattaggagaagatagagaaggatagaaagaaatagaaagcggttaggtatggtggtttacgtttttaattttaatattttgggaggtcgaggttggtggattatttgaggttaggagttcgagattagtttggttaatatagtgaaatttagtttgttttaaaaatataaaatttagttgggtatggtagtaggtgtttgtaattttagttatttaggaggttgaggtaggagaatcgtttgaatttaggagttagaggttttagtgagtcgagattacgttattgtattttattttgggtaataagagttaaattttatttttaaaaaaaaattagttgggtgtggtggcgtacgtttgtagttttagttattcgggaggttgaggtaggagaatcgtttgaatttgggaagcggaggttgtagtgattcgagattgcgttattgtatgttagtttggtaatagagtgagattgttttaaaaaaaaaaaagagagagagaaggatagaaagaaatagaaaataagagggtgagttatagaatttgtcgagttgaatttgagtatgggtttatatagtatatgttttttttttataggataagtcgattggatattattatttatattaggatttgtgggtgttcgtgaatttatattgtgggttttataatatgggttatgggttattttgagttgtaggtaatgtgagttatatgtgtgtgcgtgtacgggtttgtgtgtttgtatgtggatttgggtatgtatttattgtgttttagttgtagttatatgtgagtttatttgtatatgtatgttagcgtgggtgtgttcgtgtgtgtatgagttgtatatttatacgggaatgtatagatgtgtgtgttgtttgtatgtaggttgtgtttgttgtgcgttt

SEQ ID NO: 445 - DNA, 6223 bp, Artificial Sequence
  chemically treated genomic DNA (Homo sapiens)
agacgtataatagatataatttgtatatagatagtatatatatttgtgtattttcgtatgggtgtgtagtttatatatatacgggtatatttacgttgatatgtatgtatagatagatttatatgtagttgtaattgagatataatagatgtatgtttaaatttatatatagatatataagttcgtgtacgtatatatatgtggtttatattgtttatagtttagggtggtttatagtttatgttatgggatttatagtgtgagtttacgaatatttataggttttggtgtgggtgatggtgtttagtcggtttgttttgtgaggaaggggtatatattatgtaggtttatgtttaggtttagttcgatagattttgtaatttatttttttgttttttatttttttttgttttttttttttttttttttttttttgagatagttttattttgttgttaggttggtatgtagtggcgtaatttcgggttattgtaattttcgttttttaggtttaagcgatttttttgttttagtttttcgagtagttgggattataggcgtgcgttattatatttagttaatttttttttggagatggagtttggtttttgttgtttagggtggagtgtaatggcgtgatttcggtttattggaatttttggtttttgggtttaagcgatttttttgttttagttttttgagtagttaggattataggtatttgttattatgtttagttaagttttatatttttagaatagattgggttttattgtgttggttaggttggtttcgaatttttgattttaggtgatttattagtttcggttttttaaagtgttgggattagaggcgtgagttattatgtttggtcgttttttatttttttttgtttttttttgtttttttttggtttatttgtttttagtttatttttacgtttttgtgtttttttcgatttttttttttttttttattattttttttttgataagagtatgtatggatatacgtattgtgtttttatatttgatcgtatgtatatagttttttattagtttagatttagttatattttggatttttttggtaggatagttagattatgttatattttagagggatatagtttttagggatggcgatgttggatagggtagtatatgttttgtgttagttgtttttttttttaatatatattttattttagtaacgtttagcgttggttgtttttggagatgttgtgtttattcgtgggtatatgttttggttttttttttaagagtattacgtaggtttgtttggttggagtagatgtttattagggaaaggaagattcgtggttttaggattttttgttttttttttttttattatttttgaatttgggtatgaagttttagatttttttgtaatatttagtatttttattttttgttttagtatattttattttgtatattttagttttggtagtttttcgagtttttatatttggtataagatagtttttttttttgtttttttttgttttgtggtttttagggttcgagttggtagggatagttgtagttttaatagttggggttggggcggggggggggggggcgtgggaattgtggatggggggattttttgtattcgtagagacgtttttatttttatgtagttgttgtttggtggagggagggagggggtttgttatttgggtttggggtttttgggtatttggttgattttttatttttttttatttttatatagtttttttttgtttggacggaagttcgtgtgtaaatggaggtcgttgtatttagttgttttttcgggaggttgtttgtttgtgagtgtttggtttagagttattagtgggttttgtgtgtgggggcgggggggaggggcgatttgttttttttttttgtttttgtgtttattatggatgtttttattattttttatatgtgtgtggtttgggtaatttttcgtgtttttttattggaaattgagtaggggttttgtattttttttggtatgggtttaagttttatattatgttgttgatcggttaggaattaaattttttatattttagtgttatggtttgtaaaatgggtttagtaattttagttttatagtttttggttatttgaggttatatgtaaagttttttatgaggtaggtattatttaattaataaattattagggattaatcgtagtggtttatattttttatattttttttattttttaatatttagtggagggggatataggaggtttataatatagttttatattgttatttatttgtagtgtgattttgggttagttattttttttttttgattattattgtatttgtgaaatagggaatgttttattggcgattgtgaagggatttaataatttagttgttagatattataaggaaaggtaagaggttgtagggagtagagtagaggttgggaaggagttgagtagagatagaaagagtttagtttaaattttggggtttgggatattttgagtatttaagttttttgagttttagtttttgtatttggaaaatggggtaataataatttttgtatgtatttaatatatattaagtgtttagaatatagtatgtgtttaatataggtattattataaataataatggtagggaggtaggaaataggtgttttaaggagaagttttttaaggttatgaggaaatgtttggttttttttatgttattattaataatagtagtttacgtagtagttattgattgatttattaatgtatttatttatttagtattatgtgtgttaagtattgggttaggtttaagttgggtgggtttggggtgattttagattaagaagagtcgttttgaagttatatttatatttattttggttggattttttattcgggtttatttttgtggagggttgagtttgattgagagggttttttggggttggggggtttgcgaaggtggggcgggatggggaaaagtgtgattttatttggagttatatatttgggagggcgagcggtggggtcgggcgtttgcgtagtggagtttcgcgtttggaatattgtcgataggtgaatgagttcgcggttgtttcgtttttcgataggtgaattatcggcgcgcgcggcgttcggagttcggatcgttcggagtggagcgggtttagtttttcgagttgggttgtgggaattattttttatacgttttttattttttacgagttttttttacggttttaaatatttaagtttttttaaggatgtttttaagttgttattttatttatggattttttaagatttttttatcggtagtagacgtttttatagatttcgtttttattttttagttttcgttttattcgtcgtgttttttttaattaggtttgcgttttttttttcgttttttttaaagtttaggtcgtggggcggggcgcgggttggggttggaatcggttcgatcggtcggcgggggcgcgggacgtagagcgtgggaattcgttcggggcgtcgggagggggttcgcgcgggtcgcgttttgtttggcggtgggattagttattttcggcgtttagcgtagcgcgttttttttcgacgcgcggtcggggtcgtagtggtcgttttgcgggttttggaggaggggacgggagttgtgttttttttttttaacgttattcgtatttttgtttgttcggtcgtgtttcgatttgtttcgttgggggtcggggtgggggggattttgcgggtgacgttaaggattgagttagtcgtttgttgagtttagttttaggcgtttgggataagtcggagggaggataatcgcgttaggggcggagggtggggggatagaggggggtgagggttggtagcgtcggggggcggagtttggattttttggtttttttaagtttttttttttgatttcgttagtgttttttggagatttttagttttaagattaattttttttagttttaattttttatattttttggtgggtttggggagggggttgtaggttgaaggattatttttttaagatgagggtattaatagtggtgttagtattttaattttttatttttttatttttgtataagaggttatataagttttagagaagggatttgagggtttgtgggagttttgttgtttgtttttgtgagtgagagttgtttattttcgcgtgggatgttgtgggttggtgttttgagtgttggttaggttatggcgtttaattggtgtgtttttttgtgtgtgtagttgtggtttttgggtttgtttgtgtgtgtttgcgtggttgtgttttggggtttgagattttttttttttttttttttttttttttttttttttgagatcgagtatcgtttttgttgtttaggttggagtgtagtggttcgattttggtttattgtagtttttattttttgggtttaagcgatttttttgttttagttttcggagtagttgggattataggtatgtgttattatatttggttgattttttgtgtttttagtagagacggagtttttttatgttggttaggttggtttcgaatttttgatgttaggtgatttatttgtttcggttttttaaagtgttgggattataggcgtgagttatcgcgtttggatatgggtttgagattttttatttgttgttttttttgtttggaatgtcgttttttagaaagttttatggttttttttttatttttatatgtttgtgaaaatagaattttatttttttgattttattattttattttttttaattttgtggtttagttttttacggttgttttaataaattattataaattgggtagtttgaataatagtaatttatttttttgaagttttggaggttggaagtttgaaattaagatatcggtagggttgagtttttttatggggatttaggggagaattgatttttgtagtttttggtggttttagacgttttttagttagtggttgttttattttagtttttgtttttgtttttttttttttttttttttatttaaatttttttttggttgtttttttttttttttgagatagagttttgttttgttatttaggttggagtgtagtggtgtaattttagtttattgtagtttttaatttttaggttgaagcgatttttttattttagttttttaagaagttgggattataggtgtgagttattacggttagttaattttttatttttattttttaggtggagtttttttttgttatttaggttggagtgtagtggtacgatttcggtttattgtaattttcgttttttaggtttaagtaatttttttgttttagttttttgagtagcggggattatacgagtgtattattacgtttagttaatttttgtatttttagtagcgacgaggttttattatattggttaggttggttttgaatttttgatttcgtgattcgtttattttagttttttagagtgttgggattataggtatgagttattgcgtttggtttgtttgttttttttgttttttgtttttttttgagatggagtttttttttgttaattaggttggagtgtagtggtgtaatttcggtttattgtaattttcgttttttgggtttaagcgatttttttgttttagtttttagagtagttgggattataggtttttgttattatgttcggttataatttttaatttttttttgtggaaaaaaagtttttttatgttgtttaagttgattttgaatttttggtttgaagtgattattttgttttgattttttaaagtgttgggattatagttgtgagtcgtttttttgtatgaatatttgttattgaatttagggtttaggtggataatttagaataattttattttgatattttttatttaattatatttgtatagttaggtttggtggcgtgtgtttgtatttttagttacgtaggaggttgagataaagaattgtttgaatttcgggaggtggaggttgtagtgagttaagatcgcgttattgtattgtagtttgggtgatagagtaagatttcgttttttaaaaaaaaaaaattatatttgtaaagagttatttaaaaaaaaagtaaggttttagttataggttttgggatatggatgttatttttttaggggttgtgatttaattgattatattttttatggttttgatggt

SEQ ID NO: 446 - DNA, 6195 bp, Artificial Sequence
  chemically treated genomic DNA (Homo sapiens)
ttattaaatttaatttgaaatgtttttaattttaaattaaagggaattgagtagtataatttttggggtttgttaattttagttttttagttagtcgacgttgttggttaaatttttgttttttttgaagggtaatttgggtttttatagtttttagggttgggtaattatatttgtaattttttaaagttttgtttgttataaattgtatgagttaatggaaagattaagtatttttgttggtataatttttttaggggatttttaaggttttaatagtaggttttatgttaatttttgtttagtaagaaagtttagttaatttttagtaatttttttttttaggaagttgattttgtggttattgggaataagatatttggtgattttattttagaaatgtaagtaaatttttaattagtatttataagtagaaatttatataatttttaggataattattttttgagaattgagttaaagtttattgttttatttgttgatttttaagtgagataaagtatattagaagttagtacgttaggtgtttttacgagttttgaaaatttaatattaatttatataggggttatagaaattataaatatttgttaaggggttagttttagttattttataaatatttttttttaaattgttttaaattatatttttattagattttattttataatttttagtataagggttttgatattattattattaatttttatttatttatgtatttagagatagggttttattttgtgttattgtattttagtttgtgtaataattatagtttattgttgttttaaatttttgagatttttttgttatagttttttaagtagttggaattataagtataagttattatatttagttaatttttaaattttttgtagagatagggttttattatgttgtttaggttggttttgattttttggttttaagtaatttttttgttttggttttttaagtagttgggatttataggtgtatattattatgtttaggtaattaaataatttttttttgtagagatggggattttattatgttatttaggttggttttttgattttttggttttaagtaatttttttgttttagttttttaaagtgttgggattataggtatgatattattaatttattaaaaatttatatagaggtttttttttttaatatattttataaagttaatttgttggtttttttattattaattgattatttaataaaaagaagattaatttaaaaaatatttagtatttaaggtttatttatttttagaattttatatatgtaaaatcgaatattatagtttgttaacgtttggtataattgttgttaaagataaatgtttgagttatgaaataatgttgatagaaaggtattttttatttttatttatagtaatttaaattaagatttggtttatttatcgttgttttaagatttgtttatttattgttttttatttttttaatattatattaattttaaagagatattttgggtttttaatttttaaaaatgaagaattatttaaatatatattgcggaagttataatttattgttagaaatatattgatttagatacgttaatatgtattgatatttatttataatttagtttgttttttatgtatttttagatttttttaaaagaggtattttggtaaatatattgtttttttagtagggaattaatttatttttgttttatatagttggttttgtagattattagtgggtatgtagatggtatgatattaaatttgttgagttaatttaataaaattatttttgttttaattggaaagtaaattttgaataattgttatgtattttttttagtttttaaagagttgtagaatgttttttatatggatatattttttttttttttttttttttttgagatagggtttttattttgttgtttaggttggagtgtcgtgttgtaattataatttattgtaattttaaatttttgggtttaagcgatttttttattttagtttttttagtagttaggattataggcgaaagttattatgtttagttataggtacgtttttttaatggttagtaacgttttttgataaagttttttttgaaattattattttgattttaaagtagtttttttttttttttttttatttttgtaatagaatttattaatttattaatatataatattttggatattggattggtggaaaggtaaatcgaagatttttatttttattttaaaagagtagttatatttttttgtaaaattggaattgtgtgaaataagtaggttattggatagattggaattttgagatattttttatagaggtttgtgttatggtagaatttgatattattttttttcgatttttgttttttaagatttatagtttatagtttatgaggaattttaagaaataagtagtttttatttttatatatataatatatttttttttgaatattattgtttaaagcgaattgttatatggttagattttaagtgaacgtgtgttattgtttttattaggttggatattagtagaaattgttaattaagtagtgagaagttaatgtgttggttattaaaaagaatattaaataaatgggtaaaatattaagatgtagaaagtgggtattgtttatataggagtttttttattttaaaatttgtattgtaaggatgaaaagttttttaaaaataaatgcgaagtaagtttttttaatagtattatttttaaaggttatgtggtttaaaaatttattagttcgaaatagttggttatatattatattttgaagtttgtgttgtttacgtgtttaaaaattaaggcgggggttcgtgattaggggaaaagaataaaaataaaaatatatattagtaatagttttgatagttttaatggggataatgtttgcggatgttgcgtggtgaaatttggtagttttcgttttagtagtaagaaattttttattgttataagtttttttcgttttgattattatcgtatttaggttatttttgggatggattttaaatagaagatatggagttgaagttttattaggttttaggtagttcgataatgcgtttatcgtttatcggtatcggatttgagtttgtaaaatggattaatatattttagtttttagtgttattagttttttagtttagaagaataagaaatagtttgtgggtggaggtttttttgaaagaaagatttaagttagttaaatggtatatttgattaagtatttttaaagtaggatttaatgatgagggttgggggagggaataaaaagaggttagttgtgttttaggttaaatattattttagttttggcgggttttgttaatatttattatatttattatagggttttttataatgtttgttagtgtgatgatgttgggatttttttttaaattttttaaaatttttattttacgtttaattttttttttttttattggttgaaaggggaaaagtatattagtaaaaaaaaaaaaaaaaaatttttttagagtattttaatacgtagtgtaatatataaatgataaatggtttatttatgagtatattttgaaggaagaaaatgtgttatattcgtttttgaattttttttttagtattgtgttaggtattttgtaggtatttataaatgttgaattgaaagaaaaaaagatttttattttaaagattagatatttttgtagaattagtattttaattattagttttgatgttaatgttttaaaatatgttaaatatgttaatgttttaaaattttataaagtagtaatttaaatcgttagtaatattaaagtatattaaattttttattaattaggatgaaatatgggttttttttatttttttttttaattagggttaataataaggatggttaaaatatttttgtgtagtataattttgagggtaaagggtgagttttggagttataatgtttaatgtgaaatttatttttattatttgttggttgttaatggtaaattatataatttttttaagttttttattaagtgtaaaatgagtaataagagtatttattttataagattgttgtaagaattaaatgaggtattcgaaagatttcggaatatggttgaaatataatataataataattgtttagtttgattattaatgtttttttttttttttttttttttttgagatagagttttgttttgttatttaggttggagtgtagtggtgtaattttggtttattgtaattttcgttttttgggtttacgttatttttttgttttagtttttcgagtagttgggattataggtattcgttattaggttaggttaatttttgtatttttagtagagacggggttttatcgtgttagttaggatggtttcgattttttgatttcgtgatttgtttgtttcggttttttaaagtgttaatatttttataaatgaatttttttattttaaagagtattttgtagagtatattttaaatatttttttgtttttatttattttttttatatttgttttagtatggaattttttttatttttttttgaggagggttttggttttattgtattttttttataaagtttttttttttttttgagatagagttttgttttgtcgtttaggttggagtgtagtagtatgattttagtttattgtaattttcgtttttcgggtttaagtaatttttttgttttagtttttcgagtagttgggattataggcgttagttattatgtttagttaatttttgtatttttagtagagatagggttttattatgttggttaggatcgtttcgaatttttgattttatgattcgtttgttttggttttttaaagtgttgggattataggtatgagttattgtgtttgggtttatattataaagtttttttttgaatagtttaaaatagtgttggtttaaaggaaatataatataaattatatgtgtaattttaaatgtgttagtagttatattaagaaaattttaaaaaggataaaattaatgtattttattaatttaaaattttaatatataaattaatataaaaattattaatttattttatttttttttgtattaaatttttgaaatttaatgtattttatttttatagtatattttaatttagtttagttatattttaagtgtttaatagttttatgtggtttgcgtgtttgttgtattggattgtgtaggtttttttttagggtgttggttattttagattagatgtattgtatataatttttagaagttaagtatattttatttttttattaataagattggtggttattaaagtttgatgattaataattatttggatttttttaatatatagatttatagaatttattaagatttattaaattaaaattttgagagggaaacgggggatttatttttagatattttttaggttgatgatttaggtttagaaattattaaataatattataaatttttttaattttgttttaagttttaagtatatgatagtagaaagtaagtagattttggaaatattgatagtttttaaaatttggttttgtggttgtgtagtgtttagaaaagtatttaaatgttttttattgttgaaagggattatattcgtttgttagtgatttatatattatagttagaataggtttaatgtaaagtggtatttaataaatagaagttattttattaatgatttttatgtagtttattgaatttaatttacgattttttatttaatataatatttatttaagaaataagataatataagttttttttttttgttttaattatttagatttttataaattgttatattatttgggagatttttttattttgtagagattaatttaataatttattttttgttttttattaatttaattgttggttttttagtggaaaaaaaaagtttttggttgataaaattattttatagaatgttttaaatttataaatttaaaaagttggtttgtgatagattaggtagttgatttaggttcgaatttaatgcgattaatgtaatttttgttttattaaataggggagattaaaaattttaaatatggtttataaaggaaatttatttatatttatattatttatttatagttatagta

SEQ ID NO: 447 - DNA, 6195 bp, Artificial Sequence
  chemically treated genomic DNA (Homo sapiens)
tattgtaattgtgggtaggtggtgtaagtatagatgaattttttttgtaaattatatttaaaatttttaattttttttatttaataagataaaagttgtattgatcgtattaaattcgggtttgagttagttgtttggtttgttataaattagttttttaagtttatagatttgaagtattttgtagagtagttttgttaattagaagttttttttttttattaaaaaattagtagttgggttaatggaaaataggaggtaagttgttgggttagtttttgtagggtggaaagattttttagataatataatagtttataaagatttgaatagttgaagtaggaagagaagatttatattattttgttttttaggtagatattgtattgggtaagaggtcgtgggttgaatttaatggattatatggaagttattagtaaaatagtttttgtttattgggtattattttgtattggatttgttttaattgtggtatgtaaattattaataggcgagtatagttttttttagtagtgagaaatatttaaatgtttttttgaatattgtataattataaagttaggttttgagaattgttaatgtttttaaaatttgtttgttttttgttattatgtgtttgaggtttaagataaagttaaaagaatttatagtattatttggtagtttttggatttggattattagtttggaaagtatttaaaaataaatttttcgttttttttttaagattttgatttagtgaattttggtgggttttgtgagtttgtatattaaaaaaatttaggtgattgttggttattaaattttagtaattattaattttgttaatgaagagatgagatgtatttaatttttaagagttatatgtagtgtatttagtttgaggtgattaatattttaggaaaagatttgtatagtttagtatagtaggtacgtaggttatatgaggttgttaagtatttgaaatatggttgggttgaattgagatatgttgtaagagtaaaatatattagattttaagggtttaatataaaaaaaggtaaaatagattaataatttttatattgatttatatgttaagattttagattaataaagtatattaattttgttttttttaaaatttttttgatgtggttattaatatatttaaaattatatatgtggtttgtattatattttttttgggttagtattgttttagattatttaggagaaggttttataatataagtttaggtatagtggtttatgtttataattttagtattttggaaggttaaggtaggcggattatgaggttaggagttcgagacgattttgattaatatgatgaaattttgtttttattaaaaatataaaaattagttgggtatggtggttggcgtttgtaattttagttattcgggaggttgaggtaggagaattgtttgaattcgggaggcggaagttgtagtgagttgagattatgttattatattttagtttgggcgatagagtaagattttgttttaaaaaaaaaaaaaggttttataaaggaggtgtagtgggattaaggttttttttagaaaaaaatgaaaaggattttatattagaatagatgtggaaagaatgggtaaggataaaggaatgtttaagatatgttttgtagaatattttttagaatggaggggtttatttataagagtattggtattttgggaggtcgaggtaggtagattacgaggttaggagatcgagattattttggttaatacggtgaaatttcgtttttattaaaaatataaaaattagtttggtttggtggcgggtgtttgtagttttagttattcgggaggttgaggtaagagaatggcgtgaatttaggaggcggaggttgtagtgagttaagattgtattattgtattttagtttgggtgatagagtaagattttgttttaaaaaaaaaaaaaaaaaaaaaagagtattggtgattaggttagatagttattattatgttatgttttagttatatttcgaaatttttcgaatattttatttgatttttgtaataattttatgagatgggtatttttgttatttattttatatttaatgaaaggtttagagaggttatgtagtttgttattaatagttagtaggtagtaaaggtaggttttatattgggtattgtgattttaagatttattttttatttttagggttgtgttatataaagatgttttggttatttttgttgttggttttaattagaggaagaaatggaaagggtttatgttttattttaattgataaaaagtttgatatattttagtattattaacgatttaaattgttattttgtaaggttttaagatattaatatgtttaatatgttttaaaatattaatattaagattgatgattgaaatgttaattttgtagaagtgtttggtttttggaatagaaattttttttttttttaatttaatatttgtaagtatttgtagaatatttggtatagtgttaggagaaggatttagagacgaatgtgatatattttttttttttaaggtgtgtttataagtaagttatttattatttatgtattatattacgtgttgaaatattttgaaaaaattttttttttttttttttgttgatgtatttttttttttttagttagtaaaaaagaagaaaattaagcgtgaaataaagattttggagaatttgagaggaggttttaatattattatattggtagatattgtaaaagattttgtggtgagtatagtaggtgttagtaaggttcgttagagttgagatggtgtttgatttggagtataattggtttttttttgtttttttttttaatttttattattaagttttgttttgaaagtgtttaattagatatattatttaattagtttgggttttttttttaaagagatttttatttatagattattttttatttttttaggttaagagattgatagtattggaaattgaaatgtgttaatttattttgtaaatttaggttcgatgtcgatgggcgatgggcgtattgtcgggttgtttagagtttggtgagattttagttttatgttttttgtttgaaatttattttaaaaatgatttaagtgcggtgatgattagagcggggagggtttgtagtaatagagggttttttattattgaggcgaggattgttaaattttattacgtagtattcgtaaatattgtttttattaaagttgttagggttattgttaatgtgtgtttttgtttttgttttttttttttagttacgaattttcgttttggtttttgaatacgtaaataatatagattttaaggtataatatataattaattgtttcgggttagtgggtttttagattatatagtttttggggatgatgttgttagaagagtttgtttcgtatttgtttttaaaaagttttttatttttatagtgtaaattttaagatagaagaatttttatataagtagtgtttattttttgtattttgatattttgtttatttgtttaatgttttttttaatgattaatatattgattttttattatttagttgatagtttttgttgatgtttaatttaatgaaggtagtaatatacgtttatttaggatttggttatatggtaattcgttttaaataatagtgtttaggaagaaatatattgtatgtataaaagtagggattgtttattttttaggattttttataaattgtgggttatagattttaaaaggtagggatcgaggaaggataatgttaaattttgttataatataaatttttataagagatattttagaattttagtttatttagtggtttatttattttatatagttttaattttatagaagaatatagttatttttttggagtaaaagtaaaaattttcgatttgtttttttattagtttagtatttagaatgttatatattaataaattagtgaattttgttgtagagatagggagaaaggaagaggaattgttttagagttagaatgataattttaagaaaaattttgttagaagacgttgttaattattaaagagacgtatttgtggttgggtatggtggttttcgtttgtagttttagttattggggaagttgaggtaggaggatcgtttgagtttaggagtttgaggttgtagtgagttatgattgtagtacggtattttagtttgggtagtagagtgaggattttgttttaaaaaaaaaaaaaaaaaaaaaagatatgtttatgtaaaaaatattttgtaattttttggaaattggaaaggatatataatagttgtttagagtttattttttaattggaataagaatagttttgttaaattgatttaataggtttggtattatgttatttgtatatttattggtgatttgtagggttaattatgtaaggtaaagatgagttagttttttattaaggaggtagtatatttgttaaaatgttttttttgagaaggtttgaagatatatgaaaagtaaattaaattataggtgggtgttagtgtatattaacgtatttagattagtatgtttttgatagtggattatagttttcgtaatatatgtttaagtaattttttatttttaagagttgaagatttaaagtatttttttaaagttaatgtaatgttggagaaatagagggtagtgaatggatagattttggaataacggtaaatgagttaagttttggtttgaattattgtgagtgagggtgaaaaatgtttttttgttagtattattttatggtttaaatatttgtttttaatagtaattgtattagacgttaatagattatgatattcgattttatatgtatgagattttgaaggtaagtgaattttgaatattaaatattttttaaattggttttttttttgttaaatagttaattgatggtagaaaagttagtagattaattttgtaaagtatgttgaaagaagggatttttatataagtttttaataagttaatagtattatatttgtaattttagtattttggaaggttgaggtaggaggattgtttgaggttaggagattaaaagattagtttgggtgatatagtgagatttttatttttataaaaaaaaattgtttaattatttgggtatggtggtgtgtatttgtaagttttagttatttgggaggttaaggtaggaggattgtttgaggttaggagattaagattagtttgagtaatatagtgagattttgtttttataaaaaatttaaaaattagttgggtatggtggtttatgtttgtaattttagttatttgggaggttgtgataggaggattttaggaatttgaggtagtagtgagttatgattgttgtataggttggagtgtagtagtatagagtaagattttgtttttaaatatataaataaataaaaattaataataatagtattagaatttttgtgttaagggttatggaatggggtttagtgggagtataatttagaataatttgaaaaagggtatttgtaagatagttgggattgattttttaataaatatttgtaatttttgtggtttttatgtaagttaatattaaatttttaaaattcgtgaaaatatttgacgtgttagtttttggtatattttattttatttaagagttagtaaataaaatagtaaattttaatttagtttttaaagggtaattgttttaaggattgtgtaaatttttgtttatagatgttaattgaaaatttatttatatttttaaagtggggttattaaatattttgtttttagtagttataagattagttttttagaagagagaattgttaaaagttggttaagtttttttattaaataagagttgatataaagtttgttgttggagttttagaaattttttgaggagattgtgttagtagagatatttgatttttttattggtttatgtagtttgtggtaagtaaggttttagaaagttatagatatgattgtttagttttgggaattgtaggaatttaagttgttttttaggaaggataagaatttggttaataacgtcggttgattgaaaggttgggattaataaattttaaagattatattatttagttttttttagtttgaggttggaaatattttagattggatttgatga

SEQ ID NO: 448 - DNA, 6199 bp, Artificial Sequence
  chemically treated genomic DNA (Homo sapiens)
aataataaaaattagttgttagttgggtatggtagtgggcgtttgtagttttagttatttaggaggtcgaggtaggggaattgtttgaatttgggaggaggaggttgtagtgagtcgagattatattattgtattttagttcgggtgatagagtgtgatttcgttttaaaaaaatttaaaaaaataaaaaaaattttaaaaattagttaggcgtggtggtttatatttgtaattttagttattcgggaggttaaggtaggagaattgtttgaattcgggaggtagaggttgtagtgagtttagattatatttttgtatttttggttgggtggtagagtgagattttgttttaaaataaaaataaaaaattaaatagttttagaggagtagtgggatggagaagtgttatgagtagaaggttttgtcgtagagagatagaagttgagaagggtagggtggtgacggtggagttttaggaattaggagtagggatttgtgggatttaagggaaggtatgggattggggcggggtggattaggttaaatgttgttggtagggtaggtttataagcgtaggtttttgaggtatttttaaggtattgcggttgtttcgtatgattttttagggattttttttgtagttgcgttagggtttcgcggggttggggtttaaaaagcgtgcggagttttagttggtggagatttagaatgtgcggtttattgaggtggagcgtagtgtgagtgtgggtttatagtgggttttggggaggtgtttcgtgtagtgtgagtgtgggtttacggtggattttgggttggggggtatttcgtgtagtgtgagtgtggatttatagtgggttcgggggtgggggtgttttatgtagtgtgagtgtgggtttgtggtaggtattagggggtgttttcgttatttggttattgttaatttttatttttgggtagaatgcgatgttggtggtagagaaggtagttttgtaggggtagttgtagtatttggaggggtagttggggagtttgtagggtcgtgtttaggagttgttgttgtagagttagcgggcgtaggagtatagtagtcgtttgtaggtgggtggtggttcgggtgtttatttttgtttatgtattgtttttttttgttttttttggattattttgtggtttttttttattttagtttttagttagttgttttattttttttttagttttatttatttttgttttttgattttagttattattttgtattattttttttgttattatttttttttatttgtcgttagtttttatatttatatttatgtcgttttgcgtttttattgttttagtttttttttttatagggcgttattagttttattttgttttgtgtttttttcggatagtttggtttagttagtttttgtcgttttttttttgtttattattagtttttggttggggtttgtattgtttgttgtgtttttagttttttgttttttttataatttttttattgttttgggttttatcgtttgtttttagtttttcgttttttattcgatttttagttaggggtttttttttagtagtttttgttttttttttttattttaggtcgagaagtttgtgttggagatttagggttaggagttgtatcggaagttggaggtgttggaggaggaggtgcgggcggtacggtagttttaggaggagattcgcgggtagtagtaggttttgtttcgggattataaggttttggtatagttgtagcggcggtaggaggtcgagttagagggattgttggtgcggtatcgagattttaaggttaatatgcgggtattggagttggtttatcgggagttgtagggtcggtgagtattattaaatgtttagttttttttttggtattttttatttgttagagaagattttttttagtaggtttgattttttattaggaagtatttttattttcgttttgtgatgtttcggttattgttgtgttttttggggtagttgtgttttttatatttttgggttgggtttttcgtggggtttatttattgggagtggtgggtatttggtatggtattttgtttaatggttttttttgggggatttaggtttaggaggtgatagattttttcgtttcgggtttagatagtttagttagttgtttgtggtggttataggtttatatagtttttttagttttttgtttattttaggtacgagtagttgtaggtttagcgggttagcgtggaggtataggaggtggttttgttggtagagcgtgaacgtttgatgtaagatgggtatcggtagcggggtttggaggaggagttgcggaggttttagagcgagtacgataggtgtcgtttttgttatagtttttagtagtttttagtggttttattttgaaagtgggttgggggtgtggggttttgtttggtttttttttttcggtataatttttttggttagtattcggattggggatttaggttttttggagagtagttttttttgttttttaagggtttagatgttgttggtagagttgtttcgggagcggggtgagttgtagggtgaacgcggggagttacggggtcggttggcgcggttggagttggagcgggtatagttggagatgtagagttagtagttgcgcgagtttaattagtagttggatttgagcgtttgtcggttgattacgtagtgtgaggtgtggttggagggtcggtgggggtatgggcgtgtggtggggtagaaagtttagatttaggtggttttgagttgggttttatttttcgagttatggtgtttttttgttagttattgatatagttgcgaagtgtttaggaagaggagaatcggtagttgttggttgaagtttaggttttgagtcgggagaatagggagtttttggagcgtagtttggagagtcgggattatttgtatcgcgaatagcgggagtatttgtgagtgggtcgtttgggagcggggtggggtttgtattttttttgggcgtttttggggagagtttttagtgagggtttagggatagggttggagttgattttttaggttagtttaatttgcggtacgggattagtgcgttttcgttgtagtttgtgttttgttattgtttcggtttttttgggttttatatttatttttttttttttatttttgttagggattagtttaatgttttgcgtcgcgagaagtagaagttcgtggagaagattatggattaatatcgcgtgttggagtttgtgtttttgtttcggattaagtgagtagttttgttattttttttaggttggatattttgttaatttttgtttttgttttggtttttgattttaggtttagtttaggtttaggttttatgaaggttaatttggtttttgatatttttaggatattttttgtttttttttttttttttgttttgatttttttttgtgtttttttgtttttaggaagggtagttggttggtagataaggtgaagaggttgatgcggtttcggcgggaggggggtttttttggggggttgcgtttgggggtcgatggggttggtagtatcgagagtttggggggtttttcggagacggagttttttgagggtagggaggtagatgggataggtgggtttgggggttaggtggttaggatggtttttgttttatattttttgttttttattttggtatttgttttattgtttggtttgtatgcgtgattttattggttttttttgaggtttgttttttttgttttgatgttattaggggtttttttttttgggttttatagggttatttttggtttatattttttttttgtttgtgttgttttcgatttagtttgttttattcgtagcggagtttaggatttgggaggtgtagtggattttagggagaggttattgtttttagattgtagatgaggagattgaggtttcgggaggggaagtttttgtttaaggttatgtagtgagttagtatgaaggttagtatagggttagtgttttgttgttttatttatttgtttggttttttttttatttttgtattttttttttttggttttgggtagttttatttattggtttttttattttatttagggttttgtttttttgattttttttttgtatgagttttcgttttttttttttgattttttttttgtatgaattttagtttttttttttgattttttttttgtatgagatttagttttcgttttttttttttgattttttttttgtataagttttagttttttttttttttttgattttttttttgtatgagttttagttttttttttttttttgattttttttttgtatgagttttagtttttattttttttttttgattttttttttgtaggagttttagttttttcgtttttttcgtttgattttttttttgtatgagttttagttttttttttttttttttggtttttttcgtgtatgagttttagtttttattttttttttttgattttttttttgtaggagttttagtattttttttttttgtttgattttttttttgcgtgagttttagtttttttttattttttgattttttttttataggagttttagttttcgttttttttttttattttttttttgtatgtattttttgtagggttttttttttcggtatttatgcgtcgggtttagagttttttttgtttgcgggatgagattttggtaggcgggtagcggcggaaatttagtttaaggttttcggtggggcgaagttttgagttatttagttttggggatatttttaggtaacgatttcgatagcgttatttaggttttttgggggcgttcgttttttatagtaaaggtgagggataagggttattgtattagttagttttttaattttttgtggatttattagttttttgggggaggaggttttttttttgttttttgtgttttttgtaagttttgtttattttcgtattggttttgggtttagtggttgttttgtgttttttaggatttggtgtgggatgggagaatttcgttgagattttgtaggaatacgaaatagatgttaatcgagagggtgagtgggggattgtggaaggagtagtattttttgttttgtttggggtttttggtagaattttatttatttatttttttattcgataatgattttttattaagtgttaggtgacgtgttggtaggggatatagtagggaacgttttggtgtgaggaggtagatagtaaataatttgtttaaaaataattattatttataatagttttgtttattagaaatatggtgtgaattatatgataattttaatttttttagtaggtttattagaaaaagtgaaaagagataggtataatggattttaataatatttaatttaatatgtttacgttattattattttagtatgtagttagtgtaaaaattatgaatgagttattagacgtgatgttttttttttttttttgagatggaattttattttttggtttattgtaattttttttttttaggtttaaacgatttttttggtttagttttttaagtagttgggattataggtatgggttattacgttaggttaattttgtataattattattattttttttagtagagacggggttttattatgttggttaggttggtttcgaatttttgattttaggtgattcgttcgttttagttttttaaagtgttgggattataggtgtgagttatttagttagacgtgattttttttatagtaagtttttggtagtttcggaggttaaggtaggtagattatttgaggttagaagttagagattagtttagttaaaatggtgaaatttcgtttttattaaaattataaaaattagttaggtatggtgttttatgtttgtaattttatttatttagggggttgaggtaggagaatcgtttgaatttgggaggtagagggtgtagtgagttaagattacgttattgtattttagcgttggtgatagagtgagattgttttaaaaataaaaaataaaaaataaaaaaatatagtaggtttttgaagtacgttataggttaattttattttatttatttagtttcgttttgggtagtttagttttagattcggttggattattaggaggcgttaatgttttgggaagaa

SEQ ID NO: 449 - DNA, 6199 bp, Artificial Sequence
  chemically treated genomic DNA (Homo sapiens)
ttttttttagagtattagcgttttttgatggtttagtcgggtttagggttgagttgtttagggcggagttaagtaggtgagatggggttggtttgtgacgtgttttaaagatttattatgtttttttgttttttgttttttgtttttgagatagttttattttgttattaacgttggagtgtaatggcgtgattttggtttattgtattttttgttttttaggtttaagcgatttttttgttttagttttttgagtaggtgggattataggtatgggatattatgtttggttaatttttgtagttttagtagagacgggattttattattttggttaggttggtttttaatttttggttttaagtgatttgtttgttttggttttcgaaattgttaaagatttattatgaaaaaaattacgtttggttgggtggtttatatttataattttagtattttgggaggttgaagcgggcggattatttgaggttaggagttcgagattagtttgattaatatggtgaaatttcgtttttattaaaaaaaataataataattatataaaattagtttggcgtggtggtttatgtttgtaattttagttatttgggaggttgagttaggagaatcgtttgaatttgggaggaggaggttgtagtgagttaaagagtgaaattttattttaaaaaaaaaaaaaaaatattacgtttaatagtttatttatgatttttatattggttatatgttgaaatggtaatagcgtaggtatattgagttaaatgttattaaaatttattgtatttgtttttttttattttttttggtaagtttattggaaaagttaaaattattatgtggtttatattatatttttagtggatagggttgttgtagataataattatttttaggtaaattgtttattatttgtttttttatattagaacgttttttgttgtgttttttgttagtacgttatttggtatttggtaaaggattattgtcgaatgaaagaatggatgaatgaggttttgttaggggttttaggtaggataaagaatattattttttttatagttttttatttattttttcggttggtatttgtttcgtgtttttgtagggttttagcggagtttttttattttatattaggttttgggaggtataaggtaattattgggtttagggttagtgcggaagtggatagagtttgtaggagatataggggataagaaggaagtttttttttttaaggagttggtgggtttataaagagttggggggttggttggtatagtgatttttgttttttatttttgttgtgggagacgggcgtttttagggggtttggatggcgttgtcggaatcgttgtttaggggtgtttttagggttgaatgatttagagtttcgttttatcgggaattttgagttgagttttcgtcgttgttcgtttgttaaggttttatttcgtaggtagagggagttttgggttcggcgtatgggtgtcggggaaggggattttgtaagaggtatatgtagggagggggtgagaggaggggacgggagttgaggtttttgtagggaggaggttagagaatggggggaggttgaggtttacgtagggagggggttagataaggggagggggtgttgaggtttttgtaggaaggaggttagagaagggaagtgggggttgaggtttatgtacggagagggttagaggaggggagagggagttgaggtttatgtagggagggggttagacgaggggagcgggggggttgaggtttttgtagggaggaggttagagaagggaagtgggggttgaggtttatgtagggagggggttagaggaggggaggaggttgaggtttatgtagggagagggttagaggagggggggaggttgaggtttatgtagggagggggttagaggaagggaacggggattgagttttatgtagggagggggttagaagagggggttgaggtttatgtaggggaggggttagagggggggggcggaggtttatgtagggagggggttagaggaatagggttttggatggagtagaggggttagtgggtgaagttgtttagggttagggaggggaggtgtagaggtgggggagaagttaggtaaatgagtggggtagtaggatattggttttgtgttggtttttatattaatttattgtatgattttgggtaaaagttttttttttcggggttttagtttttttatttgtagtttaggaataatgatttttttttagagtttattgtattttttagattttgggtttcgttgcggatggggtaggttgggtcggggatagtataggtaggagggaggtgtgggttaagggtgattttgtaggatttagggaaaagagtttttggtggtattagggtagggggggtaggttttagggaaggttaatggggttacgtatgtaggttaggtagtgaggtaggtgttaaggtgggggatagaggatgtggggtagggattattttggttatttgatttttagatttatttgttttatttgtttttttgtttttaggaagtttcgttttcggggggttttttaggttttcggtgttgttagttttatcggtttttaggcgtagttttttaggggggtttttttttcgtcggggtcgtattagtttttttattttgtttgttagttagttgttttttttgggggtaagagggtataagagggggttaggatagggaggagggagggagtaaagggtgttttggggatgttaaaggttaggttgatttttatggggtttggatttgagttgggtttggggttagaggttagggtaggggtagaggttagtaggatgtttagtttgagggaggtgatagggttgtttatttggttcggggtaggggtataggttttagtacgcggtattggtttatgattttttttacgagtttttgtttttcgcggcgtagggtattaagttggtttttggtaggagtgagaagggagaggtgggtgtgaggtttagggaggtcgaggtagtagtaaggtataagttgtagcgaggacgtattggtttcgtgtcgtagattggattgatttggaaggttagttttaattttgtttttaggtttttattaagggttttttttaggaacgtttaaaggggatgtaggttttatttcgtttttaggcggtttatttataggtattttcgttgttcgcggtgtaggtggtttcgattttttaggttgcgttttaggagttttttgttttttcggtttagggtttgaattttagttagtagttgtcggtttttttttttttgggtatttcgtagttgtgttaatagttggtaggggggtattatggttcggagggtgggatttagtttaggattatttgggtttaggttttttgttttattatacgtttatatttttatcggttttttagttatattttatattgcgtggttagtcggtaggcgtttaggtttagttgttggttggattcgcgtagttgttggttttgtatttttagttgtgttcgttttagttttagtcgcgttagtcggtttcgtagtttttcgcgtttattttgtagtttatttcgttttcgagataattttgttagtagtatttgagtttttgggaggtaaggagagttgttttttaagggatttgggtttttagttcgagtgttggttagagaagttatgtcggggaggggaggttagataggattttatatttttaatttatttttaggatggggttattgagagttgttagaggttgtggtaggggcggtatttgtcgtgttcgttttgaagttttcgtagttttttttttaggtttcgttgtcgatgtttattttgtattaggcgtttacgttttgttagtagggttattttttgtgtttttacgttggttcgttgggtttgtagttgttcgtgtttgggatggataaggggttaagagggttgtgtgaatttatggttattataagtagttggttggattatttggattcggggcgggggggtttgttattttttaagtttaggttttttagaggaagttattgggtagaatgttatgttaggtgtttattatttttaataggtgagttttacggggagtttaatttagaagtgtggggagtatagttattttagagggtatagtagtggtcggggtattatagagcggaggtggaggtgttttttgatggggagttagatttgttgaggggagttttttttggtagatagggggtgttaggggaggagttgggtatttggtgatgtttatcggttttgtagttttcggtgggttagttttagtgttcgtatgttggttttgaggtttcggtgtcgtattagtagtttttttagttcggttttttgtcgtcgttgtagttgtgttagggttttgtggtttcgaagtagggtttgttgttgttcgcgggtttttttttgggattgtcgtgtcgttcgtatttttttttttagtatttttagttttcggtgtagtttttggttttgaatttttagtatagatttttcggtttaggatggaggagggaagtaggggttgttggggaggaatttttggttggaaatcgagtgagaggcggggggttaagggtagacggtagggtttaagataatgagagagttgtggaggaggtaaagggttgggggtatagtaggtagtataagttttagttagaggttgatggtgagtaggggagaggcggtagaggttggttgggttaggttgttcggaaggggtatagggtagaatgggattaatggcgttttgtggaggggagggttgggatagtgagagcgtagggcgatatgggtgtagatgtgggggttggcggtaggtaggaggagatagtggtagggaggatggtgtaaaatggtggttggggttagaggataaggataaatgagattggggaagaggtggggtagttggttgggagttgggatagaaaaaggttataggatgatttaaaaggagtaggagggggtagtatatgggtagggatgggtattcgggttattatttatttgtaggcggttgttgtgtttttgcgttcgttggttttgtagtagtagtttttgggtacggttttgtaggttttttagttgtttttttaggtgttgtagttgtttttgtaaagttgttttttttgttattagtatcgtattttgtttagaagtgggggttagtaatagttaggtggcgggggtattttttagtgtttattataggtttatatttatattgtatggggtatttttattttcgggtttattgtgagtttatatttatattgtacgggatattttttagtttagggtttatcgtggatttatatttatattgtacggggtatttttttagggtttattgtgggtttatatttatattgcgttttattttaataagtcgtatattttgggtttttattagttgaggtttcgtacgttttttgggttttagtttcgcggggttttggcgtagttgtaaggagagtttttgggaggttatgcgggatagtcgtagtgttttggggatgttttaaggatttgcgtttatggatttgttttgttagtagtatttagtttagtttatttcgttttaattttatgtttttttttggattttataagtttttgtttttggtttttgaagttttatcgttattattttgttttttttaatttttgtttttttgcggtagagttttttgtttataatatttttttattttattatttttttaagattatttggttttttgtttttgttttgagatagagttttattttgttatttagttaggagtgtagaggtgtgatttgggtttattgtaatttttgtttttcgggtttaagtaatttttttgttttagtttttcgagtagttgggattatagatgtgggttattacgtttggttaatttttagggttttttttgtttttttgggtttttttgagacggagttatattttgttattcgggttggagtgtagtggtgtgatttcggtttattgtaattttttttttttaggtttaagtaatttttttgtttcggttttttgagtagttgggattataggcgtttattattatgtttagttaatagttaatttttgttgtt

SEQ ID NO: 450 - DNA, 6229 bp, Artificial Sequence
  chemically treated genomic DNA (Homo sapiens)
tatatttttttaaagttttattgttttagatattttgagtgggtttaaaggaaggatttaggttagaatttagtaatttattttgtatttttaaaaattattttattttatttatttatttttttgagatagggttttattttgttgtttaggttggaatgtagtggtacgattatggttttttgtagttttgattttttaggttttagtaatttttttattttagttttttgagtagttaggattgtaagtatatattattatatttatattatttttttgattttttttttttttttttattagagataaggtttcgttatatattttttaggttgagtttgaatttttgagtttaagtaatttttttatttcggttttttaaagttttgggattataagtattagttaaagtattcggttatttatttttttttttttttttttttttttgagatggagttttgttttgttgtttaggttagaatgcggtggtgtgattttggtttattgtaattttagttttttaggtttaagtgatttttttgttttaattttttaagtagttgggattatagttgtttgttatcgtgtttggttattttttttgtatttttagtagagatgagtttttgttatgttggtaaggttggtttcgaatttttaacgttaagagatttatttgttttggttttttaaagtgttgggattataggtttagttatttatttttaatatgtatgtgtttattagtatttttaaattatagtttaggtacggtggtttacgtttgtaattttagtattttgggaggttgaggtgggcgaattatttgaggttaggagtttaagattagtttggttaatatggtgaaattttttttattaaaaatataaaaattagttaggcgtgttgttaggcgtttatttatttgggaggttgaggtaggagaattattttaatttgggaggtagaggttgtagtgagttgagattacgttattatattttagtttgggcgatagagtgagtgagatattgttaaagaaaaaaaaaagtataaagataaatttagatatataatttataatattggtattttagtggagagggaggatattattggtattattttattaaattaaaagggttgatgaaaaaaatttaataaaagttatattattttattattttaaaatatatagttagtttttttaaaatatgttattttaagttatttaatatagtttttgaaatggaaaaaaaatttaaaaattaaatggtttttttttaaatatataattttttattaagtaatgttaataaaattttttagatttttagtttttagtttattttttttttttttaatttaaatgttcgatcgtgtttatttttaatattaataagataagttattttaaatggatatatgtatttttaggagaaatgtattttatttttatagttttttttttttattttttttattttttgttgaaatttatttaagtgaatagtatttgggatatgggaattattattaagtgttaagttattttaattattgtttgataataattacgttttaaggtaaaaatgattatttttttaaatagataaaattaataggataaagattattaaagattaatatttattatattaatatagagattttttttagtttttgaagatataattaagggaatttttttatattataggagagtattttttgtttttaaatatttttgttaataacgtataaataaaaatatttaatatgtaattgtatagtttaatgaatttttggaaagtaaatatttattgtaaagtaaattattatttaggttaagataaagaatattgttagtattttaggagattttttgtttgttttttttagatagtaatttttttttaaattttttattattatttgattttttttgtaagaggtgggggttgttttgttttttaattattttaggtaatagtatgggagtaaagtaaatatttaaataattgtggtttattggatatatttttgtatttattatttaagtatatattttagataaaagttttattgtttagatgattgtttttgttttttattttaatgagtggtaatgggtttaatagattaattgaggtgggtgtttttgaatgttaataaattttttttttagaaatggtatttaattaattttggtttttgtttataagtattattatgataattaggaatgattgtttgtgtagtagagtatttatatgtaattgtaatgagagtgagttatgagttaaattgtataagtgtgtggtggtgttggtgagtaattaattaatagtttttatatttaggaattgaattagtgttagaaagttatttggatagtaaatagtaatatgagaagaattttaaatagtttatagttgtagaaaatgtattattttaggttttgaatttttttagttatttttgtttgttgttattttgaaaataagttataatatgtaaaaattaaaagagtatttaataaaggttggtatttattttaagtaattttaggattatttttttgtatgatggtttaagtttggtttggtaagtatttattatttgtttgtttgttttaaattttttttttggagattaattttttttttaagttatttatttatgaatgataaaatgtttttgtgtgtagtttttattttttttttattatggattgtaaattgagagggaaaagattaagaaaaattgaagaagtatttgtttttgatgttaagtttttttttattggttattttttttagaggatatagagagtttagagaggtaggttgataatgttattttagtgttaggttttgattaaaaagaggaagagaagaaaattgtagagggataaagtgggaaaataattgaattttaaggaaatgaatatttaataagtatttattttgtttaagatattatattatatatttgattgggagatgaggtaattataaaataaaacgaagtaatttgtaatttagtttgtattagagtagttaggtttagtgagagattagcggaggtatgtttgttttttgaatgattgtagtgttttttatttcgattttttagagttttaattagaagggatgaggatggaatattggaaaagggaaatatagagtattcgtttgaattttttaaggtgtgggattgtagtgtttggggattaggttatgttatttaaaaagttgaggtagtattataatgttgttgttatgaaatttttttattgttttattgttttagtttatgatttgtgtataatgggatgagtattgggagttatatggtttggaatataataattaattatatgttattatgtttaagattttaaaagatttgaaatttttatttgttatgtattaataggatagtttttggatattgttttgtatttaagttataatattattttataagttaataaattatatttcgttttaaaatttttaaatatagtatttttttaaattaaaaagtatatattggttagtcgcggtggtttatatttgtaattttagtattttgggaggttgaggtgggtggattatttgaggttaggagttgaagattagtttggttaatatggtgaaatttagtttttattaaaaatataaaaattagtcgggcgtggtggcgtgtgtttgtaattttagcgatttaggaggttgaggtaggaggattatttgaatttcggaggtaaaggttgtattgagtggagattgtattattgtattttagtttgggcgataagagtaaaattttattttaataaaaaaaaagaaagaaagaaaaatgatattagtatttattttatattattagtataatagttaataatttaaaatgttttttgattgaacgtagttattaaaattaatttatattttttttttttggaaattatgggaatatttttaagggattaaaaatgttttggataaaatattagtaaggaaagaaagttttaagaatttaaggtcgggagtggtggtttatgtttgtaattcgagtattgtgagagggcgaggtagaggattttttgaggttagaagttcgaaattagtttgggtaatttgataaaattttgtttttataaaaaaatataaaaaatataaaaattagttgggcgtggtagtatatatttgtagttttagttatttaggaagttgagggacgatcgtttgagtttgggaggtagatattgtcgtgagttgtgattgtggtattgtattttagtttgggcgatagagtgagattttgttttaaaaaataaataaataaataaataaataaataaaattttagtatgggtaatatggtaaaattttgtttttattaaaaatatattaggtatgatggtatgtatttgtggttttagttatttgggaggttgaggtaggaggattatttgagtttgggaagcggatattgtagtgagttgagattatgttattgtattttattgttggtgatagagtgagattttattttaaaaaaaaaaaaaaaaaaaaagaatttaaataatttaataaagtattgaaaagtagtttaaaaaaattgtgattatacgattaatagtattgttgttataatttgggatgattttaaaatatggttataaaattattttatattatttttgtatttattggtgttgtttgttaaggttgtgggtaaagttatttttaagttgagtaggaaggttattggtatagttttttatgtttttattattaatgtgttttttatggatttgatttgttatttggagagatttgttaaatgtgatgagaggttaggtgtacgatttttttttttgaatatggttttagtgatggtttgatttttaatagaatatagtaggggtaatgttttattaatttttaggtttaagaagttgtagtttttatttttttatttaagatatttgtttgtgagatgtttatttttagaaggtagttattaagtagtgaatagtttaggatagatatatgggagaggttaaggataagtgttgataaattttagttgattgttagtattaatagttaaatttttgagtgaagaagtttttaatgattttattttttagacgttatgtttttttatttgatgtttagataatatgggttaaagataatttgattttggtgtgttttatttaatttttgattgtagaattagagtataataaaatgaatgttttatattattaagttttgggatggtttgttatagtaatatattattgtagtatgatttattagaatgaaattacgtaattattatagttaataatttattttttttttaaaaaaaaaatttatattttttgttttttttatttaatagttatatttttttatgtaatatttattatatttttgagatattataatgaaagtgaaagttaggtaaattgatttggttttattagatatttggttattaaggttgtttttaattttggcgaagtggatattgttttattaaggatttttttattgtttttaattatacggtttatatgttttatgatgattttatttatggtaaatttcgtggtatagttaaggttgagaatggtaagtttgttattaatgaaaatattataattattttttaggagtaaatttttattaaaattaaattgggtgatgttattataattatattgtggagattattggtatttttattattttgtagaaggttggggtttatttaaaaggagaaatcgaaagggttattatttttgttttttttgttgatgtttttatgtttgtaatgggtatgaattatgaaaagtaaaaaaatatttcgtaatttttagtaaattttttatattattaattgtttagtattattggttaagattatttatgataattttggtattatgggaggaattatgattttatttatgttattattattgatatttagaagattattgatggtttatttgggaaattgtggtgtaatggttttttagaatattatttttgtatttattggtgttgttaaagttgtgggtaaagttatttttaagttgagtagggagtttattggtatagttttttatgtttttatagttaatgtgtttattatggatttgatttgttatttggagagatttgttaaatat

SEQ ID NO: 451 - DNA, 6229 bp, Artificial Sequence
  chemically treated genomic DNA (Homo sapiens)
gtatttggtaggtttttttagatggtaggttaggtttatgatggatatattggttgtggggatatagaaggttatgttagtgagttttttgtttagtttggagatgattttgtttatagttttggtagtattagtaggtataggagtgatgttttggaaagttattgtattatagttttttagatgggttattagtggttttttggatgttagtgatagtagtatggatgaggttatgattttttttatgatgttaaagttgttatgggtgattttggttagtggtgttaagtagttagtggtatagaaggtttgttgggaattgcgaggtgtttttttattttttatggtttatgtttattataaatatgggggtattagtagagggggtagagatgatgattttttcggtttttttttttaaatgagttttagttttttataaggtagtgaagatgttagtggtttttataatgtaattgtggtggtattatttaatttgattttggtgggaatttgtttttagaaaatggttatggtatttttattgatgataagtttgttatttttagttttgattgtgttacggaatttgttatgggtagaattattatggaatatatagatcgtgtagttgagggtaatgagggggtttttgatgagataatatttatttcgttagagttaaaagtagttttggtgattaggtgtttaataaggttaaattagtttatttggtttttatttttattgtgatgttttagggatgtgatgggtgttatatgagaagatgtggttgttgaatgggaggaatagaaagtgtaaattttttttttaagaaaaaaatgaattattgattgtagtaattgcgtgattttattttaataggttatgttgtaatgatatattgttgtaataaattattttaaaatttagtggtgtaaaatatttattttattatgttttggttttgtagttaggaattggatggggtatattagagttaggttgtttttggtttatgttgtttgggtattaggtggaaaaatatgacgtttgagggatggagttattgaaggtttttttatttagaagtttggttattggtattagtagttagttggagtttgttaatatttatttttggttttttttatgtgtttgttttgagttgtttattgtttggtggttattttttaagagtgagtattttataagtaggtgttttaagtgaggaaatggaagttgtagttttttaaatttgggaattagtagagtattatttttgttgtattttattagaggttaagttattattgaagttatatttaaggagagggatcgtgtatttgattttttattatatttggtaggtttttttagatggtaggttaggtttatgagggatatattggtggtgggggtatagaaggttatgttagtgatttttttgtttagtttggagatgattttgtttatagttttggtaggtagtattagtaggtgtaggagtgatgtaaaataattttgtggttatgttttaaaattattttaggttgtgatagtagtgttgttgatcgtgtaattataatttttttaagttattttttaatattttgttagattatttagattttttttttttttttttttttttgaggtagagttttattttgttattaataatggagtgtagtagtatgattttagtttattgtaatgttcgttttttaggtttaagtgatttttttattttagttttttaagtagttgggattataagtgtatgttattatgtttggtgtgtttttggtaaagatagggttttattatgttgtttatgttggggttttgtttgtttgtttgtttgtttgtttgttttttgagatagggttttattttgtcgtttaggttggaatgtagtattataattatagtttacggtaatgtttgttttttaggtttaggcgatcgttttttagttttttgagtagttgggattataggtgtgtgttattacgtttagttaatttttgtattttttgtatttttttgtagaggtagggttttgttaagttgtttaggttggtttcgaatttttggttttaagggattttttgtttcgtttttttatagtattcgaattataggtataagttattattttcggttttagatttttaaagttttttttttttgttaatgttttatttaaaatatttttaattttttgagagtatttttatagtttttagaagaaaaaggtatgggttggttttagtagttacgtttagttaggaaatattttaaattattaattgttatattaatggtatgaaatggatattaatgttatttttttttttttttttttttttgttgagatggagttttgtttttatcgtttaggttggagtgtaatggtgtaatttttatttagtgtaatttttgttttcggggtttaggtgatttttttgttttagttttttgagtcgttgggattataggtatacgttattacgttcggttaatttttgtatttttagtagagattgggttttattatgttggttaggttggtttttaatttttgattttaggtgatttatttattttagttttttaaagtgttgggattataggtgtgagttatcgcggttggttaatgtatgttttttaatttaaaagaatgttatatttgagggttttgaaacgaaatataatttattagtttatagggtgatgttataatttaaatataggatagtatttaaaagttgttttgttaatgtataatagataaagattttagattttttgggattttagatatagtaatatgtgattaattattatattttaaattatgtaatttttagtatttattttattatgtataggttataggttggggtagtgaggtagtgagggggttttatgatagtaatattgtggtgttgttttaattttttagatgatatagtttgatttttagatattgtagttttatattttaagaagtttaggcgggtattttgtattttttttttttagtattttatttttattttttttggttgaggttttgggaggtcgaggtaaaaaatattgtaattatttagagaatagatatgttttcgttagttttttattagatttaattgttttggtataggttggattgtaaattgtttcgttttgttttgtaattattttattttttaattaagtgtgtgatatggtattttaaatagaataagtatttattaaatatttatttttttgaaatttagttgtttttttattttgtttttttgtagtttttttttttttttttttttgattaaggtttagtattgagatgatattattagtttgtttttttggattttttgtgttttttagagagaataattagtgaaagaagatttggtattaaggatagatatttttttagttttttttagtttttttttttttaatttatagtttatagtgagggagaaatgaaagttatatatagaagtattttgttatttatgggtggatagtttaggaagaaaattggtttttaaggaaaaggtttaaaatagataaataaatgataagtatttgttagattaaatttaaattattatgtaaaggagtaattttgaaattatttgggataaatgttagtttttattggatgtttttttaatttttatatattatgatttatttttaaaatgatagtagatagaaataattaaaagaatttaaagtttggaatagtgtattttttatagttgtaagttatttaaaattttttttatgttattgtttgttatttagatggttttttggtattggtttagtttttagatgtgagagttgttggttagttatttattagtattattatatatttgtataatttggtttatgatttatttttattgtaattatatgtgggtattttgttatataaatagttatttttgattgttatgatggtatttgtaaataagaattagaattgattggatattatttttagaaggaagatttgttgatatttaaaagtatttattttagttagtttattggatttattgttatttattggagtgagaaatagaagtagttatttagataatgaaatttttgtttaaaatatatatttgaatgataggtgtaaaagtgtatttagtgagttataattatttggatatttgttttgtttttatattgttatttaaagtgattaaaaaataaaataatttttattttttataaaagaagttagatggtggtaggaggtttgggagagggttgttatttgaaagagataaataaggagttttttgagatgttggtagtgttttttgttttaatttggatagtggtttgttttgtaataggtatttgttttttaaaaatttattgaattgtataattatatgttgggtatttttgtttatgcgttattagtaaaagtgtttaaaaatagaaaatgtttttttgtaatgtaggagaatttttttagttatatttttaaaggttagagaaggtttttatgttaatgtagtagatattggtttttggtagtttttgttttattaattttatttatttagggaaataattatttttattttaaaacgtggttattgttaaatagtgattggaatagtttaatatttaatgatagtttttatgttttaaatattgtttatttgaatgggttttagtaaggggtggagagggtgaggagagaagattgtggggatgaaatatattttttttggaaatatatatatttatttggaataatttattttgttgatgttaggggtaaatacggtcgaatatttagattagaaaagaggaaggtagattaaaaattagaaatttgaagagttttattagtattgtttaataaaaaattatgtgtttggaagaagattatttaatttttaaattttttttttattttaaggattgtattaagtaatttaaaatggtatattttaaagaggttagttgtatattttggaataatagagtgatatgatttttattaaattttttttattagtttttttagtttgatgaaataatattaataatgttttttttttttattgaaatattagtgttatggattatatgtttaaatttatttttatatttttttttttttttgatagtattttatttattttatcgtttaggttggagtgtagtggcgtgattttaatttattgtaatttttgttttttaggttaaagtgatttttttgttttagttttttaagtaggtgggcgtttgataatacgtttaattaatttttgtatttttagtagagaaggttttattatgttggttaggttggttttgaatttttgattttaagtgattcgtttattttagttttttaaagtgttgggattataggcgtgagttatcgtgtttgggttgtggtttagaaatattaatgaatatatatatattaagaataaatagttgggtttgtaattttagtattttgggaggttaaggtaggtggattttttgacgttaggagttcgagattagttttattaatatggtaaaaatttatttttattaaaaatataaaaaaagtagttaggtacggtggtaggtaattgtagttttagttatttgggaggttgaggtaggagaattatttgaatttgggaggttgaggttgtagtgagttaagattatattatcgtattttagtttgggtaatagagtaagattttattttaaaaaaaaaaaaaaaaaaaagagaataaatagtcgggtgttttggttaatgtttgtaattttaaaattttgagagatcgaggtaggaggattgtttgagtttaggagtttaagtttagtttggggaatatgtagcgaaattttgtttttagtaaaaaaaaaaaaaaaaaattaaaagaatgatgtgggtgtggtggtgtgtgtttatagttttagttatttaggaggttgaggtgggagaattgttggagtttgggaggttaaggttgtagggaattatgatcgtgttattgtattttagtttgggtaatagagtaagattttgttttaaaaaaataaataaataaaataaaataatttttaaaaatatagaataaattgttaagttttaatttaagttttttttttggatttatttaaagtgtttggaataatagaattttaaaagagtgta

SEQ ID NO: 452 - DNA, 6229 bp, Artificial Sequence; identical to SEQ ID NO: 450
  chemically treated genomic DNA (Homo sapiens)

SEQ ID NO: 453 - DNA, 6229 bp, Artificial Sequence; identical to SEQ ID NO: 451
  chemically treated genomic DNA (Homo sapiens)

SEQ ID NO: 454 - DNA, 6211 bp, Artificial Sequence
  chemically treated genomic DNA (Homo sapiens)
aattgattagtttttttgcgaaattagtaagtttgtttttttagtaagtttattttttatatgtgaatatattttagtatattcggatttttaaggttttttaggtggaggttgaatttttttggggtaattagtttttttggttttttattttaagttttattaagtttcggtttattttgggagtttggtttttttttagagagtcgtaaatttaaattagtttagagttggggttgtaggtgattttagggagatttgatttgaaaggattttttttaagtgatagggtagagtatagattgtaaaaacgtatattaagaaattatttttggtcgggcgcggtggtttatgtttgtaattttagtattttgggaggtcgaggtaggaggattatttgagtcggggagttagagattagtttaggtaataaagcgaaatttcgtgttttttttttttttattatatatatatatatatatatatatgtgtatatatataatatttatttatatatatttatttatatatgtaatatttatatatattatgtaaaattaatcgattaattaattattttgtggtggtattatgggttttgatggtggtaataattgttgatgtttattttggtttggggtattgagatcgttcggagattatagtgttagttttagggcggggtagaaattagaggataggggatttttagggtttggtgagttgagggtttaaggggagtgggttttaggttttttttaagttttagtttagattaggtttaggaatttagtgtgaatgtgtgtgttggggtcggggataaggtgtttttttttcgttggaaggagaaggaatatttgggttgggattttaaaagagttgagcgggggagaacggtggttttggtgtggtgtgtttaggggtatattattggaagggaaggagttagtagggttttttcggcggagtcgagcgcgggtcgggggttcgcggtaggggcggggtcggttttcggggcgcggcgggggcgggggttcgcgttgggaatgtcgcgtcgcgggggttggggcggggttttttcggtttcgttttcgcgtaggtagttaatgggcgcggcggcgtcgggtgacggagggagtcgaagtgttagtgtcgcggcggcggcggcggacggtttagtcggagcgcgaggggttcgggggggcgcggcggttcgggtcgtagagttagggattttaggattcgggaggcggcgtagtcggggtcgtcggaggagcgcgggtgatttggcggcggcgagatgtcgttcgtttagtttaaggagttttggtcgtttatggagttagtgtttttggattcggaggtgagtgagcggggcgggggacgggcgttcgcggtcggcgagttcggatttttataggggcggggcggttcgaagcgtcgttgtagttcggcgggcgttcgcgagggcgcgagtgtttttcgattttttgtttattgttcggttttatttttttatgttcgggtgtgcgtgtgcgagggatagtttcgttaagcgtcgattattttttcgttatagttaggagaggggattttatggggcgttgagatttggtcgtttttattttatatttaggattcgtttcggtatttgtttagagttgtcggagttttttttattaatgtagacggggagatttttagtgttagatgtttgggattttattagagataggggttatgggatttttattttttttagggtttttcgttaagagttttttgtttttggttttatcgttgttgagtttagaaggattgttttttttgatttttggcggatgcggagtgtgggatggtattattcgtttggggttggaatttttggttttttttgttttgaggttagggttagaggatatttgtgtgttttattttaggttgtggagacgagagtggggaagagtttttagattttgtgaagatgatttttggtagggcgtggggggattttggtgtttgtttttttttttatgtttttttcggtaggaagggttgggtttttggggagtttggtttttgttagtttagattttttagataatttagtttttttttttttagaagtagtttttgattttttttgagggttttgtggttttagtttttaagcgtgtagaaggttatttttttttgtgttttttgattttagggttaaggttaagtttttgaatgagttggtggaaaattttttttttaattttttgttgggaaggaagtaggtgatatttttttttttaggtggttgttgggggtatgtagggagggaatggagattttatttgagtttaggagttgagatgatttttttttagtttgggtttggagtttttgttttagtttttttttttgtttttttttatttagggtagttattaagtgttttgttttttaggattataggtttagattagggtgagtatttagggtttttagtttttagggtgtgttgtttttttaaagggatggtcgatattggttattggagggtgggcgcggtaggattaggtaattaatttgaaggagtaatttggagtaaattgttttgggatttttgttatggggattttataggtattgttaggttgtttagaggttttttcgttgatttattttttgaggtgaggaatattgttttttgtagtttttgtattgttatttcgttattaggatcggggcgtaaggttttgggggtggtgtttagaggtggatttttttgtttaggtacgtttttgggattaggtttttaaaggagaaggtagggttgggagaggttggggagtgattttatgttgatagggagggtggatatttaggagttcgattttggggtattattttttgtttttttttagggaattttgaggtaggggttagttttattagggagttaggtttaattgggaaatttattttagttttgagttttgtaatattttaggtttgtgagaggggaagattagcggattttttgggattggtggggtagggggacgtaatttttttaggagtttcgttttagaaacgatgtgtgatttttagttagtttttagtttgtttgggtttttgtttttttagtggtaagtgttaggttttagtttttattttttgggtttgagagggtgtagagcgttgggtattgttgtttggtttttttttttttatttttggaggtgttaggcgattgggtgttattgtttgggtaataggagttatagggtagttacggcgtaggttgggttgtttttattggagaatagggtttcgttgtttttagtttaggtgatatgtaagcgatatagtcgtttgatttgtacgtataggtattattattgttggtagtttttagttaggaaggaggtaggtgaggggttggtgggggattttttatagggatttaggatttggattgttttgtttttttttaatgttgttgaaaatgggtcgttgggaggtagggtttggtttagggtgtagtttaggtggagtaatttatgggaagcgtgggtgaggattttgtttgggtttcgtttagttttgttgaaagtagtagttttgtttttaggtttagttttgttacgtatagagttttattatgtgttatttattttgttttacgaatgttattttattttaatttttataatagttttttaagatagggattattatttttgtttttagatgggataattgaaaatttaggtttatgtgttaatattagagttaggattggaattaagattttttttttttattaagtgggagagaggtttagggatggggaagggttggagttatattagtttaggtggaaggtgttttaagagaggtttcggatgttggcggattttttttattttgtaaggttttcgtttagtttttgtcgagggttggtagtgttagttagttttggtatttggtttttagtttttagtagtgagtagggttgttaatgttgggtttagaatttagtttttggggttgttttttgtttgtggggtacgtgttgtttttttttatttgttgtttagtttttttagacgttgttttgggtttttttttttaagatagagttgtttgggtgggaaggaatgatgttagttggaatttatttttgatattttagaattgggggtagtggtttggggttttgggtatttgtttttatgagtagtgttttttgaggaagagggaggagtgtgggtttttaatttttaagaggttaaaggatttttaagataaagttttttatttagtattttgtaaggttagtattattgtttttatttagttatttatttagtatttaggtgataagtattattttagataataaagtgtagatgttagtaagatatatttgttttcgtgatatagatgaggaaattgagattttattattattattattttttgagatatagttttgttttgttattaggttggagtgtagtggcgtgatttcggtttattgtaatttttatttttcgggtttaagtgatttttttgttttagttttttgagtagttgggattataggttcgtgttattatgtttagttaatttttgtatttttagtagagttaggtttttattatgttgattaggatggtttcgattttttgatttcgtgattttcgtgatttgtgaggttttttggttttagttttttaaagtgttgggattatagatatgagttattgcgtttggtcgaaattgagattttaaaaagtgatatgaggttacgcgtggtggtttatgattgtaattttagtattttgggagtttgaggcgggtggattatttgaggttaggagtttgagattagttgggttaatatggcgaaatttcgtttttattaaaaatataaaaattagttaggtgtggtggtgcggtttatatttttagttatttgggaggttgaggtagaagaattgtttgaatttagcggggtagaggttgtagtgagttgagattgcgtcgttgtattttagtttgggtaaaagagtgaaattgttttaaaaaataaataaaaataaaaataaaaagtgatatgatagatttaagggtagaataagtggttggtagagttaggattagtggttgtatttttgtggttgtatagttgtgtttttttaaggattgttatgtagtagttaggttagaggggtagatgatttcggatttaggatttaggttttgagtgggaagttagtattttataatttttttgatttttttattagtttgttttttagggttgtttgtttttttatttttataggtttggcgttttataagaatgatatttaagttagagatttagggagtagaggtagttagattgttttagagcggggggtttttaagttatttaggttattgtttaagaaatttatatttttaggtatatttatttttttttttttatttttagtaggtttgtagttacgtgattttgggttatggttatatgtttgttatttgtttgttgagggatttcggtgagttttttaatttttttgagttttatttgaaaaataggagtaatagaatttgttttggtttttttgttgtttttgttgggttgaatttttattggataaattatatgttggattttggttgggtgttaagatgttgatgatggataagttatggttttttttcgagttaatttgtagtatgtttaggttatgggggtagagaggagggaggaaagaatatgaggttgtgtggataggggtgatatttgaatttagttttgataaaagattaggagtttgttaaagtgataaggtaggaaaggtttttttggtagagggagttattatataaatgttggggatataaaatagattgtttttagggtttgtggttgtttagtttagtttaaaaatagggtttaatgataagaatggttattgtttgtaggttagttatatgttaggtgtatatatttataggtattattttatttgttttttgtcgttattattgaggtatgttattttgattcgtattttatagatgaggaaattgaagttttagtaaatgaattaattttttaggggttacgtaggtggtagaagttagaatttgaatttataaggttaggttgtaaaatttatatttttagttattgtgt

SEQ ID NO: 455 - DNA, 6211 bp, Artificial Sequence
  chemically treated genomic DNA (Homo sapiens)
gtataataattaggaatgtaggttttgtaatttgattttgtgggtttaaattttggtttttattatttgcgtgatttttagaaggttagtttatttattggggttttagtttttttatttgtgaaatgcggattaaagtaatatattttaatggtggcggtaagaagtaaatgaaataatgtttataaatatatatatttgatatgtaattggtttataaataatagttatttttattattgggttttatttttgagttaaattgaataattatagattttgaaaatagtttattttatatttttagtatttgtatggtggttttttttattaagaaagttttttttgttttgttattttggtaaatttttgattttttattaggattgaatttaaatgttatttttgtttatatagttttatgttttttttttttttttttttatttttataatttaagtatgttgtaggttaattcgggaaggggttatggtttgtttattattaatattttggtatttagttagagtttagtatgtggtttatttagtgaaagtttaatttagtaaagatagtaaggaggttagagtaggttttattatttttattttttagatgaggtttaggagagttaagggatttatcgaggttttttagtaggtaggtggtagatatgtgattataatttaaagttacgtggttgtaagtttattgagggtggggaggaaggggtaggtgtatttagaggtgtgggttttttgagtagtggtttggatgatttagggatttttcgttttaaggtagtttggttgtttttattttttggatttttggtttgggtgttatttttatggaacgttaaatttgtaagagtaagggaataggtagttttggagaatagattggtaggggggttaggggggttgtggggtgttggttttttatttagagtttgggttttgggttcggggttatttgtttttttggtttgattgttgtatagtaatttttgaaagaatatagttgtgtagttataaagatatagttattaattttagttttgttagttatttattttgtttttgggtttgttatattattttttatttttatttttatttattttttgagatagttttatttttttgtttaggttggagtgtagcggcgtaattttagtttattgtaatttttgtttcgttgggtttaagtaatttttttgttttagttttttaagtagttgggaatataggtcgtattattatatttggttaatttttgtatttttagtagaggcggggtttcgttatgttggtttagttggttttaaatttttgattttaggtgatttattcgttttaggtttttaaagtgttaggattatagttatgagttattacgcgtggttttatattattttttgaagttttagtttcggttaggcgtagtggtttatgtttgtaattttagtattttgggaggttgaggttaagaggttttatagattacgaggattacgaggttaagagatcgagattattttggttaatatggtgaaaatttgattttattaaaaatataaaaattagttgggtatggtgatacgggtttgtagttttagttatttaggaggttgaagtaggagaattatttgaattcgggaggtggaggttgtagtgagtcgagattacgttattgtattttagtttggtgatagagtaagattatgttttaaaaaataataatagtaataaagttttagtttttttatttgtattacgagggtaggtgtgttttgttgatatttgtattttgttgtttgaaatagtatttattatttaagtgttaaataaatgattgaatggggataatggtgttgattttgtagagtattgaatgaaggattttgttttaggagttttttggttttttagaggttgaagatttatattttttttttttttttagagagtattgtttatgaggatagatgtttagggttttagattattgtttttagttttgagatgttagaaatgggttttaattggtattatttttttttatttaagtaattttgttttagaaagaggggtttagggtagcgtttggagaagttgggtagtagatggagaaggatagtacgtgttttataggtaggaagtagttttaggagttgggttttgagtttagtattggtagttttgtttattgttggaggttgggggttaggtgttagggttggttggtattgttagttttcggtaaagattggacgagggttttgtaggataaggagagttcgttaatattcggagttttttttggagtattttttatttgggttagtgtggttttagtttttttttatttttgagttttttttttatttggtggaagagagagattttggttttaattttggttttgatattaatatataagtttgagtttttagttgttttatttgaaaataggggtaataatttttattttgagaagttgttgtgagaattaaagtggggtgatattcgtaaggtagagtgggtggtatatagtaaagttttgtacgtggtagaattgggtttggggataaggttattgtttttaatagggttaagcgaggtttaggtagaatttttatttacgttttttatagattattttatttgggttgtattttgggttaggttttgttttttagcggtttatttttagtagtattaagggagggtagggtagtttagattttaggtttttgtgaaaagttttttattagttttttatttgttttttttttggttaggagttgttagtagtggtggtgtttgtacgtgtaggttaggcggttgtatcgtttatatgttatttgggttaagaatagcgaggttttgttttttagtgagaatagtttaatttgcgtcgtggttgttttgtggtttttgttatttaaataataatatttagtcgtttggtatttttaggagtgggggaggggggattagataatagtatttagcgttttgtatttttttaggtttaggaagtggaggttagaatttagtatttgttattggagaagtagaggtttagataggttgaggattgattgaggattatatatcgtttttggagcgaagtttttgaggaaattgcgtttttttgttttattaattttaggaagttcgttggttttttttttttatagatttgagatgttatagaatttaaaattgagatgagttttttagttaaatttggttttttggtgaagttggtttttgttttaggattttttaaagagaagtaggaagtggtgttttaggatcgagtttttgggtgtttattttttttattagtataaagttattttttagttttttttagttttatttttttttttggaggtttggttttaggggcgtgtttgggtaaaggaatttatttttgagtattatttttaggattttgcgtttcggttttagtagcggggtggtagtataggggttgtagagggtagtgttttttattttagagggtgagttagcgagagaatttttgagtagtttagtagtgtttgtaaaatttttatggtaggaattttagagtaatttattttaaattgtttttttaggttggttatttaattttgtcgcgtttattttttaatagttagtgtcggttatttttttaaaggggtagtatattttgggggttggggattttgggtgtttattttgatttaagtttgtggttttgagaggtaggatatttggtggttgttttaggtaagagagggtagaggaggggattgagataggggttttaggtttaagttgggagaaagttattttagtttttgggtttaaatgaggtttttattttttttttgtatatttttaataattatttgggaaggagaatattatttgttttttttttagtaagaggttaaggaggaagttttttattagtttatttaggggtttgattttgattttggggttaaaaggtataggaagaggtggttttttgtacgtttagggattggagttatagagtttttaagggaggttaggagttgtttttgagagagaaggagttgggttgtttggggagtttgggttggtagaagttaaattttttaagggtttagttttttttatcggaaggggtataagaagggaggtaggtattaaggtttttttacgttttgttaggaattatttttataaggtttaagggtttttttttattttcgtttttatagtttggggtagggtatataggtgttttttggttttagttttagggtaaagaaaattaggagttttagttttagacgggtggtgttattttatatttcgtattcgttaggggttaagaggagtaatttttttaggtttagtagcggtgaagttagaagtagggagtttttggcggagggttttgggagaagtgggggttttataatttttgtttttggtagaattttagatatttggtattgaagattttttcgtttgtattaatggaggaagtttcgatagttttggatagatgtcgggacgggttttaggtgtggggtgaaggcgattagattttagcgttttataggatttttttttttggttatggcggggaggtagtcggcgtttggcggaattgtttttcgtatacgtatattcgggtataggggggtggagtcggatagtgggtaagagatcggagggtattcgcgttttcgcgggcgttcgtcggattgtagcggcgtttcgggtcgtttcgtttttgtgaggattcgggttcgtcggtcgcgggcgttcgtttttcgtttcgtttatttattttcgggtttagaggtattagttttatgagcggttagggttttttgagttgggcgagcggtatttcgtcgtcgttaggttattcgcgttttttcggcggtttcggttgcgtcgtttttcgggttttggggtttttggttttgcgattcgaatcgtcgcgttttttcgagtttttcgcgtttcggttgggtcgttcgtcgtcgtcgtcgcggtattagtatttcggtttttttcgttattcggcgtcgtcgcgtttattggttatttgcgcgggggcggagtcggagaagtttcgttttagttttcgcggcgcggtatttttagcgcggattttcgttttcgtcgcgtttcgagggtcggtttcgtttttgtcgcgagttttcggttcgcgttcggtttcgtcggagaggttttgttggtttttttttttttagtggtgtatttttggatatattatattagggttatcgttttttttcgtttagtttttttggaattttagtttagatgttttttttttttttaacgggagagaagtattttattttcgattttagtatatatatttatattgggtttttgggtttgatttaggttgaggtttggaaggagtttgagatttattttttttaggtttttaatttattaggttttagagattttttattttttaatttttatttcgttttgaagttaatattgtgattttcgggcgattttagtgttttaggttaagatgggtattagtagttgttattattattaggatttatagtgttattatagagtgattgattgatcgattgattttatataatgtatataaatattatatatataaataaatatgtataaataaatattatatatatgtatatatatgtatgtatgtgtgtatatagtgagagagagagagatacgaagtttcgttttgttatttaggttggtttttgatttttcggtttaagtgatttttttgtttcggttttttaaagtgttgggattataggtatgagttatcgcgttcggttaagagtgattttttaatatgcgtttttgtaatttgtgttttgttttattatttgaagggggtttttttaggttaggtttttttggagttatttgtagttttagttttggattagtttgggtttgcgattttttgaggagggattaggtttttaggatgaatcgaggtttggtgggatttggagtgaaaggttagggagattggttgttttagagagatttagtttttatttaaagagttttaggggttcgggtgtgttgagatgtatttatatgtgaggagtgagtttgttggagggataagtttgttggtttcgtaggaagattggttagtt

SEQ ID NO: 456 - DNA, 6211 bp, Artificial Sequence; identical to SEQ ID NO: 454
  chemically treated genomic DNA (Homo sapiens)

SEQ ID NO: 457 - DNA, 6211 bp, Artificial Sequence; identical to SEQ ID NO: 455
  chemically treated genomic DNA (Homo sapiens)

SEQ ID NO: 458 - DNA, 6198 bp, Artificial Sequence
  chemically treated genomic DNA (Homo sapiens)
tgtttaggaaggaaaggagttgttttgtagaaggtgttggggtttgagagattagttagatacgattggtagggagagtacgtgtgtttttatgaagaattatgataagataggtaatagatgaggaagaaatttgggtttgattgaagtaatgggggttgtttgtgaagttttgaggtagtatagagttaggatgagttagaaggaggaattttataaggtaatgttattagttaaggtaggaattagttatttggatgtgtaagtgtaggttatagaggatatgatggtttagtttgggtttagaggtttgatattaatttttttagatttagtatttgttaagttataaattttttattatatataaaaagtttaaaagtaattttaggtcgggtacggtggtttatgtttgtatttttagtatttggggaggtcgaggcgggtggattatttaaagttaggagttcgagattagtttggttaatatggtaaaatttcgtttttattaaaaatattaaaaattagttgggcgtggtggtatatgtttgtaatttttgttatttaggaggttgaggtaggagaattgtttgaatttaggaagcggaggaggttgtagttagttgagattttattattgtattttggtttggagtaagattttattttaaaaaaaaaaagaagtaattttaatagaatatttagtgtttagatattagtttttaatattattttaaagtaaaataattatagtgttttggagaaatggattattttaaggttgggatatggaaaatataaaataagtttgagtattttttgatgttagaaattaagaaatgtattaaaaaagaaaaagagttcgggtatgatagtttatatttgtaattttagtattttgggaggtcgaggcgggtagattatttgaggttaggagtttgagattagtttggttaatatggaaaatttcgtttttattaaaaaatataaaaagtagttaagtgtggtgttacgtatttgtaattttagttatttggtaggttgaggtataagaatcgtttgagtttgggaggcggagggtgtagtgagtcgagatcgtgttattgtattttagtttgggcgataaagatttcgttttaaaaaaaaaaaaaaaaaaaaaagaaggaaaaagaaaaagtaagtgtatgttaaagtggtataggcgttaatttgaaaaaggttttagtggtgaaagttagaataatttgagtagtaaattaaatattgataatattggattataatttatataataaaataaatatttatgagtttatattgatataaataattgaattaatgaataggagagaagggttaatttttttttatagaagggaattttaattaaaaaatgtagaaggaagaaaataggggttttgtttaattattaggaaaaaaaattcgttaaataatatgttttataaatggatgtttaaattaatgaataaaagtttaaggaaaaatggtagtgtaggttttttttttaagattttaaatataaagggaatttggtaaatagattaatattataggtaataagaagtatcggttagggtatagtggtttacgtttgtaattttagtattttgggaggttaaggtaggaggattattagaggttaggagttcgagattagtttggttaatatgaaatttgtttttattaaaaatataaaaaattatttgggtatggtggtaggcgtttataattttagttatttaggaggttgaggtaggagaatcgttagaatttgggaggtaaaggttgtaatgagttgagatcgtgttattgtattttagtttgggtaataaagtaagatttagttttaaaaaaaagtattgatattatgtatttaatatgatatattgagatggaaattttatttttgtgatatttttttttaaaatgtagaatatttatttaattatgatattaaatattaagtaaatataaattgaggggtattttataaattaattgatcgggttttttttattagtgttaaggtttatgaaaaaataatgaaaggttgaggaattgttatagattagagaaaattaaggatatttagtagttaaatgtaaagtgagattatcgattggattttgggtagaaaaaggatagtggaaagataagtgaaatttaaataaagtttgtagtttagtttattgtattatagtagtatgtttatgttattagttttggtttttgttatgtatgatattatgggaattttttgtattattttttgtaaatttttagtaatttttaaattattttataattaaaagttattataaaataaataataaaataattaatattttttaatgtttataatggaagggtaatgttagatttaatatgttatttttgtcgttgaaattttttttattaagattttattaagatttatataatttagttaaagttgtattttgaaagtattgttttgtaaagaatattaataaaaaatattttttttttattattttggtgtatttatttatgattagttgatatttaaatgataagagagttgtaagatttttttaaaaattaagttttaggggatatttttaggattgagaagggagtaagagtatttaattatttatagaaaattataaaagggagtttaataattttttagtaaattatttaaagttttaaagggattgattaataatttgttatttatttatttttaattgttattgattaatttttatattggttaatttttttaaaatattaatattaataaatgttttttttatttatagtaatttttgtgtttagtgggtttttatttttttaatattaattttaattttatatatttggagaaaggttaagagtttttattaatttatatttaatatattatgggatttagaattagtttgtattagggtattattttttgaaaaattattttgaattgttagttttaaattgtatatttatttttaaatgaaattgcgaaaggttaaaaaatttagtcgtttcgtttgaacggttatcgattttttaataaatatatatataacgtttattaatttttttagatatatatttttagcgaaattggttttataatttatttatttagtttaatagagttcggttttaattaaaggtttaggattttaggatgcgtgcgttcggaggtagcgttttaataattaaggatgtaaatgttgggatgagttattcggattttttaaataaattttaaagtagtagtttttatttaataagattattaagtatgtgtacggtgcgtttttaaattttatttagtttttttataggttgtttttttgtcgcgttttttaattttagtgggagtggcgggtattgtttttttttttttgcgcgttcggaattttttgagtgggtatagtacgtagttcgcgcgcggtataatttttttttttaattatattcggcgcgttcgagcgtttttttcgcgcggcggtcggcgtgggaggcgttgcggttggaggttacgatgggagtcggcgggtggtcgtttggggagattcggatatttaggggacgagtttaggtagcgttgatacgaattttttaagtcgcgtttcgggttgtggatcgttagagttgaacgtagtggtttttttttagcgtttcgggtttttttaggtcggggttcgcgggcgggggtgaggcgtggtttcgattgtcgggtcgcgataagcgttttgcgattcggttgaaagcgtatacgtgttttgtcgcgttgagtcgttagtaggattggtattatcgttttttttcggggttagggttattttgtcgtgatacgtagggataagttaaatattttcgttttcgggatcgaacggaatgaattagagtgattaattacgagaattattaggcgtttattgggttgattagtatttcgtttgatttagttgggtttggtcgtcgttattggtcggagcgtcgaagtatcggggacgttgacgtataggttgtttagttataagcgttgttcgtatttagagtaagttaaatgggtggtttttggtgaatgggattttgagaaagtggatgtttgcgttttagggtttaaaaaaattaggtattgaatttaatttaaggaaggaaaggggagaaatttattgaatgaaaatattattatagtttaaatgttattttttatatttttgtgattgatatatttttgtgtaatatttcgatggtgtggaaaggttagaaagtgattgcgtatgtttaggaaacgggttattaggttttgtgagtgtagttattttaatatttatttgttgtatttattttaggaaattagtatttgtatgtagatattttttggtttgtatttataaataaaaattatagtattatttaagttgtttaaattaatattaggaataattattaatggtttatttaatgtaggaaagttttagttaggaagtttagataagaaaattgattatatataattttttaaaaagaattttaaatatattatatcgtatgttttttaaaagaattttaaggtatatatttatgatgcgtttaaatatttgggtaaaattatttttttgaattaatttttgttagttttaagatttttaaaggtttatatagaaatatatgttagttatattttattttaagataaaattaaggttagtacggtggtttatgtttgtaattttagtattttgggaggttgacgtaggtagattatttgaggttaggagttcgagattagtttggttaatatggtgaaattttgtttttattaaaaatataaaagttagttgggtgtggtggcgaggttgtaattttagttattcgcgaggttaaggaataagaagcgtttgaatataggaggtagaggttgtaaatgattcgagattttattattgtattttagtttgggttatagagtgagattttgttttaagaaaaaaaaaaaaattaagataaagtttttagatttggtcgttaacgattgtttgtaaaaattgaaaaattttcgaaaaataaattttattttaattttttttttagtttatttagataagtgaaaagaataaaattttatgatattagaaaaaatgaaaatatttttagtaagatttgaaggtattataggaggagattgaataaaaatggagaaaatatatacgaaattgatatgaagtatatttttaaaaatggatatttagttgaatatagtattttgtaattatgtaaagtaaaaataaattaaaattttatatatagaggttaggtacggtggtttacgtttgtaattttagtattttgggaggtcgaggtaggtggattatttgatattaggattttaagagtagtttggttaatatggtgaaatttttttttattaaaaatataaaaattagtcgggtatggtggtttatgtttgtaattttagttatttaggaggttgaggtaggagaattgttggagttagggaggtagaggttgtagtgagttaagattatgttattgtattttagtttgggtgataacgtgagattttattttaaaaaaaaaaaaaaaaaaaaaaaatttatatatagaaaattgttgggtaaggagtgatagtttatttttgtaattttaatattttgggaggtagaggttaaagaattgtttgagtttaggagtttaagattagtttgggtaatatattgagattttatttttataaaaaaaaaatattttaaattatattgggtgtggtggtttatatttgtaattttagtattttgggaggaggttagaggattgtttgagtttaagaattcgagataagtttaggtaatatagggagtttttgtttttataaataatttttttttttaattttttttttttttattatattttaagttttagggtatatgtgtatattgtgtaggttagttatatatgtatatatgtgttatgttggtgcgttgtatttattaacgtgttatttagtattaggtatattttttaatgttattttttttttttttttcgattttattatagtttttagagtgtgatatttttttttttgtgtttaagtgattttattgtttaatttttatttatgagtgagaatatgcggtgtttggtttt

SEQ ID NO: 459 - DNA, 6198 bp, Artificial Sequence
  chemically treated genomic DNA (Homo sapiens)
aaaattaaatatcgtatatttttatttataggtgggaattgaataatgagattatttggatataggaaggggaatattatattttggggattgtggtggggtcgggggaggggggagggatagtattgggagatatatttaatgttagatgatacgttagtgggtgtagcgtattagtatggtatatgtatatatatgtaattaatttgtataatgtgtatatgtattttaaaatttagagtataataaaaaaaaaaaaaattaaaaaaaaaaattgtttgtagagataggggttttttgtgttgtttaggtttgtttcgaatttttgggtttaagtaattttttggtttttttttaaagtgttgggattataggtgtaagttattatatttagtgtaatttaaaatattttttttttgtagagatagggttttagtatgttgtttaggttggttttgaatttttgggtttaagtaattttttggtttttgttttttaaagtgttgggattataggagtgagttgttattttttgtttagtaattttttatgtataggttttttttttttttttttttttttgagatggagttttacgttgttatttaggttagagtgtagtgatatgattttggtttattgtagtttttgtttttttggttttagtaatttttttgttttagttttttgggtagttgggattataggtatgagttattatgttcggttaatttttgtatttttagtagagaagggttttattatgttggttaggttgtttttgaagttttgatattaggtgatttatttgtttcggttttttaaagtattaggattataggcgtgagttatcgtgtttggtttttatgtatagggttttgatttgtttttattttgtataattatagaatgttatatttaattaagtatttatttttaaaaatgtgttttatattagtttcgtgtgtgttttttttatttttgtttagtttttttttgtagtgtttttagattttgttggaaatgtttttattttttttggtattataaaattttattttttttatttatttgggtgagttaaaaagaaaattaaaataaaatttatttttcggagattttttagtttttgtaaatagtcgttaacggttaggtttgaaaattttattttaattttttttttttttttgagatagagttttattttgtggtttaggttggagtgtagtggtgggatttcgggttatttgtaatttttgttttttgtgtttaagcgttttttgttttttagtttcgcgagtagttgggattatagtttcgttattatatttagttaatttttgtatttttagtagaggtagggttttattatgttggttaggttggtttcgaatttttggttttaagtgatttgtttgcgttagttttttaaagtgttgggattataggtatgagttatcgtgttggttttaattttgttttaaaatgaagtatgattaatatgtatttttatatgggtttttaagggttttgaaattgatagaaattaatttaaaagaataattttatttaaatgtttgggcgtattatgaatatatattttaaaatttttttaaaaagtatgcggtatggtatatttaaaattttttttaaaaaattatgtatagttaatttttttatttaggttttttagttaaaatttttttgtattgggtgaattattaatagttatttttagtgttgatttaaataatttaaatgatattatgatttttgtttgtaaatgtaaattagaaaatatttgtatgtaggtattaattttttagggtagatgtagtaggtagatgttgggatggttatatttataaagtttgatggttcgttttttgaatatgcgtaattattttttagtttttttatattatcggaatattgtatagaagtatgttagttataggagtgtaaagaataatatttaaattatggtaatatttttatttagtaagttttttttttttttttttttgggttagatttagtgtttgatttttttaggttttggggcgtaagtatttatttttttagaattttatttattagaaattatttatttaatttgttttgggtgcgagtagcgtttgtgattgggtaatttgtgcgttagcgttttcggtgtttcggcgtttcggttagtgacggcgattaaatttagttaggttagacgaggtattgattagtttaatgagcgtttggtgattttcgtagttaattattttggtttatttcgttcgatttcggaggcgggagtgtttggtttgtttttgcgtgttacggtagggtgattttagtttcgagggagggcggtggtattagttttgttggcggtttagcgcggtaggatacgtgtgcgtttttagtcgggtcgtagggcgtttatcgcggttcggtagtcggggttacgttttattttcgttcgcgaatttcgatttggggaaattcggggcgttggggaggggttattgcgtttagttttggcggtttatagttcgaagcgcggtttaggaagttcgtgttagcgttgtttgagttcgttttttggatgttcgggtttttttaggcggttattcgtcggtttttatcgtgatttttagtcgtagcgttttttacgtcggtcgtcgcgcgaggggagcgttcgggcgcgtcgggtgtggttgggggaaggggttgtgtcgcgcgcgggttgcgtgttgtgtttatttaaaaggtttcgggcgcgtaggagggaagaggtagtgttcgttatttttattgagattgagagacgcggtaaggaggtagtttgtggaggaattgggtaggatttaggaacgtatcgtgtatatgtttggtggttttgttaagtggaaattgttgttttagagtttgtttggaaggttcgggtgatttattttaatatttatatttttaattgttaaagcgttgttttcgagcgtacgtattttgagattttgagtttttggttaagatcgagttttattaagttgagtgagtaaattgtaaaattagtttcgttgagagtgtgtgtttggaaaggttggtgggcgttgtgtatatatttgttagaaaatcggtaatcgtttaaacgagacgattgagttttttagtttttcgtagttttatttgaaagtgggtatgtagtttaaaattgatagtttaaagtggttttttagaaaatgatgttttggtgtaaattgattttgggttttatagtgtgttaagtgtgggttggtaaaaatttttggtttttttttaaatgtatgaaattaaagttgatattggaaggataaaaatttattgagtatagaagttattataggtggaggaaatatttgttgatgttaatattttaaaggggttgattaatataggaattggttaatgataattgggaataggtaaatgataaattattggttaatttttttaaagttttggatggtttgttaaagaattattgaatttttttttgtaattttttgtggatagttgagtgtttttattttttttttagttttagagatattttttaaagtttggtttttaggaggattttatagtttttttattatttgaatgttagttagttataaataaatatattagagtagtaaggaagagatgttttttattgatattttttataaaatagtgtttttagagtatagttttgattggattgtatagattttgatgagattttgatgagaaaggttttaacgataaagatggtatgttaagtttaatattatttttttattataaatattgaaagatgttggttattttattatttattttataataatttttaattgtgaaataatttgagagttattgaaaatttgtaaaaaatagtatagagagtttttataatattatgtataataagggttaaaattaataatatgggtatgttattataatataatgaattaaattatagattttatttggattttatttgtttttttattgttttttttttgtttaggatttaatcgatgattttattttgtatttaattgttaaatatttttaattttttttgatttgtgatagttttttagttttttattgtttttttatggattttgatattagtgaagaagattcggttagttaatttgtagaatgttttttaatttgtgtttgtttgatgtttagtgttatgattagatgaatgttttgtattttggggaaaaatgttatagaagtaaagtttttattttagtatgttatattgggtatatgatgttaatatttttttttgagattgagttttgttttattgtttagattggagtgtagtggtacgattttagtttattgtaatttttgttttttaggttttagcgatttttttgttttagttttttgagtagttgggattataggcgtttgttattatgtttagataattttttgtatttttagtagagataggttttatgttggttaggttggtttcgaatttttgatttttagtgatttttttgttttggttttttaaagtgttgggattataggcgtgagttattgtgttttagtcgatattttttattatttatgatgttaatttgtttgttagattttttttgtatttgagattttgggagagaaatttgtattgttatttttttttaaatttttatttattaatttaagtatttatttgtggaatatgttgtttagcgggtttttttttttaatggttaaataaaatttttatttttttttttttatattttttaattaaaatttttttttgtagggaagagttgattttttttttttgtttattgatttagttatttgtattagtatgggtttatggatatttgttttgttatatgggttataatttaatattattagtatttaatttgttgtttaaattgttttggtttttattattgggattttttttaggttggcgtttgtgttattttgatatatatttgtttttttttttttttttttttttttttttttttttttttgagacggagtttttgtcgtttaggttggagtgtagtggtacgatttcggtttattgtatttttcgttttttaggtttaagcgatttttgtgttttagtttattaagtagttgggattataggtacgtagtattatatttggttattttttgtattttttagtagagacggggttttttatgttggttaggttggttttaaatttttggttttaagtgatttgttcgtttcggttttttaaagtgttgggattataggtgtgagttattatgttcggatttttttttttttttaatgtattttttgatttttggtattagagaatgtttaggtttattttgtattttttatgttttaattttggaatgatttatttttttaaggtattgtgattattttgttttagaatggtattagaagttaatatttggatattggatgttttattagagttatttttttttttttttgagatggagttttgttttaggttagagtgtaatggtgggattttagttgattgtaatttttttcgttttttgggtttaagtaatttttttgttttagttttttgagtagtagggattataggtatgtgttattacgtttagttaatttttaatgtttttagtaaagacgaggttttgttatgttggttaggttggtttcgaatttttgattttgggtgatttattcgtttcggtttttttaagtgttgggaatataggtatgagttatcgtgttcggtttagagttatttttgaattttttatgtataataaaaagtttgtgatttagtaaatgttaagtttgaaaagattggtgttaggtttttgagtttaagttaagttattatattttttgtgatttatatttatatatttagatggttggtttttgttttaattgatgatattattttgtgaaatttttttttttggtttattttggttttgtattgttttaaggttttatagatagtttttattattttagttaaatttaaattttttttttatttgttatttattttgttataattttttataaaaatatacgtgttttttttgttaatcgtgtttgattgattttttaaattttaatattttttataaaataattttttttttttttaggta

SEQ ID NO: 460 - DNA, 6207 bp, Artificial Sequence
  chemically treated genomic DNA (Homo sapiens)
attggtttcgaatttttgattttaggtgatttatttgttttagtttttttaaagtgttgggattataggtgtgagttattatatttagttttatttagtatattttgaataaattaataaatttggggtgaggaaatagagttatattaatatagttatagttttagtaagtagagttggggtatttttaatttatatattgttgtcgaatgaatgaatgaatgaatgaatgaatggggagaataaagtggttggaatttagatttttttgtattggagttatttttagaatagcgttttttattgaaaattttaaggttttattttttcgtttttttttttatttgtcgagggtttataatgatgttgttggattttgtttcgggttttagggtttggttgggcgttttttttgttaggggttttgattttgtggggtacgtggttttagttttttttagaggttgtgagatggtatattcggcgtaggtttgaggggtcgtttgggtcgaggtgtttatagtgggaaggttttgtgtagatcggaataagggtttggtttgtggggagaaagggagtttgtaggggattggttggggtgagtagaggatatttgaggttttgtgagttttttttttttttttttttttttttttgagatagttttgttttgttatttagattggagtgtagtggtattattttggtttattgtaatttttatttttcgggtttaagtaattttgttttagttttttaagtagttgggattataggtgtttattattacgtttagttaattttttttttttttttttgagatggagttttgttttgttatttaggttggagtgtagtggcgtgatttcggtttattgtaattttcgttttttaggtttaagcgatttttttgttttagttttttaaatagttgggattataggcgtgtattattacgttggttaatttttgtatttttagtagagatagggttttaatatgttgtttaggttgatttcgaatttttgattttaggtgattcgttcgtttcggttttttaaagttttgggattataggtgtgagttatagtatttgattttttttttttttttagggttgtttattttttttttttttaatgttttttttagaaggttgagagtttaaaatttgaatttagttattttttttttattttttagtttttattttggttttagttattagcgttttatttttggattattgaagttatttttttattagttttttgtttatattttcgttttttggaagtttgttttttaattaagtttttatgttttttttttgtttagagttggtgggtggtttttgttttagagtgaaagttaaagttgttattattatttataaggttttagatttgtttttgttttttgttttagaaattatattttttattatttttttttgttttttttattttagttttattagatttcgttttgtttttgaatacggtaggttttttttgattttagggttttggtattggttgttttttttattttagatgtcgttatggtttatttttttattttttttacgtttttattaagatgttatttttttagagaggtttttttttgatttttttatttaaagtaggaaggggttaggtatggtggtttatgtttgtatattttagtattttgggaggtcgaggtgggcggattatttgaggttcgagattagtttgattaatatggtgaaattcgtttttattaaaaatataaaaattagttaggcgcgtttttgtaattttagttattcgggaggttgaggtaggagaatcgtttgaatttaggaggtagaggttgtagtgagtcgagatggtgttagtgtattttagtttgggtaaaagagcgagattttgttttaaaaaaataaataaataaataaataaatagagtaggaaggtttttttttttattatgttttatatttttagtttattttttttttttttatagttaatgtttattattcgtcgattgtttttttttgggaaggagattttaatattgttaggtttttttatttattaaaatatgtttaaagtgtagatttttttaagattgtaaaatttggcgatttttaaatacgagtaataaatttatgttttgaaaaattagggtgttggtttcgtaaaatatattaggggttatttgttgaatgttagtgtttggtttttgttttagtttttttttagaattatttatttattttatagatggggaaattgggatttggggaggattaaggattgtttttttaagtcgttcgtggtttttaaatttattaatttatattttggttttataggttttattttatttttttcgttttaatagtttttagttttttaggggtttcgtatttttttgttttattattttaggagggattttattttcgtcgaggggtattataaattttttttttgttggcggttttgagggttggggtattttttttttgttttttttagggtttatttggagtttgaaagggaaggtgttaggagcgagtgagttattggcgtttacgtttttatttcgtagtaggaattttttatttatagtcgttttttataaaatttcgagagttttatagcgttaggtttttaatatttagcgttagaggttttgtaacgttacgtttttttgatttttattttcggttcgtttcgttttttataggtttataagttttatcgtttcgtttttcgtttttatcggattttattggtttcgtttttattatttttcgtttttcgttcgttcggttttcgaggttagtatttggacgttttttttacgtttggttttgtttattttttagattcggtaatgattggttttcgcggcgttaatttttattcgtagttttcgtttttcgtatttgtggttcgggttttacggttttagcgtcgcgaggttttatttgttggttttggagttttaagggaaagattgtagagggatcgaggcggtttattgttagtacggttagcgtggtttagggttcgtagtattttcggtttttttggtttcgttttttaggagagtagagtatagagtagggcgatttttgtataattttttatggttttggaggatcgcggaggtcgtgggaggagagagatgtggtttgaggatttggtttttaaattgttaagttttaaagtttttattgagcgtttttgtgtgtttagaattttggtagggtttagtggagaatagatcgtaggagatttaatttggtttttttttttagtaaggagagatttaagtttgaatttaatttagatattgatttggttttagtttttttatttatttatttattttatatttattttttttacgcgtttttttttttttcggttttgtgcgagttcgtgttggtgatatagtagtgattaacgatagtttcgtgttgttttttcggagtttacggtttagtaagggatatagatacgtttttagtgttgatttagaatgggtaggtttgggatgggagatttcgggagagtcgtgggatgggggttagggggagcgtttgatttagtttcggagttcggaagggttttttggaggaagggatatttgagtaggggtttggttgatgagttagtattagttattttttgaaaggatagtattatattgttttaatttgtagttttttgattattaaggaaatggaatgttttttgtgaaagtattggttttgtaaattttgttttttgtgaattgtttgtttatattttttgtttatttttaaaatgggttgtatggtttttttattattattaatttttaggggtattttatggattttgattttaatttttagttatttatattgtaaatatttttttttagtttttattttgggttttaattttagttatttttggtatagaagttatttgtgtttatgcgtaattatttattaatttgtttcgttttgatttttgtttttggtgtgttaagagttttgttataatttagggttataatgataaattttttttttttttttttttttttttttcgagacggagtttcgtttttattatttaggttggagtgtaatggcgcgattttagtttattgtatttttttttttcgggtttaagcgatttttttgtttttttagtagttgggattataggtatgtgttattatgttcggttaattttttttttttttttttttttttgtatttttagtagagacggggttttattatgttggttaggttggttttaaatttttgattttagttgattttgaggttattttgtgattttttaaagtgttgggattatagtgtacggttataatgatatattttattattttttttatttacgtaaaagataaaagtttcgtgttgtttttttagagtttatagtttagtgagggatatagatacggttttaaatagtaatgatttagaatgagtaggttatttggttttaatttatgtaagatttatttatttatttattattttttgagatggagttttgtttttgttgtttaggttggagtgtaatggagtaatttaggtttattgtaattttcgttatttatatttaagtagtttttttgttttagttttttaagtagttgggattataggttaatttttgtatttttagtagagacggagttttattatgttggttttgttggtttcgaatttttgattttaagtgatttgtttattttagttttttaaagtgttgggattataagtatgagttacggtgtttggttaagatttatttttgaaagtgtatcgaggtcgttgtttatgagtgatgtaattaattgttttaagttgattaaaggtagattttttttttattgttttgaaattttatttttattatatattaaatttttatatatatacgtttatttttgatatttttgttatgtttattgatttttttatttatttttgtttgtatgtatatgatatttttttgtttttttgtttatattagttttttatttatgggtgtttatttgtgtttatatttttttattttatttaattttttttttttgggtatggtggttaatgtttgtaattttagtattttgggaggtttaggcgggtggattatttgaggttaggagttcgagattagtttgattaatatggagaaattttatttttattaaaaatataaaattagagtttcggtgtagtggtttatatttgtaattttagtattttgggaggtcgagataggcggattacgaggttaggagtttaagattagtttggttaatatggtgaaatttcgtttttattaaaaatattaaaattagttgggcgtggtagcgtatatttgtagttttagttatttaggaggttgaggtagaagaatcgtttgaatttgggaggcggaggttgtagtgagtcgagattgtgttattggattttagtttgggtgatagagttagattttgttttaaaaaaaaaaaaaaaaaaaaaaattagtcgggtatggtggtatatgtttgtaattttagttatttaggaggttgaggtaggagaattgtttgaattttggaggtaaaggttgcggtgagttgagatcgtattattgtattttagtttgggtaataagagtgaaattttattttaaaaaaaaaaaaaaaattttttttgagataaggttttgatttattgtttagatttattgttttgaattttgtttattttaaatgtttttttttttttattttaataattgaaatttagaattttaggttgggtgcggtggtttatgtttataattttaataatttaggaggttaaggtgggtagattgtttgggttttagagtttaagattagttagggtaatatgataaaattttatttttataaaaaaatataaaaattggttgggtaaggtagtttatgtttgtaattttagtattttggaaagttgaggtaggagaattatttgaattcgggaggtggaagttgtagtgagttaagattacgtaattgtattttagtttgggcgataaaagcgaaattttatttaaaaaaaaaaaaaaaaaaaaaaagttatgtgtgttggtgtgtatttgtagttttagatatttaggaggttgaggagggaga

SEQ ID NO: 461 - DNA, 6207 bp, Artificial Sequence
  chemically treated genomic DNA (Homo sapiens)
tttttttttttagttttttgagtatttgggattataggtgtatattaatatatatagttttttttttttttttttttttttagatggagtttcgtttttgtcgtttaggttggagtataattgcgtgattttggtttattataatttttatttttcgggtttaagtgatttttttgttttagttttttaaagtgttgggattataggtatgagttattttgtttagttaatttttgtgtttttttgtagagatggggttttgttatgttgttttggttggttttgaattttggagtttaagtaatttgtttattttggttttttaaattgttgggattataggtatgagttatcgtatttagtttagaattttggattttaattgttagggtgaaaagaaaaaggtatttgaggtaagtaaggtttaggataataaatttgggtaatagattaagattttgttttaaaaaaaattttttttttttttttgagatggagttttatttttgttgtttaggttggagtgtaatggtgcgattttagtttatcgtaatttttgtttttagggtttaagtaatttttttgttttagttttttgagtagttgggattataggtatgtgttattatgttcggttaatttttttttttttttttttttttgagatagagtttggttttgttatttaggttggagtttagtggtataatttcggtttattgtagttttcgttttttaggtttaagcgatttttttgttttagttttttgagtagttgggattataggtgtgcgttattacgtttaattaattttagtatttttagtaaagacggggttttattatattggttaggttggttttgaatttttgatttcgtgattcgtttgtttcggttttttaaagtgttgggattataggtgtgagttattgtatcgggattttaattttgtatttttaatagagataggatttttttatgttggttaggttggtttcgaatttttgattttaggtgatttattcgtttaggttttttaaagtgttaggattatagatattagttattatgtttagaaaaaaaaaattaagtaaaatgggaaaatgtagatatagatagatatttatagatgaaagattgatgtgaataaagaaatagagggatgttatgtatatgtaggtaagaataaataaaaagattaatgaatataatagaaatgttagaaatagacgtgtgtgtatgggaatttggtatgtgataaaggtagaattttagaatagtggagaaaagatttatttttggttaatttgagataattggttatattatttataaataacgatttcggtgtatttttaaaaataaattttggttaggtatcgtggtttatgtttgtaattttagtattttgggaggttgaggtgggtagattatttgaggttaagagttcgagattagtagggttaatatggtgaaatttcgtttttattaaaaatataaaagttagtttgtaattttagttatttgggaggttgaggtaggagaattgtttgaatgtgggtggcggaggttgtagtgagtttagattgttttattgtattttagtttaggtaataagagtaaaattttattttaaaaaataataaataaataaataaattttatatagattaaagttagatgatttgtttattttaggttattattgtttgggatcgtgtttgtgttttttattgaattgtaagttttgggaggataatacggggtttttattttttacgtagataaaagaaatgatagaatatattattatagtcgtgtattgtaattttagtattttgggaggttataaagtgattttaggattagttgaggttaggagtttgagattagtttggttaatatggtgaaatttcgtttttattaaaaatataaaaaaaaaaaaaaaaaaaaaaaattagtcgggtatggtggtatatgtttgtaattttagttattaaggaggtaggagaatcgtttgaattcgggagggggaggtgtagtgaattgagatcgcgttattgtattttagtttgggtaataagagcgaaatttcgtttcgaaaaaaaaaaaaaaaagaaaaaaaagaatttattattatgattttgggttatggtagggtttttaatatattaaaagtaaaagttagaacggaatagattgataaatagttgcgtataaatataaataatttttgtgttaaaaataattaaagttaaagtttaaagtagaaattaggaggaaatgtttgtaatatgggtaattaaggattagaattagaatttataaagtatttttagaaattaatagtaataaaaaagttatataatttattttaaaaatggataaggaatatgagtaagtaatttatagaagataaaatttataagattaatatttttataaaaaatattttatttttttagtaattagagagttgtaagttagaatagtgtgatattatttttttaggaagtgattaatattaatttattagttaggtttttgtttagatgtttttttttttaggaagttttttcggatttcggggttgagttaggcgttttttttgatttttattttacggttttttcgggattttttattttagatttgtttattttgggttagtattgggaacgtgtttgtgttttttattgaatcgtaagtttcgggaggataatacggggttgtcgttggttattgttgtgttattagtacggattcgtataggatcgggaagagaggaagcgcgtggggggaataggtgtggaataaatgaatgaatgaggaaattgaagttaagttaatgtttgagttggatttaaatttaagtttttttttattgagaggagggattaagttggattttttgcgatttgttttttattgagttttgttaggattttgggtatatagaagcgtttagtaagggttttgaaatttaatagtttgggagttagatttttaggttatatttttttttttttacgattttcgcggttttttagaattatagagagttgtatagagatcgttttgttttatgttttatttttttggggagcggggttagagaggtcggaagtgttgcgagttttgggttacgttggtcgtgttggtagtgggtcgtttcgatttttttgtagttttttttttgaggttttaagattagtaggtgaggtttcgcggcgttgaaatcgtgaggttcggattataggtgcgggaggcggagattgcgggtggagattggcgtcgcggaagttaattattgtcgagtttgagagatggataaggttaggcgtggggagggcgtttagatgttagtttcgggggtcggacgaacggaaggcgggggatggtggggacggagttaatagaattcggtgggggcgaggggcggagcgatgggatttgtggatttgtaaggggcggggcgagtcgaaggtggaggttaaaggggcgtggcgttatagagtttttagcgttgggtgttggggatttgacgttatggagttttcggagttttgtgggggacggttgtgagtggggggtttttgttgcgggatgagaacgtagacgttagtggtttattcgtttttggtatttttttttttaggttttagatggattttgggaaggataaagagggggtgttttagtttttagggtcgttagtaaggaagaaatttgtgatatttttcgacgaggatgaggttttttttggagtggtaggataaggagatgcggggtttttgggaggttgggggttgttaggacgaagaggataggatggggtttgtgggattagggtgtgggttagtggatttgggggttacggacgatttggggaaatagtttttggttttttttaggttttagtttttttatttgtgaaatggatgggtggttttaagagagggttaaggtagaggttagatattggtatttagtaggtagtttttgatgtgttttacgaggttagtattttgattttttaagatatgaatttattgttcgtgtttaagaatcgttaggttttgtaattttaaaaaaatttatattttagatatattttggtaaatggaaggatttggtaatattgaaattttttttttaagggaaaataatcgacgggtgatgagtattggttatgaagaaaaggaaagtgggttaaggatgtagggtatgatgggggagaggatttttttattttatttatttatttatttatttatttttttgagatagagtttcgtttttttgtttaggttggagtgtattggtattatttcggtttattgtaatttttgttttttgggtttaagcgatttttttgttttagtttttcgagtaattgggattataggagcgcgtttggttaatttttgtatttttagtagagacgggttttattatgttggttaggttggtttcgaattttaagtgattcgtttatttcggttttttaaagtgttgggatgtataggtatgagttattatgtttggtttttttttattttagataggaaggttaagggagggtttttttgaggaggtgatattttggtagagacgtgaaagaggtgagggagtgagttatggcgatatttggggtagagggaatagttagtgttaaagttttgaggttagagagagtttgtcgtgtttaagggtagaacgaagtttggtggggttggagtagagaaagtaaggagaagtggtagaaggtgtagtttttgaggtaaggagtagggatagatttagagttttgtgggtgatggtgatagttttggtttttattttgaggtaggagttatttattagttttgagtagaggagggatatgaggatttagttaggggatagatttttagggggcgagggtgtgggtaaggagttggtgaggaagtgattttagtggtttaagggtgaaacgttggtggttgggattagagtggaggttgaggagtgggggagaagtggttgaatttagattttgagtttttagttttttggaagggatattaggaggaaggaggatgggtagttttgaagaggggagaggggttaagtgttgtggtttatatttgtaattttaggattttgggaggtcgaggcgggcggattatttgaggttaggagttcgagattagtttggataatatgttgaaattttgtttttattaaaaatataaaaattagttagcgtggtggtatacgtttgtagttttagttatttgggaggttgagataggagaatcgtttgaatttggggggcggaggttgtagtgagtcgagattacgttattgtattttagtttgggtgatagagtaagattttattttaaaaaaaaaaaaaaaaaattagttgggcgtggtggtgggtatttgtaattttagttatttgggaagttgaggtagaattgtttgaattcgggaggtggaggttgtaatgagttaagatagtgttattatattttagtttgggtgatagagtaagattgttttaaaaaaagaaaaagaaaggggagaggaatttatagggttttagatgttttttgtttattttaattagttttttgtaaattttttttttttttataggttaagtttttatttcgatttatatagagtttttttattgtggatatttcggtttaggcggttttttagatttacgtcgaatatgttattttatagtttttggaaggggttggggttacgtgttttatagggttagagtttttggtaggagagacgtttaattaggttttgaaattcggggtaaaatttaatagtattattgtgagttttcggtaggtgaggagggagacggagaagtgaggttttgaggtttttagtgggaaacgttgttttagggatgattttagtgtaaggaggtttgagttttagttattttgttttttttatttatttatttatttatttatttattcgatagtagtgtgtgggttgagagtgttttagttttatttgttggggttgtggttgtattggtgtagttttgtttttttattttaggtttgttaatttatttaaaatgtattgaatgaggttgggtgtggtggtttatatttgtaattttagtattttggagaggttgaggtaggtggattatttgaggttaggagttcgagattagt

SEQ ID NO: 462 - DNA, 6229 bp, Artificial Sequence
  chemically treated genomic DNA (Homo sapiens)
gattgagttattagtttgatatttagaaggcgagaagttatttcggtttttgttggaaggtggagatatcgtttgtgttttggtgttaatcggggttggatggggtaagaatgggggataagggtggttttgtaaatagtagtaaatttttgtaattaatttattattttttttttttttttttttttttttttttgagatagagttttattttgttgttcgggttggagtgtagcggcgtgattttagtttattgtaattttcgttttttaagtttaagcgattgttttgttttagttttttaagtggttgggattataggcgtttattattatgtttagttaattttttgtatttttagtatagacggggttttattatgttggttaggttggtttcgaatttttgattttatgatttgtttgtttttgttttttaaagtgttgggattataggcgtgagttattgggtttagtttaatttattattttttataagcgatagtcgtattgagtcgttttttgaaggcggttgttaggttttgttttaggtatttgggattttgtttgtaggttttgttttttgggttgagaaggatgtattttggataagttatttgtgtttgtgttttttagtttttttgtattttttaagtgttttgtgttatttggttttatttttttttttatatttatttatttgaggggatggagttgaagttatttggttatttgtatcggtttagttcggttataatttggagtgttcgtaaataattttttttatttataaaataatgtaattttagcgatggattggattttgaaggttattttttattattatagttgttatgtttaggtagtgtttgttttatatatagagtttgtttttaattttgttggttttagtttggagaagggatatgggagttggagttttgatggatgaataggtgtttatcggatttgggtagaggggttattcgttttttaggtgggtattgataaaggaaggtataggttttatttggaattgttaaggtagtttttagaaatgttcggttgtttcggggtacgttttagtatgttagttttgcgggattacgtttagttatttttagaaatatttagtgttttttttttttaggttttgttttggtttggttttgtttagtttattttggataagatgtcgtgtgtttgaggtttagtagagtaagtttttggtcgtgatgtgtttgaaatatttgttaggggttttttttatatgttagagtttttttgggatgaagtttaagttagaaaatttagtcgaggtttaagtttgaattttagttttattgtgtggttttgggaaaatggtttttttattttgtgttttagtttttttgtgtttataagattaattttattgattgtttattaagtatttattgtgtgttaagcgtttttacgtggttttttttttagttagttttgagaaggttggaggtggtgttattatttttattttatagataaagtagttgagattttagcgaggggcggagatttgttttacgattatttagtaggagtcgtggtagaacggagtattagttagattttgttgtgggcgttgttattaagggagtttgaatggagggtttggtgttagatatagtcgattttagttttagtttattttttatgatgttgtgtgatttattgggtattttggtgagggagttttttagatattaatagtttattttgtttttttttttgagttttttgtttagtattgtttagtgttggagggtagattaaggttgtgtatgatttattttttttttttattttggagttggtagtgaataaaagttcgtatttataaagatgagttttaacgtttggatttgtgaggggttgagaaaggaggaagggaagagtggggaggggagcggagtgaaatagatttatggtttaaagttattgtaagtgggttttgaggattgtatagtagttcgttgttgagattttttttgatgttatcgttggtattagttttttgttattttttttttgcgagtattttattatagttttgtttttaaaagttttttttagatatttgggttttgagttatgttttttatttttatgtttttgagataaggtttcgttttgtaatttaggttggagtatagtggcgtaattacggtatattgtagtttcgattttttgggcgttttgggttatgttaataaaataaataagcggcggggcgcggtggtttacgtttgtaattttagtattttggaaggttaaggcgggcggattttttgaggtcgggagttttaaattattttgattaatatggagaaatttcgtttttattaaaaatataaaattagtcgggcgtggtggcgtatgtttgtaattttagttgttcgggaggttgaggtaggagaatcgtttgaattcgggaggtggaggttgcggcgagtcgagatagcgttattgtattttagtttgggtaataagagcgaaatttcgttttaaaaaataataataaaataagtaatcgtcgcgttttttttattttggttttagtttgcgttttgttataaaattttttttagtcgaattcggtttagttttagagtaattcgttattttcggggcgtttagtcggtatgtaaatatttttggttatagttttattttcgagtgcgttcggttattttcggaaatcgtcggtatttaggtttaagttcgttaaattttagtgttcgtaggggtcgagatcgttggttgttttcggacgttttgggttgttatggaaatttttttaattttggtttttttcgatttttgttttttgcggtaggttttttttttattttattgttttttgtttgttgagtttgagaacgttttatttgttttttggaattatttatgttttagtaatttttataagttggcggtcgtttttgggtttaaatttttaaggtttttattgggtattgagtatattcggttatttttagaaacgtttcgcggttttggggattagttttagttgtgttagtgcggtcgtagagagtgttcggttattttcgaaagcgttcgggcgtttttaagtttagtcgagtttagtttcggatttttcgtcgattcgattgtattcggttatttttggaaacgttcggttgtttcgggggtattttttagtttattagtttcgcgggattacgttcggttattttcggaaatattcgggtgtttttttattttaggtttcgtttcggtttcggtttattcgttcggttcgaatgcgttcgggtattttcgtcgggggcgggttaggtcgttcggaatcgtggcggcggcggaggcggggatttcgcggttgcggcgacggtggtcgcggtggagttacggggcgggtttggtttggtgtgacggcggttgcggcggcggtggcggtcgcgattaggtgagttttgattggttttcgtggcgggggcggttgggagtgtgtttaaatgcggggcgttcgggggtagtgtcgggtttcggtggaagttagaacgtaagcgttaggttgcgtcgggtttcgcgggaattgggggggtcgtaggtaagggggggtttcgggttcggtttcgtagcggtgtagtttttttgggacggtcggggtagaatggggagagatttttcgcgtttaagatatcggattggagtcgaggttttaaatgaagggaggttttgtttggaatggggtttcgaatagtatcgaggggcgtttaggtattgtgcggggtagaatggggtgcgggagggtcgggggtcgaatttattttcggttttttagtcgggtggtcgggtttacgtagatttaagtgcgcgtttgtgtgagcgtttaggttttgtttttattcgcggagtttttagttttgtttgtttcgtttttttcgtttttcggattcggggagcgttgttttcggggcgcgtatatcggggcgtgggggcgggttggtaggtagatttaggcggttttttgggtattttttttcggggttttagtttttttatttgtagaatgagggtaatagaggtttaggaatgggtaaattgggtattcgagaatgtggcgttttttcgttttgttcggatattttttggggtttttcgtgattgaaggatgtttagagtttttatttgatattcgggttttttggtggatagtatttatttttatagttattttgaatttttgataagtaatttaatttattgttaaggttttgtatgtgtcgtttcgtttgtttgtcgcgtttttttattcgttgtgatgatttattttttagaatagtacgtttatttttcgattttagttttgtttattatagggcgtttgaattcgtagggttaggttgggaatgtgtgtttattttcgtttttttaggttgggatttttggggaataattaatgttttgttgtcggtagtttttttttttttttagttgtagtatttttatttttttttggttttttgtttttgtttggggttaaggttttttttaagtatttttttatttgtattttgtgtttattttgggttttaggttggagttatttgttagtttatttattttttttttgtagagattggaggtttatttgtttggatttatttcgaggtttttgtttgtgtagaggtttttttttggattttgttttttattttttagtttagttggtttgatttttttatggagtttttaaagtattcggagtggtttttattgcgttttttttgttttaggtatttggttatttggttgttgtttttttatgtttaattgggttaagtcggtagatttaggtgtaagttttggtttttttttggtttattgtacggttttagatatttttttgttttgagttttagtttttttatttgtaataggggtgatgaaaagtttgtttattggtcgggcgcggtggtttatatttgtaattttaatattttggaaggtagaggtaggaggattgttttagtttaggagtttgcgattaatttgggtaatatagtaagattttatttttattggaaaaaaaaaaaaaaaggttgggtaaggtggtttatgtttgtaattttagtattttgggaggttaaggcgagtagattatttgaggttaggagtttaagattagtttggttaatatggtgaaatttcgtttttattaaaaatataaaaattagttgggtgtggtggtttgttattcgggaggttgaggtaggagaattgtttgaatttgggagataggttgtagtgagttgagattatattattgtattttagtttgggtgatagagtaagattttattttaaaaaaaaaaaaaaaaaaaattgatttattgagtatgtagtatatttggggtaggtttttgggaattttatttttagtagttttaagggaaggttgttagtatatttattttatagatagagaagttgaggttttgagagggatcggttttaaggttatttagtgatttagggaattttaaattaggatttgggtttattttcgtgttgggggtgagaggagttggtttggttaacgttgttttatttttgtttttttaggtcggcgtttttagttggtcgagtatggtggtagtttgtatttttggtttttttgtttggtgtagttagtagagtcgttagttttgggcgtttatggtttttcgtgtgagggcgtgagcggtttgttttagttttatttgttgatggaggatttaatggtttagtgatttgatattatattattaatttttttttattagttgacgaatggtggatttagtgacgagtggtttttgtaagggttatggaataatttgaagcgaggtatgagcggtttttgtggtcgtttgtgattgttggagatagaggttttagtattttaagttaatttagcggatttttttagttttgttttaattaatggggttagtggggttttaagtagttatttaattatttagattttattttatttacgcggttatggcgggttttgagggtttttagtatcgcgttttgtattcgtttcgtcgggagcggtcggaggatttggagttgttgttcggcgacgtgttggtagtgagtcgggcggttttgtaggcgttgggcgtggtcgagggtggcgagcgttgtttatagag

SEQ ID NO: 463 - DNA, 6229 bp, Artificial Sequence
  chemically treated genomic DNA (Homo sapiens)
ttttgtgggtagcgttcgttattttcggttacgtttagcgtttgtaaggtcgttcggtttattattagtacgtcgtcgggtagtagttttaggtttttcggtcgttttcggcggaacgggtatagagcgcggtattggaagtttttagggttcgttatggtcgcgtgagtggggtggggtttggatggttaggtggttgtttggagttttattggttttattggttgaagtagggttgggagggttcgttgggttggtttggggtgttgggatttttatttttagtagttataggcgattataggggtcgtttatgtttcgttttaaattattttatgatttttataagggttattcgttattgggtttattattcgttagttggtgggagggagttggtggtgtggtgttaggttattgggttattgagttttttattagtaggtgaggttggggtaggtcgtttacgtttttatacggagggttatgggcgtttaaggttggcggttttgttggttgtattagataagggagttaagggtgtaggttgttattatgttcggttagttgaggacgtcgatttagggagatagggatagggtagcgttagttaggttaattttttttatttttaatacggagatgggtttaaattttgatttggaattttttgaattattgggtgattttggggtcggttttttttagggttttagtttttttatttgtaaaatgggtatattgatagtttttttttggagttgttgggagtagagtttttaagaatttgttttaggtatattatatgtttagtaaattagttttttttttttttttttttgagatagagttttgttttgttatttaggttggagtgtagtggtgtgattttagtttattgtaatttgttttttaggtttaagtaatttttttgttttagtttttcgagtagtaggttattatatttagttaatttttgtatttttagtagagacgaggttttattatgttggttaggttggttttgaatttttgattttaagtgatttgttcgttttggttttttaaagtgttgggattataggtatgagttattttgtttagtttttttttttttttttttaatagaggtggggttttgttatgttgtttaggttggtcgtaaatttttgggttgaagtagtttttttgtttttgttttttaaagtgttgggattataggtgtgagttatcgcgttcggttagtaaataggttttttattatttttgttatagatggggaaattgaggtttagagtagggaggtatttagggtcgtgtagtaggttaggaggaagttaggatttatatttagatttgtcgatttggtttagttggatatgagggggtagtagttaggtggttagatatttagggtagggaggacgtaatggaggttatttcgggtgttttgggagttttatagaggggttaggttagttgaattaagaggtagggaataaagtttaggaagaggtttttatataagtaaaggtttcgaggtgagtttaagtaaatggatttttagtttttgtagaggaggagtgagtgggttggtaggtagttttagtttggggtttagagtaggtataaaatgtagatggggaggtgtttagaaggaattttagttttaggtagggatagggagttaggagaaggtgggggtattgtagttgaggaggaggggaggttgtcggtagtagggtattgattattttttaggagttttagtttggggaggcggagataggtatatatttttagtttagttttgcgggtttagacgttttgtgatggatagggttagggtcgggggatggacgtgttgttttagagaatggattattatagcggataggaaggcgcgataggtagacggaacggtatatgtaaagttttggtagtgggttaagttgtttgttaaggatttagggtggttataaggataggtgttatttattaagaggttcgagtgttaggtggaggttttgagtattttttagttacggggaattttaagaggtgttcgagtagggcggaggggcgttatattttcgggtgtttaatttatttatttttaggtttttgttatttttattttataggtggggaaattgaggtttcgagaggggatgtttagaaaatcgtttggatttgtttgttagttcgtttttacgtttcggtgtgcgcgtttcgggagtagcgtttttcgaattcgggaggcgggaggggcggggtaggtagggttgggggtttcgcgggtgaaggtagggtttgagcgtttatatagacgcgtatttgggtttgcgtggattcggttattcggttaggggatcggaagtgggttcgattttcggttttttcgtattttattttgtttcgtataatgtttgggcgtttttcggtattattcgaagttttattttaggtagggtttttttttatttggggtttcggttttagttcggtattttggacgcggggagtttttttttattttgtttcgatcgttttaaggaggttgtatcgttgcggagtcgagttcgaggtttttttttgtttgcggtttttttagttttcgcggggttcgacgtagtttggcgtttgcgttttggtttttatcggggttcggtattgttttcgggcgtttcgtatttaagtatatttttagtcgttttcgttacgagggttagttaggatttatttggtcgcggtcgttatcgtcgtcgtagtcgtcgttatattaagttaagttcgtttcgtggttttatcgcggttatcgtcgtcgtagtcgcgggattttcgttttcgtcgtcgttacggtttcgagcggtttggttcgttttcggcggaaatgttcgagcgtattcgagtcgggcggatgaatcgaggtcgaggcggagtttgaggtaagggggtattcgagtgttttcggaagtagtcgaacgtaatttcgcgggattggtggattagagggtgttttcgagatagtcgagcgtttttagaggtagtcgagtgtaatcgggtcggcgagggattcgagattgggttcggttgggtttagagacgttcgagcgttttcggaaatggtcgaatattttttacggtcgtattggtataattgaggttgatttttaagatcgcggagcgtttttggaaataatcgaatgtgtttagtgtttaatggaggttttgggagtttagatttagaggcgatcgttagtttatgggaattattgaagtatagatggttttaggggataaatgaggcgtttttaagtttagtaaatagggggtagtagagtggggaaagggtttgtcgtaaaaagtagaagtcggagaaagttagggttgaaggagtttttatggtaatttagagcgttcggaaatagttaacgatttcgatttttacgggtattagaatttagcggatttgagtttagatgtcgacggttttcggaaatagtcgaacgtattcggagatggggttgtagttaagagtgtttgtatgtcggttgagcgtttcggaagtaacggattgttttagggttgggtcgggttcggttagagggagttttatggtagagcgtaagttaagattaggatagaaaggacgcgacgattgtttattttgttattattttttgagacggagtttcgtttttgttgtttaggttggagtgtaatggcgttatttcggttcgtcgtaatttttatttttcgagtttaagcgatttttttgttttagtttttcgagtagttgggattataggtatgcgttattacgttcggttaattttgtatttttagtagagacggggtttttttatgttggttagggtggtttggaattttcgattttaggagattcgttcgttttggttttttaaagtgttgggattataggcgtgagttatcgcgtttcgtcgtttatttattttattaatatagtttagggcgtttaggaggtcgaggttgtaatgtgtcgtgattgcgttattgtattttaatttgggttatagagcgagattttgttttaaaaatataaaaataaaaaatatagtttagggtttagatgtttggaggaagtttttaaaggtagggttatgatggagtattcgtagggagagggtagtaggaggttggtattagcgatggtattaggaagaattttaatagcgaattgttatgtagtttttaaaatttatttgtaatgattttgagttatgggtttattttatttcgtttttttttttatttttttttttttttttttttagttttttataaatttagacgttggagtttatttttgtaaatacgggtttttatttattgttagttttaggatggaaggagggggtgaattatgtatagttttggtttattttttaatattaggtagtgttggataggggatttagaaagggaagtagagtgggttgttgatgtttggaaagtttttttattagagtgtttagtgggttatatagtattatgggggatgagttggggttggagtcggttgtatttgatattagattttttatttaagtttttttgatgataacgtttataatagggtttggttgatgtttcgttttgttacgatttttgttgggtgatcgtgggataggttttcgtttttcgttggggttttagttgttttgtttgtaaaatggaggtgatgatattatttttagtttttttaaggttggttgagggagaagttacgtaaaagcgtttggtatatagtaggtgtttaataaatagttaatgggattagttttgtaaatataaggaaattgaggtatagagtgggaaagttatttttttagagttatatagtgaagttgaaatttaaatttgagtttcgattgggttttttggtttgaattttattttagagaggttttgatatatggagggaatttttaataggtgttttagatatattacggttaagggtttattttgttgggttttaaatatacggtattttgtttagggtagattggataaggttaggttaaggtagagtttgaggggaggggatattgagtgtttttggaagtagttggacgtaatttcgtaggattggtatattggagcgtgtttcgagatagtcgagtatttttggaggttgttttggtagttttaggtgaggtttgtatttttttttattagtgtttatttggggagcggatgatttttttgtttagattcggtgaatatttatttatttattaaagttttagtttttatattttttttttaggttgaagttagtaggattggaggtagattttatatatagagtaggtattgtttgggtatggtagttatgatggtgggaagtggtttttagaatttagtttatcgttgggattatattgttttgtgggtgagaggaattgtttacggatattttaggttgtagtcgaattgggtcggtataggtgattaggtgattttaattttatttttttaaatgggtaggtgtggggaggggaatgagattaggtaatataaaatatttaaaaagtatagaaaaattggaaaatataaatatagatgatttgtttaaagtgtattttttttagtttagagggtagggtttgtaaatagagttttaggtgtttggggtaagatttggtagtcgtttttagggggcggtttagtacggttatcgtttataaaaagtaataaattaggttgggtttagtggtttacgtttgtaattttagtattttgggaggtaaaggtaggtaaattatgaggttaggagttcgagattagtttgattaatatggtgaaatttcgtttgtattaaaaatataaaaaattagttgggtatagtggtgggcgtttgtaattttagttatttgggaagttgaggtaggataatcgtttgaatttgggaggcggaggttgtagtgagttgagattacgtcgttgtattttagttcgggtaatagagtgagattttgttttaaaaaaaaaaaaaaaaaaagaaaaaaaaagtaataaattagttgtagggatttgttgttatttataaagttatttttgttttttatttttgttttatttagtttcgattgatattagaatataagcgatgtttttattttttagtaaggatcgagatggtttttcgttttttgggtgttaggttggtggtttagtt

SEQ ID NO: 464 - DNA, 6148 bp, Artificial Sequence
  chemically treated genomic DNA (Homo sapiens)
aaagatattggggttaattttagtaaggaaaataaaaagatttttaagtattatttttttgtaaatttttaagtattatttttttggtaaattttttaagttaagataatgtattggtaaaaggaaaataattatagttcggatatatattttgtatataattgtgtattaagttataaattttggaaaattagtaatttagtaataagttgttattttaattataaaatatttttatgttttagataattattttcggaatgtttgtattcgtttatatatattttgtaagtgatatttaagttttgaagattaatttttattttttatattatttttattagatttttttattttcgtttttttaagtaaatatataatttaaattaatgagttttatttatttgttagttttaattattgataaaatttagtggttgtttagtgatgtatagttttattaaaagatatatatgattatgttttattaaatacggaatatatgtttaaattgttgagataattgttaatgtattaattataaaaagttattattttttattttagttttaattaaaattaaagtgtgaatattttattatggttagaaattatttaatatagatgtataggttttattgttgattttttatttggaaattttattaattgtaaattattaggtttttaattaaaatgttatattggtgaaatgagttggttttatttttataataatattattttgatggaagaaatgtgagtattttagttttgatttgtgggtaagtattttttttgtttttagaatataaatagtaaatatcggtattggaaaaatttggttttaacgagattttttatttttaggttaattgtagattttcgggaaattttaaataagggatggtgatttcgtttcggcgttagggttaatatagtaattagttaggttttaattttgggttttgaagggttttatcggtattatggttgatgcggatcgatgcgtcggaggaggtggataaggaagaggttggtttgtttatttgtagttagagttgtcgtcgtcgttagtagcgatagtattattggattagttaaatttagtatttttcgtatatttttatttttagtatataatttttaagcggattaaaattttattattattaaaaatatagataagtacgttatttattttttatatatatatttttttttttattttattagtgtcgtttttttttgcgcgttagtggcggggaagggtgggggaaggaaggagatttcggggacgtttgtgtattttcgtttttattttattttacgcgtagatagttttagcgttagggcgcgcggtagacggttttttttttttaatttaaatatattgatatcggcgttttacgcgttatataatttcgtcgtcgttttcggtttaggcgggcgttttttttttacgtcgcgcggttcgggcggggaggggcgaggggaaggagcgagagttgcgtagatagtaggcgtcgggtcggggtagtttagatatagacggtatcgttaggtcgggaatatttttttttcggttcgttgcgtatcgtcgttttttagtttttttcggaaagcggggggtgtcggtgttaatcgcgttgggtatttttcggtttttatatttatattcgaagttttcggtgatttagttttcgtttacgttttcggcgcggtgataatttagaagttttcgttttattttatttcgtcgttatttttcgtttgagggaggtagggagggcggatcggggttcggggttcggagggagtggaggttaggcggggagggggttagagttgggggcggtggttgttatttgtaacggcggcggcggcggtggcggtttcgtagttgttcgggcggcggcggaggatggagtcgggggggggcggggggaggagagggggcgattcgggggttttttttttttttttttttttttttgttttttttttattttatagagtttttggttttttggagttcggtgcggtcggcgggagggtaagcgaagggttgtaggggagggagggagggagtcggtcgggtcgggtcgcggagttggagcgggaggcggcggcggcggcggcggcggcgggagggggagggaggagagagggcggcggcggggagaggaggaggcggagattttatatgggaatcggatatcggttataaatttattattagaaaatatcgttcgggcgggggtcgggttacgtcggcggggcggcggttttgggtttcggggcgcgttcggcgcggggaggggttttgcggttttttttcgggttgcgtttcgttgaggggatttttcgtcgttttttcgtttttttttttttttcgttcggggtcgtcgtcgatcggttttcgtcgtcgtcgcggggtttgttgttgattttgaggaaaatttttgacgttaggggttggttttcggcgattggcgggagcggttttttcgcgttttcggttttgttcgtcgtttttgtttttttttttgttcggttttcgtttttaggttttttcgcgtttttaaattagcggtgtttcgcgtttttttttttttcgcgagaatatttttttagttagttagagtcgggagcgggggtagtcgttttcgggcgggaagttttgggtttttttttcgttcgcgtggtttttggcgggtattcgaggttcgggagcggaggtttttcgtttagtcgttttttcggcgtattcgtttattcgttttggtcgcggacgcgcgcgtcgttaggtttcgggcgttttttttagttcgtcgcggttttttggggagatgggttcggcgcgagggttcgtatttggaagtttacgaagtgggcggtgtttaatgaggtagggatcggagagcgcggagtagtttagaagtcgattttattttttgtatttcggggaagagggaattcgggttagttcgtagtaagaattatttttgattattttaggagattacggtagattaaaaatatttttttgaatagtttttcgtatcgttcgttgtaagtattcgtttatatacggtatatagattgcgggcggatcgtaatttatttttgaaattatattttttttagggatattcgtttttaatgattttgggaaagttacgaggtattatatttattacgaagagatcgtttttttattttgaagttagtgatttttgagattgtattggggataatttttttgtataatgattatattttattatgtagcgtattttagaaaattataaaagtttataagttttatcgtttttggaaatatttgggtagtatttttattatttcgttacgtggttttagttttgttgatgtatttgttatttttttttattgtaatatttttgttaatgtttgtggtttttttttgtagaagagtttttttttttgatatgtattttattttttgtttttttatgttttgataatttttttatggtagttatttttttatattgtagttttttggtatttatgtattgtgtggtattaatatttatatttttaggtttatattttttatgaattgtgtatttgttgggattgtggataggagtaggaaattaaataaaagggttttttaaaaaagttagtttttttcgtttgtaagggaaatttgtttttttgattattttggagtaaaatttgttattttaagataatatagttcgtttgagagaaagttttgtattatgttttttttttttttttatattttttagtatgttatgagttgatgaataaatagattttgttttattttcgttgtatttataaaatatatataatgtatttttataattattagattttttatagttattattggtaaaattattgggttataggttttttgttgtaaaatataaaaataggttatatttttattttatagtattttaatttgttttttatttttaagaaaatagttttttatgatattagtattaaaaagagtgtttgaaattttaaatatttaatttttgagagttagagtattcggaattattgaattattagatattttttattagtgagatgtttatttgtttttaaatttaatattaatatatttataagaattgaatgtgttttatgagttatattattttaaaatattttttttagtttggttagattgtattaaattttaggtggattaaattttaaaatttagtatgtgagaatggattatatattttcggttttatgtatttgaagaattataagtttttatttttgtttaatttttgtttgtggattatagtagttttataagtttttataataaaagtatgtttgattttgttattgaattattattgattagggatattatttatttaaataacgttgtttttttttttagattatgtcggtatgaatttggtagaatttgtcgattgtggtatgtcggtattttatatagagtgtgtggtagattttttttttattttgttattatatttagtaatatggagtgtagttagtatgtttatttttgggaatgttttttttaaattttgtaaagaaagtttttattttttattatattaaatatttttaagattaatattttttagtattagttatttatttattttaagaaaaatgtttatttttttttattattaatgattaagtttgatattgagttattttttggtattttttttattttttgggagtaattaaaattggaaggatatttagaattttagagtatttaatgttttagtttatttaggttgttataataaaatattattaattaggtagtttataaagaatagaaatttatttttaatagttttggaggttgggaagtttaagattatggtattagtagatttggtgtttaaagagggtttcgttttttggtttgtaggtggtgattttttgttgtgtttttatattttagaaagagtgagggaatttttttggatttttttttttttttttttgtttttttttttttttttttttttttttttttttttttttttagagatagtgttttattttgttatttagattggagtgtagtggtatgattatagtttattgtagtttggaatttttaggtttaggtaatttttttgttttagttttttgagtagttgagattattagtatgagttaatgtttttagttattttgagttttttttataagggtattaattttatttttgagggtttaaatttttatgatttaattattttttaaaggttttatttattaatatattttggaagttaggattttaatttatgaatttggggaaatataaaaatttagattagggtattatataataaaaattaagttattgtttttttgttttaatagaaagggtgtgttattttaggagagggtatggaataaagtagatatagaatatttgtttgtggaagaaatatatgttttaatgttttaatgacggttttaataaatttgtgtattatgtatagtttatatagtattttttttttgggatgtaacgtgatttattggaaagaatataaaagtgttttggagatttgtagattagagtttaaattttttttttgtagagtttgttttattttaggtaagttatttaatttttttaagttttatatttttttatttgtgaaatggtagttataattattttaataatttatgtgaattaaattttatgaaatattagtatttaaaatatagtgagtggttagtaagttaagatttttttattataaatgtgaatatatttatgttaaattaataatagttgttataaataaatataaaaatttatattggtattttttgttatagttggttttgaaataattacgttaagtttatagttgtaattagtgaatatattttagatgattaatagaataatttttaaaggagtatagtttaaatttttgttggttaagttttttaatttgtgatattttttttatagtattttaaattgattaaggtatatagtttattataatagttattagtattaattgtttttttttttttttttttgatgtttgtttgtttgtttgtttgttttttt

SEQ ID NO: 465 - DNA, 6148 bp, Artificial Sequence
  chemically treated genomic DNA (Homo sapiens)
agaaaaatagatagatagatagatagatattagggaaagggagaaaaagataattagtattgataattattgtaatgaattgtgtgttttagttagtttgggatgttgtaagaaaaatattatagattgggaggtttaattaatagaaatttaagttatatttttttagaaattgttttattaattatttagaatatatttattaattatagttgtagatttaacgtggttattttagaattaattgtggtagagagtgttaatatagatttttgtatttgtttgtagtagttattgttagtttaatataaatatatttatatttatggtaaaggaattttagtttgttgattatttattgtgttttagatattaatattttataaaatttaatttatataagttgttgaagtagttgtaattgttattttataaataaggaaatataaggtttagaaaaattaagtaatttgtttgagatgagataaattttgtagagagaggatttgaattttggtttgtaagtttttaaagtatttttatgttttttttaataaattacgttatattttaagaggaaaatattatataaattgtatatagtatatagatttattagagtcgttattagaatattagaatatgtattttttttataaataggtattttgtgtttgttttgttttatgtttttttttaggatgatatattttttttattaagatagaagagtagtaatttaatttttgttatgtgatgttttggtttgaatttttgtgtttttttaaatttatagattgaaattttaatttttaaagtgtgttagtagatggggtttttgggaggtgattaagttatgagggtttgagtttttaagaatgggattagtgtttttataaaagaggtttaagatggttgggaatattaatttatgttggtagttttagttatttaggaggttgaggtaggagggttgtttgagtttaggagttttaggttatagtgagttatgattatgttattgtattttagtttgggtgatagaatgagatattgtttttaaaaaaaaaaaaaaaaaaaaaaaaaaaaaaaaaaaaaaaaataaagaaaaagaaaaagaggtttaagagagtttttttattttttttaaaatgtgaagatatagtaagaagttattatttataaattaggaaacggaattttttttagatattaaatttgttggtgttatgattttggattttttagtttttagaattgttagaaataaatttttgttttttataagttatttagttgatggtattttgttatagtagtttgaatggattaagatattagatgttttgaaattttaaatatttttttagttttagttatttttaagaaatgggggaagtattaagaaatagtttagtattaaatttagttattggtagtaaagaagaatgaatattttttttaaaatgaataaataattaatattgagaaatgttaattttaagaatatttggtgtaataaagaatgaaggttttttttgtaaaatttaggagggatatttttagggatgaatatgttggttgtattttatattattggatgtgataataaaatagagaagaaatttgttatatattttgtatggagtatcgatatattataatcggtagattttattaaatttatatcggtatagtttaagagaaagaataacgttatttaaataaataatatttttaattaatagtaatttaataataaaattaaatatgtttttattatggaaatttatgaaattattatagtttataagtaaaaattgaatagaaataaaaatttataattttttaaatatatgaagtcgagagtatataatttatttttatatattgaattttagggtttaatttatttaagatttaatgtaatttgattagattgggagaaatattttgaggtagtatggtttataagatatatttagtttttgtaaatatattgatgttaaatttgggaataaatgaatattttattgataagagatatttagtaatttagtaatttcggatattttgatttttaaaagttaagtatttaaagttttagatattttttttagtgttggtgttataagggattatttttttaaaaataaaaagtaagttggggtattatggaataaaaatatgatttatttttgtgttttatagtaagaaatttgtaatttaataattttattaatagtgattgtgagaggtttgataattatgggaatatattatgtatattttatagatataacgaaaataggataaagtttgtttatttattagtttatagtatgttgggaaatatgggaaaaggggaaaggtatggtgtaggatttttttttagacggattgtgttattttaaaatggtaaattttgttttagggtggttagggagataagttttttttataaacggagaaaattgatttttttaaaaaatttttttatttggttttttatttttgtttataattttaatagatgtatagtttataaaagatgtgaatttggaagtataaatattaatattatatagtatataaatattagggggttatagtataagaaaatgattattataagagagttgttaagatatagaaaagtagagaatgaagtgtatgttaggaggaggaatttttttgtagaaagaagttatagatattaataaaaatgttgtagtgggagaaagtaataggtatattaataaggttagagttacgtggcgggataatagggatgttgtttaggtgtttttagaagcgataaaatttgtaaatttttataattttttgaagtgcgttgtatggtaaaatatggttattgtgtaaaaaagttgtttttaatgtagttttaggagttattgattttaaaataaagaaacggttttttcgtagtaaatgtagtatttcgtggtttttttaaagttattgaaaacgaatatttttaaaaagggtgtgattttaagagtgaattacgattcgttcgtaatttgtgtatcgtgtgtggacgaatgtttgtagcgagcggtgcggaaggttgtttagagaggtgtttttggtttgtcgtggttttttgggatagttaggaatgatttttgttacgggttgattcgggttttttttttttcgaggtgtagggggtggggtcggtttttggattgtttcgcgtttttcggtttttattttattgggtatcgtttatttcgtgggtttttaggtgcgagttttcgcgtcgggtttatttttttaaggggtcgcggcggattggaggagacgttcggggtttggcggcgcgcgcgttcgcggttagggcgggtgggcggatgcgtcgaggaagcggttgggcgaggagttttcgttttcgggtttcgggtgttcgttaagggttacgcgggcgagggggaaatttagaatttttcgttcgggagcgattgttttcgttttcggttttggttggttagggggatgttttcgcgagaggagagggggcgcggggtatcgttggtttgggggcgcggggaagtttgaggacgagggtcgggtagggaggggagtagaggcggcgggtagggtcggggacgcggggaagtcgttttcgttagtcgtcgagagttagtttttgacgttaggagttttttttaaagttaataataagtttcgcggcgacggcgagaatcgatcggcggcggtttcgagcgggaggaaggagggggcggggaggcggcggggggtttttttagcgaggcgtagttcgggaggaggtcgtagaattttttttcgcgtcgggcgcgtttcggggtttagagtcgtcgtttcgtcggcgtgattcggttttcgttcgagcggtgttttttggtgatgaatttgtagtcgatattcgatttttatgtagagttttcgttttttttttttttcgtcgtcgtttttttttttttttttttttttcgtcgtcgtcgtcgtcgtcgtcgtttttcgttttagtttcgcggttcggttcggtcggtttttttttttttttttttgtagtttttcgtttgttttttcgtcggtcgtatcgggttttaggaggttagaggttttgtggggtggggggaggataggaggggaggaggagggaggggggattttcgagtcgttttttttttttttttcgttttttttcggttttatttttcgtcgtcgttcgagtagttgcggggtcgttatcgtcgtcgtcgtcgttgtaggtaatagttatcgtttttaattttagtttttttttcgtttggtttttatttttttcgggtttcgggtttcggttcgttttttttgttttttttaggcgggggatggcggcggggtggggtgaggcgggggtttttgggttgttatcgcgtcgggggcgtgggcgggggttgggttatcggaggtttcgggtgtgggtgtggaggtcgggggatgtttagcgcggttgatatcgatatttttcgtttttcggggaaagttggggggcggcggtgcgtagcgggtcgggggaggggtgttttcggtttagcggtatcgtttgtgtttgggttgtttcggttcggcgtttgttgtttgcgtaattttcgtttttttttttcgttttttttcgttcgggtcgcgcggcgtggggagggggcgttcgtttggatcgggggcggcggcgaggttatataacgcgtggagcgtcggtgttagtgtgtttgggttggggggagggagtcgtttgtcgcgcgttttggcgttgaggttgtttgcgcgtggggtggggtgaaggcgaggatgtataggcgttttcggggttttttttttttttttattttttttcgttattggcgcgtaggaaaagacggtattggtggggtgggggggggggtgtgtgtgtgggaggtgggtaacgtgtttgtttgtgtttttaatagtagtggggttttgattcgtttgggagttgtgtgttaagaatagaaatgtgcggaagatgttgggtttggttgatttagtgatgttgtcgttgttggcggcggcggtagttttggttgtaagtaaatagattagttttttttttgtttatttttttcggcgtatcggttcgtattagttatgatgtcggtggggttttttagagtttaaagttgaagtttagttggttgttgtgttgattttgacgtcgaggcggggttattattttttgtttgggatttttcgggaatttatagttagtttagagataaagaatttcgttggggttaggtttttttaatatcggtatttattgtttatgttttgaaagtagaggaaatgtttatttataagttaaagttgggatgtttatattttttttattaaaataatgttgttatgaaaataaaattaatttattttattaatgtggtattttggttgaaagtttggtagtttgtaattgatgaagtttttaaatagaaagttaatagtgaaatttatgtatttatattgggtaatttttagttataataaagtgtttatattttgattttagttgaggttaaagtaaaaaataatggttttttgtagttaatatattggtagttgttttaatagtttagatatgtgtttcgtatttggtaaagtatggttatatatgttttttagtagaattatatattattaggtaattattgggttttgttagtggttgaagttgataaatgagtgaaatttattggtttaggttatgtatttatttaggaaaacgaaggtggaagagtttaataaagatggtgtaggaaatgaagattagtttttagaatttgagtattatttgtaaaatatgtataaacgaatataaatatttcgggggtggttgtttaaaatatgaaaatattttataattaaaatagtaatttattattaagttattagttttttaaggtttatgatttaatgtataattatatgtaagatatatattcggattgtaattgttttttttttgttagtatattattttgatttggaaagtttattaaggagatagtatttgaaagtttatagggagatggtatttgaagatttttttgttttttttattagggttgattttaatattttt

SEQ ID NO: 466 - DNA, 6186 bp, Artificial Sequence
  chemically treated genomic DNA (Homo sapiens)
tttatttgtttcggttatttaaagtgttgggattataggtatgagttattgtatttagttaaattgttagttttttaaagtagttaagttaatttatatattttttaatagagcgtgttttttttagttaatttacgtttttgtttgtattcgtaatttttagtttttgtttttagttattttggtgggtgtatgatggtattttattggggttttatttgtatttttttgatgattaatgaagttgagtatgtttttatgtgtttgtttaataaatatttgttgaaaggatgaataaagagtgaatgaataaaatatggaaagaaatttaattttgttttgtgttttgtttaaaatttattagtggtttttattgttttttttttggtcgacgggtatttgtttgttttggttttttttgattttatttgtttcggatggattttttttgttttttttttgggtttttgttatttaggttgtttttagttttttttaaggattttttttgttttataattttgttataaattgtttttttttgtttagaatataatttaggtttaaggaatttagacgcgttttttgtattttagtttgaaagtttttttttttaggaagttttttttgatttttattttttagtaagggtggtataaattgttaatttaggtttatttttgtttattttttttgtttgtgtttttgagatggagttatattttgtcgtttaggttggagtgtagtggggttattttagtttattgtaatttttattttttgggtttaagtgatttttttgttttagttttttgaatagttgggattataggtatttattattatgtttagttaatttttgtatttttatatttatttatttatttatttgagatagagtattgttttgtcgtttaggttggagtgtagtggtatgattttggtttattgtaattttcgttttttaggtttaagtgatttttttgttttagtttttcgagtagttgagtttgtaggtgtttgttattatatttagttaatttttgtatttttagtagagatggggttttattatcggttagattggtttcgaatttttgattttaagtgatttgtttgttttggttttttaaagtgttgggattataggcgtgagttattatgttcggttattattttttttttttagttgtgattatagttgtatatatttttttttttttggtttttttttttgtttttttttttttgagataggatttcgttgtgttatttaggttgtagtgtagcggtgtaattatagtttattgtagttttgaatttttgggttaaatgagttttttatttcggttttttaaagtattgagattatatgcgtgagttattatttttggtttgtaaatatttttttaaaaatataatatttgattaatatttgttattttattataagaaatatttaaaaaaattttaatttaaaaaaattttaattttttaagttatataagagtagtaattttattttgtttttagtaagatatttggtatatagtaaatgtttaataaatatttgttgatagtataaaggttaagtaatagtataattggtattattatatgaaagtaattattttttagaaatttatttatttttgggggattcgggttaataaaaaaattatagaaaataattttatttattttttttttttttttttttttcgttaggttttttgattggggggaggttttaaatgtatatattgtttttgttttatttggtgtagttgttgtgtgtatgtgttatggaaatttatattaggtaggagattaaggaggagaggagaaaagaaaggtatcgttggtattatagtgaaatttatattttgcggtttcgttttagtttttttgtttttatttgtttgtttatgaaatagtttaaaattaatatggcgtaatggatggtattatagattttttatttttttggttagattttttgggtttaaagtttggtttaattatttattatttaaataatttttgataatgtattttgtttttttgggttttagtggttttatttgtaaaatggggataatattattttttattttatggggttgtgaggattgtataagttaatttgtgtaaattgttaagaatatagttttaggaagttttgttattgtgaatgtatattaattttttttattattattttttgagatagagttttgttttgttgtttaggttggagtgtagtggtgtgatttaagtttattttaattttcgttttttaggtttaagtgatttttttgttttagttttttaagtagttgggattataggtgttcgttattatgttcggttaatttttgtgtttttagtagagatagggttttgttatgttggttaggttggttttgaatttttgattttatgtgatcggttcgtttcggttttttaaagtgtttgattataagtacgagttattatgtttggtttacgattattatgtttttaggttttagtttttttatttttgaggtgaggattaataatttggttatttttaagtgatgtttaaagaggttgagaagaagtaaaggcgttttgtatataggtgaggttaatagttgttagtgatggagattggcgtcgtttgggttattagtgtttcggaattaggttgtttacgggtttgaattttatttttatttttattttttattaattgtgtgatttcgggtaagttatttcgtttttttgaattttagtttttttatttgtaaaaggtaggtgaataatagtatttatttttttttgtgtgatttagttttggagttagcggatcgggtttaaattttagttttgtaagtgattagttaggtgattttgggtagagggaattatttaatttttttgtatttgggtttttttttttatgaacgtggagattttataggatgaaatgagggtatagttaaggcgttcggtatattttaggtaggtagggggtttcgtttacgttatttttttttggtgacggatattgtttttaaatagtatttgaaaagtggtcgtagggtgtgtggttttaaagattttaggcgttttcggaaggcgagttaacgttttttaggttcgttcgcgagcgggtgggtttaagttttggaggatttggggtgggggtggcgcggggtttaggttcggggcgtcgagaggtggttggttcggttgtttacgtcgagacgcgcgaggtgagcgggcgtcggggcggggcggggtggggcggggtcgtcgtattttcgtgacgcgcgggttaattaggcggcgttgcggtttcggtttcggttttttgcgtcgtcgtcgtcgtcgtcgttagcgttagcgttagtagtcgggttcgattattcgtcgttcggtgttcgtcgtcgttcgcgttagtaatcgggttcgattattcgtcgttcggtgttcgtcgtcgttcgcgttatcggtatggcgtttcggggtttttgtagcgtcgatggtttcgattcgttttgggtacgtgtcgggggtcgcgtgaggtcggcgggacggagggaggtcggcggggagggaaagtatcgggttcgtagtcgttcggggtatttcgtttttcgttttgttgtcggtttcgggggttcgggatttttacgtcgttcgcggtttagtttttttcgggggtgtaaggtatgggggaaatttgggtgatttagtttttgcggagtagagcgtggggggtcgcgtgtttagttttggggttttggagggtcgggtcgggttagagtcgtcgtgaggaggtttttttgttttggggttttcgtttgtaaaaataattttttagggaaggggacgttagagatggggggcgggaagaggggtgtttttttgtttttgtttttttattttttttgtggttagggttttttttttttacgaaaaatatttcgtgattaacggggtgagttggggaggggtttagattgtagaaagggatttttattgtttttttaaagttgtcgtataagttatattatttttttgtggttatttagttttgttttttttgttttttttatttagatattgcgggggaagtttgggggaattagggaagaagggggatgtttatttttgatgtgttttatttgattttcggttcggggtagatttggggtgtagttgaggacgtttaggattttggtagttgtggttttgtttttttttttttgtaatacgtggagtttttttttggggatgttttttagatttaatttcggtaagtttttttttgtaacgtggtttgcggagtttgattgggtgtttggagtttatttgttgtggtttaagttttagttttttgggttttagttttttcgtaatgcgatttgtttttttgttttaggaaggtaggtatttttgtttcgtgttgttttgattgttggtgaacgtagtaggtaaatttggatacgattgtttttttttttttttttgtttaggaattaggagaaatagttttggtttttaggagttggtgattagtttttaaaaatatttttttgttttgttttgtcggttttttttcgagggttgtatttggagtgttgaaaagttattttttagggttttattggagggtttggttttgtttgtttgttttttttagtagggtattattgtgtttaataatttattatattttgatatattttttattttaagttagtggggttggagagtaattttaggggtggaaatagaatatagattttgttttgagggtttgggggtgattggagtttttttgtagatggattttttttagtaggggaaaatttgtggtttttttgttgttaggtgtagtaatagtaagattattttttgtaaagatttatatggtgatttgggtttgtgttgttgtgaattttagaatatttttttgtttatttttttttgaattgaggagggggtaaaatagggtgaatatttatgaggttttgtattaggacgtattttattgatggtaattggtagttgatggttaatgagtatgtttggggtgcgttttgtttattttaagaaatttatttacgaagtttagttgtaatattttttaaaatttttatttttttttttttttttattttttttttcgttaaggattttttgttatagaaattgttaggtggttgggttttgtttgggggtaattgtagttgatttttgtttttggtaggtattttattttcgtgtttgattttgcgtatttttgttgtttggattttaagatttgttggaggtgttttggaattagaatttgagaggaggtaattggggtttgagtgggaaaattgaaatataattaattgaaagttagaaagtaggtagttgttgttttttttttttttttttttttttttttttttttttgagatagagttttgttttgttatttaggttggagtgtagtggtacgattttagtttattgtaatttttgttttttcggtttaagtggtttttttaatttagttttttaagtatttgggattataggcgtgtgttattacgtttagttaatttttgtattttttatagagatagattcgtattatattgtttaggttggttttttatttttgggtttaagcgatttttttgttttggtttttaaaagtgttgagattataggtatgggtttttgtgttcggttgtttttgtgttttttaaggtagcgtgttcgaggttaggagcgattggttttttaggtagttagataattgtgtgattttgagtaagttattttttttttgtgtgttttattttttttatttttaaaattggataggagttaaaaatgtggtagtttttttgggttgttgcgaagggttaatgagttaattttgtaagtggtttagtttgtgttttgtacggagataaataatggttagtattaaatattattttttttaaagatgaagttgtgtgttttaagttttttgttttttttttggattttttttttttttagttggtggagatgggattgggttgtgaaaaggtagtgaggtattcgtgtttggtttttgttgtgattaaggttatgtgtttagaagttaaggttagtgggtttcgggtgattttgttagagttttgt

SEQ ID NO: 467 - DNA, 6186 bp, Artificial Sequence
  chemically treated genomic DNA (Homo sapiens)
ataaagttttgatagagttattcgaggtttattgattttgatttttaagtatatgattttggttataataggagttaggtacgggtgttttattgtttttttatagtttaattttatttttattagttgaagaaaaggggaatttaaaggaagaataaggagtttaaaatatataattttatttttggaaaaaataatatttaatattaattattgtttattttcgtgtagggtataagttgagttatttataagattaatttattgatttttcgtaataatttaagaaggttgttatatttttggtttttgtttaattttagagatgaggaaagtgaggtatatagagggaaagtggtttgtttaaggttatatagttatttgattgtttgggaggttagtcgtttttggtttcggatacgttattttgaaaaatataaaaatagtcgggtatagaggtttatgtttgtaattttaatatttttggaggttaaggtaggaggatcgtttgagtttaggagtaggagattagtttgggtaatatagtgcgaatttgtttttataaaaaatataaaaattagttgggcgtggtggtatacgtttatagttttaggtatttgggaggttgagttaggaggattatttgagtcggggaggtagagattgtagtaagttgagatcgtgttattgtattttagtttgggtgatagagtaagattttgttttaaaaaagaaaaagaaaaaaaaaagaaaagaaaaaagtaataattatttattttttagtttttagttaattatattttaatttttttatttaggttttagttgtttttttttaaattttggttttaaggtatttttaataagttttggaatttagatagtagaaatacgtaaggttaaatacggggatggggtatttattagaggtagagattagttataattatttttaagtaaaatttaattatttggtaatttttgtggtagaaagtttttaacgaaggaaaaaataaaaagaaaaaagaaaataaaaattttaaaaaatattataattggatttcgtgaatgagttttttaagataaataaagcgtattttaaatatatttattagttattaattattaattgttattaataaaatacgttttgatataaaattttatggatgtttattttgttttgttttttttttaatttagaagaaaataaataagagaatattttggaatttatagtaatataaatttagattattatgtgaatttttgtaaaaaataattttgttgttattatatttggtaataaggaagttataggtttttttttgttaaagaaagtttatttgtaaagaggttttaattatttttagatttttaaggtaaagtttgtgttttatttttatttttggggttattttttaattttattggtttaaaatgggagatatattaaagtgtggtaggttattaaatataatgatattttattaaaaaaaataaataaataaaattaaattttttaatggggttttggaggatgattttttaatattttaaatgtaattttcgaggaaaggtcggtaaaataggataagaaagtatttttggaagttgattattagtttttaagaattaaggttgttttttttgatttttaaataaaagaggagagagaaatagtcgtgtttagatttgtttattgcgtttattaataattaagatagtacgagatagaagtgtttgtttttttggaataaagaggtaaatcgtattacggagaagttgaagtttaaaagattggggtttaaattatagtaagtggattttagatatttagttaggtttcgtaggttacgttatagaagaaaatttgtcggggttaaatttaaggggtatttttagagaggagttttacgtgttgtagggaagggagggtaggattatagttattagggttttgggcgtttttagttgtattttaagtttgtttcgagtcgagggttaggtagggtatattaagggtggatatttttttttttttttggtttttttaaatttttttcgtagtatttaagtagaaagaataaaaaaaataaagttaggtaattatagaagagtaatgtggtttgtacgataattttggggagataatgaaagtttttttttataatttaagtttttttttagtttatttcgttggttacggagtatttttcgtgaaaaggggggattttaattataaaaaagatgggaaaatagaagtagagagatattttttttttcgttttttatttttagcgtttttttttttggaaggttgtttttatagacgggaattttaaaataggaaggtttttttacggcggttttgattcgattcgattttttaaaattttagggttgggtacgcggttttttacgttttgtttcgtaggaattgagttatttaagttttttttatgttttgtattttcgaaaggggttgggtcgcgggcgacgtgagggtttcgggttttcgaggtcggtagtagagcggggagcggggtgtttcgggcggttgcgggttcggtgtttttttttttcgtcggttttttttcgtttcgtcggttttacgcggttttcggtacgtatttagagcgggtcggagttatcggcgttgtagaagtttcggagcgttatgtcggtggcgcgggcggcggcgggtatcgggcggcgggtgatcgggttcggttgttggcgcgggcggcggcgggtatcgggcggcgggtgatcgggttcggttgttggcgttagcgttggcggcggcggcggcggcggcgtagggagtcggggtcggggtcgtaacgtcgtttggttggttcgcgcgttacggggatgcggcggtttcgttttatttcgtttcgtttcggcgttcgtttatttcgcgcgtttcggcgtgggtagtcggattagttatttttcggcgtttcgggtttggatttcgcgttatttttattttagattttttaaggtttaggtttattcgttcgcggacgggtttggggagcgttggttcgtttttcggaagcgtttgggatttttggggttatatattttgcgattattttttaaatgttgtttaaggatagtattcgttattaggggaaaataacgtgaacggagttttttatttgtttggagtgtatcgggcgttttaattgtgtttttattttattttgtaaagtttttacgtttatgaaggaagaaatttaggtgtagagaggttgagtgattttttttgtttagggttatttggttaattatttgtagggttgggatttgaattcggttcgttgattttaaagttgagttatatagaaggaggtgaatattgttatttatttattttttatagatggggaaattgaggtttagaaaggcgaagtgatttgttcgaggttatatagttaataaggagtgaaagtggaagtgagatttaaattcgtgagtagtttgatttcggagtattgatgatttagacggcgttagtttttattattaatagttgttgattttatttgtgtgtagagcgtttttgtttttttttaatttttttaagtattatttagaaataattaggttattgatttttattttagaggtaaggaaattgaagtttggagatatgataatcgtaggttaggtatggtggttcgtgtttgtaattaagtattttgggaagtcgaggcgggtcgattatataaggttaggagtttaagattagtttagttaatatagtaaaattttgtttttattaaaaatataaaaattagtcgggtatggtggcgggtatttgtagttttagttatttgagaagttgaaataggagaattatttgaatttgggaggcggaggttgaaatgagtttagattatattattgtattttagtttgggtaatagagtaagattttgttttaaaaaataataataaaaaaaattaatatgtatttatagtgataaggttttttaaggttgtgtttttagtaatttatataaattaatttgtgtaatttttataattttatgaggtaagaagtagtattatttttattttgtagatgaggttattaaggtttagaaagatagagtatattgttagggattatttagatggtaagtgattaagttaaattttgaatttaagaagtttggttagggaggtgggaagtttataatattatttattgcgttatattagttttgaattgttttataggtagataggtagagatagaggagttagggcgaggtcgtagagtgtaaattttattgtgatattagcgatgttttttttttttttttttttttttaattttttgtttgatgtgggtttttataatatatgtatataatagttgtattaaataaaatagaaatagtgtgtgtatttgagatttttttttaattaaaggatttagcgagggaaggaggaaggaggaaggtagataggattgttttttgtgatttttttattggttcgggttttttaagggtgaatgagtttttaagggataattatttttatgtaataatgttagttatgttgttgtttgatttttatattgttaataaatatttattgagtatttattatatgttagatgttttgttaggaataagataaaattgttatttttatatagtttaaaggattggaatttttttggattgggatttttttaagtgttttttatggtaagatggtagatgttaattaaatattatatttttgaaagggtatttataggttagaagtagtgatttacgtatgtaattttagtgttttgggaggtcgaggtgggaggtttatttggtttaggagtttaaggttatagtgagttatgattgtatcgttgtattgtagtttgggtaatatagcgagattttgttttaggaaaaaaaaaataaaaaaaaaagttagggaaggggagatatgtataattatggttatagttagaaaaaaaaagtggtggtcgggtatggtggtttacgtttgtaattttagtattttgggaggttaaggtaggtagattatttaaggttaggagttcgagattagtttgatcgatggtaaaattttatttttattaaaaatataaaaattagttgggtgtggtggtaggtatttgtaggtttagttattcgggaggttgaggtaggagaattatttgaatttgggaggcggaggttgtagtaagttaagattatgttattgtattttagtttgggcgataaagtaatattttattttaaataaataaataaataaatgtaaaaatataaaaattagttggatatggtggtgggtgtttgtaattttagttatttaggaagttaaggtaggagaattatttgaatttaggagatggaggttgtagtgagttgagatggttttattgtattttagtttggacgataaagtgtgattttattttaaaaatataaataaaaaaagtgggtaaaagtgggtttaagttagtaatttatattatttttgttggggggtggaagttagagaaggttttttggaggaagaggtttttaaattgagatataaggaacgcgtttgggttttttgggtttgggttgtgttttgggtagaagaaaatagtttatagtaaagttatgaagtagggagggtttttggaggaaattgaagatagtttggatggtaggaatttagagaagaagtaaaagaaatttattcggagtaggtggggttagaaggagttagggtaggtaggtattcgtcggttaaaggaggggtagtgggaattattggtgggttttaggtagggtataagatagagttggatttttttttatgttttatttatttattttttatttatttttttaataaatatttattgagtaagtatatgaaaatatgtttaattttattagttattagggaaatgtaaataaaattttagtgaaatattattatatatttattagagtgattggaaataaagattgaaaattacgagtgtagataaagacgtggattaattggaaaaggtacgttttgttgggaggtatataaattggtttaattattttggaaaattaataatttggttgggtgtagtggtttatgtttgtaattttagtattttgggtggtcgaggtaggtgga

SEQ ID NO: 468 - DNA, 6209 bp, Artificial Sequence
  chemically treated genomic DNA (Homo sapiens)
gtgtttgtaattttagttattcgggaggttgaggtaagagaatttttgaatttaggaggcggaggttgaagtgagttaagattatgttattgtattttagtttgggtaatagagtaagatttcgttttaaaaagtaaaaataaaaataaaaataaatatatagaaggtatagtaaaaatatggtttgattattttacgtcgttatcgttgcgtaggcggtttgttattggttgagttatcgttttgaggtggttgtatatataggcgtaaatatatatacgtttcgtttttatcgtttgtttttttggagaattataatatattcgtatttttgaaatttttacgtgttagttttttgggaatatggattttaagtgttttttagggtagaaagtagttattggagggtatagttgtgtgtggttggtgtggttggtacggtttttatttgtttagaagttgggtttttttttaggatttagagtttttggtggggatgagggatagagtttggagttaattagaatgtagagattcggttgtttttttaatttgttttttgtttttagggggattttttttattatttttcgattttttcgatttcgtagtgtttatttttttggttatgatgaggttcgagggtttgtgttggattttggtgattatttcgtcgttgttcgcgtttagttttgagattttttcgaagttatcgtttttgagttcgtcgattttggttttttgggtgagaaaggtttttagtcgttttttttgttgttcgttaagttttagtttttttagttttttttgtaggtttattaggtttgttttgtagagattttttagggtaggggttagttatttagggagattttatttggtcgtttgttatgtggtcgtggtgtatcggtttttaggaggatatagattggatttttgtatttgaggggtttatggtgtagaaggaaaggatttatgttgtgtatttttatagatatattaatgattagaatttagggcggtttttcgggaattgaggacgttgttttgattttgttttaataagtttagtagattttaggattttaaggataagttgtagtttaaaggatttaggaagttttcgtttttttttttttttttttttttttttttgagacggagtttttttttgttgtttaggttggaatgtagtggcgcgatttcggttttttgtaattttggtttttcgggtttaagagatttttttgttttagttttttaagtagttgagattataggttttcgttattatgttcggttaatttttgtatttttagtagagatagggtttcgttatgttggttaggttggtttttaatttttgatattgagtgattcgtttgttttagttttttaaagtgttgggattataggcgtgagttattgtacgcggtcgggagattttttttttaacgtacgagtttcggattatgtcgggaggagacgaggaagttgggatcgggtgaacggagttcgggttaagatgtttgtttttgtaggagatagaggaataagcgttttgagtagttttagagtatagaatgagaattaagagtagagggtagaaggtttagtataaaagttgtattaggtaggtacggtggtgtacgtttgtagttttagttatttgggaggttgagatacgagaattgtttgaattcgggagggggagattgtagtgaattgagattttgttattgtattttagtttgggtagtagagggaggttttgttttaaaataaaataaattaaaaaataaaaaaaataaaaaataagtatgattagtttgggtaataaagtgagatttatagtcgagtatagtggtttatgtttgtagttttagttatttaggaggttgagtttaggaggtcgagattgtagtgagttatgatcgtgataatgtattttagtttgggtgatagagtaagattttgtttttatataataaaaaatttttaataatttaaataagtaagtatattgtattttattgggtgatttaaggaatttttagaggaaatttcgatagtaagttatttttataaatgttttgatttagaattagattttggagtaatagataattaagcgtaatgtatataggaatttattgttgtgtataagtaatggaatgtaaattatgcgtataaattaaaattttttagtatttatgtttaaaaagaataggtgaatttattttatttatttagagatagggttttgttttattttttaagttggggtgtagcggtacgattatagtttattgtagtttttaatttttgtttttaagtgatttttttattttagtttttttagtagttaggattataggtgtgagttattatgtttggttttttttaattaattaatttttattattattattattttttgagataaagttttattttgtcgtttaggttggagtatagtggtgtgattttggtttattgtaatttttattttacgggtttaagtaatttttttgttttagttttcgaagtagttggaattataagtattcgttattacgtttagttaatttttgtatttttagtagagataaggtttcgttatgttggttaggttgtttttgaatttttgggtttaagttatttgtttattttggttttttaaagtgttgggattatagatataagttattgtatttggttgaaattaattttaataatatatttgatttaatttattaaaaatgttattatttttaacgtataattagtatgaaaaatgaatgaatgttttatattgttttcgttttaagtttttgaaatttataatggtattattgcgtttatgttttcgtgggtttgggtaatttttgttttatgtgttgtttgtagttaggggttatttaattaggtagtgtagttttaaatggttttttggaagaataggttatttttagaggttttaatttaggaaggagttaaagttaaggtggatagttagagaggggattgaagtagggaatgaaggcgtggattgttttttttatttggaaatttttaattttaaagttcgattattgttcgtttatagttggaagtggcgtaagttacggggtatataggttagaatcgaggcgatggcgttggagttggtgttgtaaagagttcgttggaaggtaggggtttgggtatcgttttttgggttggataaatattattttattttatttttattatcgttttcggaggtttaggtaggagggaatagatttataggggtgggggaatttgttcgaggtaataatatttgtttgaggttaggataatttttgtttattttagtgttttttatgaggggaaatagggttttagtaggtgtttattgaggagttgttgaataaggatttagaagaagtagaaatggcgagattttgggagtgggatagaaggtaaggaggggaatatgaatgaatgaatgaataatattaatgaataaatgaatatttattttttttgagatagttttgttttgtcgtttaggttggagtgtattggtacgattttagtttattgtaatttttgttttttgggtttaagcgatttttttgttttagttttttgagtagttgggattataggtgtgtattatcgcgtttagttaatttttttggtatttttaatagagacggggttttgttatgttggttaggttggttttgaattttgggttttaagtaatttatttattttggttttttaaagggttgggattataggcgtgagttattatatttagttatgaatgaatatttttgatggtagatttggaaggttttaagtattgtttaaaatattgaaaatgtattttggagttagttgattaatttattttaaatttattggtaatttaattgtggttattaaataaaataaaataaaattttggcgtttttatagttagtttttttttttgggggaattttttaagagatgggaattaaattttatacggaagagaaatgtgaagggcgagttttgtgtagagaatgaggaacgggttttcgtgtttggttgtgttcgtgttgatttgtatatattggtattaagagtttttatttgggttatagaaggtcgatttttaagcgggagaggttattagatatgttatagtttttgatatttggtttttgaggggttatatcgtaggtacggtattcggattttagttaagggtttcggggatcgttttgttttgtttcggtttgtagaacgggagtgtagagattattttggtatgattttattagtgtgtgtttttaatatttagttttttttttcgttttggagtagtgcgattttgttagtacgttattcggattttagtatattttttttttagatttttttatttaggtttttggtcgttttttatttttttaaagtttttgtattgggttagttttttataagggtttttcggtttatttattttagaatttgtatttttgtttttaggggttagtagggttttttgatttttacgttttttcgttttttatattttggtttttttgtttttttatatttttagttttagggattttatatattgggtatcgttataagtaggagatgtttttttagagatgtttattttgatattttgatttttttgggattttattttgatttttttagaattttaatatgagatttttaggattttttgttttgtttttttagaatttttataatatgatttttcgaggattttttaatttgatttttttagaattttttaatatgattttcgaggatttaatttgattttttttataatatgaattttttggaatttttgttttgattttattagattttttttagtagaaatttttttatttggaattcgttagaatttttattttgatttcgttaaagtttttttatgttttgatatttttaagatatttttttgtttttagatattttagaatttttattttgatttttttaaagtttttcgattttgatttttttagggttttttattttatcgtgattttttaggatattttttttttatattttgatttttttgggagttttttgtttttttttttttttttttttttttggttgtttatggatttttttattttatttttttttttaagggatttttttgttttattttggtattttaggtgttttttttattttatgttaattttattatttagggatttattttttaaaaggatcgtttttcgtttttttaagattttttagtttgttttttttatttaggtgttgtatttttaatttgtggtttaggtatttttttattttattttttttttataggaatttttttattttattttttttttatagggatttttttattttattttttttttatagggatttttttattttattttttttttatagggatttttttattttattttttttttatagggatttttttattttattttttttttatagggatttttttattttattttttttttatagggatttttttattttattttttttttatagggatttttttattttattttttttttataggaatttttttattttattttttttttatagggatttttttattttattttttttttaagggattcgttttattattattttaatatgtagaatattttttgtttattttttttttataggtttttatcgatatattttttttttttagggatttttttaattttattttataatttaggggttttgtattttattttttttttgtaaggatatttttttggtttgattttacgatttagggattttaaattttatttttttttaaagggatttttttttattttaattttattatttagggattttattattttttcgattttattatttagggatcgtttattttattttattatttagagatttattattattttgttatttagtgattttatgttttgtttttttttatagggattttttttggttttattttattattgagggatttttatttcgtttttttttattagggattttattttattttagttttattatttagggattttttattttatttttttttttttggagtttttttgtttagattttttttttaggggttgtttgatttttttata

SEQ ID NO: 469 - DNA, 6209 bp, Artificial Sequence
  chemically treated genomic DNA (Homo sapiens)
tgtggggaggttaggtagtttttgaggaggaaatttgggtaagggggttttagaggggagaggatggggtgaggggtttttgagtaatgagattgagatggggtagggtttttggtaggaaaagacggggtaagggttttttaataatgagatagggttaagggaggtttttgtgggaaaagatagggtatggagttattgagtagtagaatggtggtaggtttttgagtagtgaaatggggtgaacggtttttgaatagtgaaatcggggagatggtggggtttttgagtaatgagattggagtgaggggagatttttttgggaaaagatggggtttggaatttttaagtcgtgagattaggttaaggagatgtttttgtagagagaagatggggtgtagggtttttgaattgtgagatggggttgagggggtttttgggaggagaggatgtgtcggtgggggtttgtgggggaaggataggtaaggggtgttttgtatattgaaatgatagtgaagcgagttttttgggggagagatggggtgagggggtttttatgggggaaagatggggtgggagggtttttatgggggagagatggggtgagggggtttttatgggggagagatggggtgggagggtttttatgggggagagatggggtgagggggtttttatgggggagagatggggtgagggggtttttgtgggggagagatggggtgggagggtttttatgggggagagatggggtgggagggtttttatgggggagagatggggtgggagggtttttatgggggagagatggggtgggagggtttttatgggggagagatggggtgggagggtgtttgagttataggttgagagtgtagtatttgggtggggaggataggttgagaggttttgggggggcggggagcggtttttttggggaatgagtttttgagtaatgaggttggtatgggatgaagagggtatttagggtgttaaggtggggtaggggggttttttaggggagaggatggggtgaggaggtttatagataattagggaaaagggaagagaggggaggatagggggtttttagaagggttaggatgtgggagaggggtgttttagggggttacgatggggtgggagattttagaaaggttaggatcgggggattttgggggggttagggtgggagttttggggtatttgaggataagggggtgttttaggggtgttaggatatgggggggttttagcggggttaggatgggagttttagcgggttttagatggaggggtttttgttgggggaggtttagtgggattaggataggggttttagggggtttatgttgtggggggggttaggttgggttttcgggggttatgttgggggattttgggggggttaggttagggggttttcggggggttatgttgtgggggttttgggagggtagagtagggggttttaggggttttatgttggggttttgagggggttaggatggggttttagggaggttaagatgttaagatgggtatttttgagagggtattttttgtttgtggcggtgtttagtgtgtggagtttttgaagttggaagtgtgaggagatagggaagttagagtgtgaggaacgaggaggcgtggggattaggggattttgttggtttttgaaagtagaggtgtagattttgaagtgagtggatcggaaaatttttgtgaggggttgatttagtgtagaagttttgaggaggtggagggcgattagaggtttgggtgaagggatttgagaaaggggtatgttggggttcgggtggcgtgttggtagaatcgtattgttttaggacgagggaggggattgggtgttgggggtatatattggtggggttatgttagggtgatttttgtattttcgttttgtaggtcgaggtagggtagggcgattttcggggtttttggttggggttcgggtgtcgtgtttgcggtgtgattttttaagaattaggtgttagggattgtggtatgtttggtggtttttttcgtttgggggtcggttttttgtgatttagatgaagatttttgatgttaatgtgtgtaagttaatacgggtatagttagatacggggattcgttttttattttttgtatagaattcgttttttatatttttttttcgtgtggggtttgatttttattttttgaaggatttttttaggagaggaagttggttgtagggacgttaaggttttgttttgttttgtttaataattatagttgggttgttagtaaatttaagatggattagttagttgattttagaatgtatttttaatgttttgagtagtatttgagattttttaagtttgttattagaagtgtttatttatggttgggtgtggtggtttacgtttgtaattttagttttttgggaggttaaggtgggtggattatttgaggtttagagtttaagattaatttggttaatatggtaaaatttcgtttttattaaaaatgttaaaaaaattagttgagcgcggtgatgtatatttgtaattttagttatttaggaggttgaggtaggagaatcgtttggatttaggaggtagaggttgtagtgagttgagatcgtgttagtgtattttagtttgggcgatagagtaagattgttttaaaaaaaataaatatttatttatttattgatgttatttatttatttatttatgtttttttttttattttttgttttatttttagggtttcgttatttttgttttttttgggtttttgtttagtagttttttagtgagtatttattagggttttgtttttttttatgggggatattaagatgagtaggggttgttttgattttaggtaggtgttgttatttcgggtaggtttttttatttttgtgagtttgtttttttttgtttgggttttcggggacgatggtgagaatggaatgagatggtgtttgtttagtttaggaagcggtgtttaggtttttgttttttagcgagttttttgtagtattagttttagcgttatcgtttcggttttggtttgtgtgtttcgtggtttacgttatttttagttgtaggcgaatagtggtcgaattttgggattggaaatttttagatggaaggagtagtttacgtttttattttttgttttagttttttttttggttgtttattttggttttagtttttttttgaattgggatttttggaggtggtttgtttttttagagagttatttaaagttgtattgtttggttgagtagtttttggttataggtaatatataaaataagaattgtttaaatttacgagagtataggcgtaataatgttattgtagattttaaaggtttaagacggaaatagtgtgaaatatttatttattttttatattggttgtacgttgaaaatgataatatttttgatgggttaaattaaatgtgttattaaaattaattttagttaggtgtagtggtttatgtttgtaattttagtattttgggaggttaaggtgggtaggtggtttgaatttaggaatttaagagtagtttgattaatatggcgaaattttgtttttattaaaaatataaaaattagttgggcgtggtggcgggtgtttgtaattttagttatttcggaggttgaggtaggagaattgtttgaattcgtgaggtggaggttgtagtgagttaagattatattattgtattttagtttgggcgatagaatgagattttgttttagaaaataataataataataaaaattaattaattaaaaagagttagatatgatggtttatatttgtgattttagttattaggaaggttgaggtgggaggattatttgaggataggagttggaggttgtagtgagttgtaatcgtgtcgttgtattttagtttgggaggtagagtaggattttgtttttaaataaatgaagtgagtttatttgttttttttaaatatgggtattagaagattttaatttgtgcgtatggtttatattttattgtttgtgtatagtaatgggtttttgtgtgtattgcgtttagttgtttgttattttaggatttggttttgagttaaggtatttgtgaaaatagtttattgtcgaaattttttttgaagattttttgaattatttaataaagtgtaatgtatttgtttgtttaaattgttagaaattttttattgtgtagaaataaggttttgttttgttatttaggttggagtatattgttacgattatggtttattgtagtttcgattttttgggtttagttttttgagtaattagaattataggtatgagttattgtgttcggttataggttttattttgttgtttaggttggttatgtttattttttgttttttttgttttttggtttgttttgttttgagatagagtttttttttgttgtttaggttggagtgtagtggtaagattttagtttattgtaatttttttttttcgggtttaagtagttttcgtgttttagttttttaagtagttgggattgtaaacgtgtattatcgtgtttatttgatgtagtttttgtgttgagttttttgttttttatttttggtttttattttgtgttttgaggttgtttagaacgtttgtttttttattttttgtaaagatagatattttggttcgggtttcgtttattcgattttagttttttcgttttttttcgatatggttcggagttcgtgcgttaggaaggaggtttttcggtcgcgtgtaatggtttacgtttataattttagtattttgagaggttgaggtaggcggattatttaatgttaggagttggagattagtttgattaatatggcgaaattttgtttttattgaaaatataaaaattagtcgggtatggtggcgggagtttgtaattttagttatttgggaggttgaggtaggagaattttttgaattcgggaggttaaggttgtagggagtcgagatcgcgttattgtattttagtttgagtaatagagggagatttcgttttaaaaaaaaaagaaaaagaaaagaaaaagacggaggttttttgggttttttgagttgtagtttatttttgaggttttgaggtttgttagatttgttgagataggattaaggtagcgtttttagttttcggggagtcgttttggattttggttattggtgtgtttatgggggtatatagtatggattttttttttttatattatgaattttttaagtgtaggaatttagtttgtgtttttttgggggtcgatgtattacggttatatagtaaacggttagatggagtttttttaggtagttaatttttattttggggggtttttgtagggtaaatttggtggatttgtagaagaagttggaggagttggaatttgacgagtagtagaagaagcggttggaagttttttttatttagaaagttaaggtcggcgaatttaaagacgatgatttcgaaaggattttagagttgggcgcgggtaacggcggggtggttattaaagtttagtatagattttcgggttttattatggttaggaaggtgagtattgcggggtcggggaggtcggggagtggtggggaaggtttttttggaaataggaggtaggttgggaaggtagtcgggtttttgtattttgattagttttaggttttgttttttatttttattagggattttaggttttgagaaagggtttagtttttgggtagatgggagtcgtgttagttatattagttatatatagttgtgttttttagtgattattttttgttttggagggtatttgaaatttatatttttagaaagttagtacgtgggggttttagaaatgcgagtgtgttatggttttttagagaaataagcgatgaagacgaagcgtgtgtgtgtttgcgtttatgtgtatagttattttagggcgatggtttagttagtgatagatcgtttacgtagcggtggcgacgtaagatgattaggttatgtttttgttgtgttttttgtatgtttatttttatttttatttttattttttgagacggggttttgttttgttgtttaggttggagtgtagtggtatgattttggtttattttaattttcgttttttgggtttaaggatttttttgttttagtttttcgagtagttgggattataggtat

SEQ ID NO: 470 - DNA, 6224 bp, Artificial Sequence
  chemically treated genomic DNA (Homo sapiens)
ggttgaagtgtagtggtataattttggtttattgtaattttcgtttttcgggtttaagtaatttttttgttttagttttttaagtagttgggattataggtatgtgttattacgtttagttaatttttgtatttttagtggaatgaggttttattatgttggttaggttggttttaattttttgattttatggtttattcgttttagttttttaaagtgttgggattataggcgtgagttattgtgtttggttataaattgaaatttttatgtttaatgttatgatatttaatattgcgtttaattaaaatgtttacgtatgtagtttgagatttttgtatagaaggtgtttagggttatgatttgggaagattaatttgttattagtggaggggtggataaaaattaatgtttattgggattaagatgagtagtttttgtgttagaaattttatttttttaatttttatagttttgtgaggtaggtgaaattatttttattttatggatgaggaaattgaagtttaattggtttaataatatgttaaaggttatttaattgatgaatagtggagttgagatgcggaagattgaagatttatagtttggatttttaattaaatattatatggtttcgttatagaagaaagttagaaagtttttaaaaataaaatgtagagttaagtgttattttggatataagggattgggggacgggaagaggtaagaatttttaggtttttttttggttgttaatagttagtgggttttggtagtgggagttgggttattagaggtggcgtttgaagtggggtaggtataaaatgggttttcgggtaagtatttgtttaggtgatggttaaagttatagaaaaaaggtgttttgatggagtggtggttgagtgtggggagagatgagtaggggattaagtttggagtttgggtagtttacgattggatattaggagaagaaaagaagttagtggaggagatattgaggttagggatggggagggtattgtggaaggttgggttttatttggcgtttcggggagttggtaggggggtatattaaggagtttaagttgttttattagtaaatgtttttgtttttgattaggggtaatgaaataaagggattcggttgagtaattggtttttggtttttgttagtttaggaagttagtatttattttgttttatattttatgtgttatttttagttttcgaagtaaaattagttgagattagtatttgttagatttgaatgcgtagttttaagttttggggggtgggggtgggggtgagttaaggaggtttggtttttttagggtaagggtaggaaggatagtagggaggtttattttgagttcggtaggtagtttttttttttttttttttttagtaaagaaaggtagataaaaacgtgtttttataaatagttttagttttagttgatttgtaaatttagtgggttttttgtgttaatgatattatttttttttttatggtaattttcgacgatattaaaattgttaagtaacgttggagtagttcggcgttttaaacgagtaggtcgatgtttgaggatttaatggagaaattttaaagtgagtcggggcgcgcggtggaggaggggcgcgtcgtagtcggggtcgttgggttttgatgggcgggagcggggtggagcggtttcgtttgttaggtagttttgggcgcggggttcggcggttatattttggagatagttacggtttaggtaggtgggggagggcgttgttttcgttttgatgtgttaggagtcgttagtagttatttaggtgattaagtcggtttattagtattgagttatcgttcgtttcgagttgtttttgttttttttttgtatttgattattttgggagttggaaatttggagttgtatttgagtttcgttttttttagtttttttttttttattttgggttttaggaagatgggatttgttgtgagtttgttgttattttttaaagatatggaagacgttgtgggggttagaagtgttcggggggttgtggtagtaggtagagtgtaatagtagatatggtggttaggttgtttgtgtgtgttttttggaggtgttgggatagaagggtagttttgttcgagttgattggagttttttcgggttggttttgaatttattttttacggggatgtttcggtaaaggagtggtttttggggtcggagtggtatttggagagcgaggttggattggtttaggttggtttgggtaggtaggtggttttgtgttgggtgtggatttacgtgtgtgtgagtgcgagagtgtgtaagttagtgtgtgtgtcgtttttttgttggggatagtagttgggtttagtagagagttggttgggggtttgataggagtttattttaattgatgttgggtgggcgtaggttttgagatgggcgttagggagaggggacgttagatatacggtttgagtagggtgaggagtagttgttagtttcggtaggtttaggttttgtttgggtgtataggatagagatatagtaagatgtttaggtaggaagtcgttcggaggggttggttagggtgagagtttattattggggggttggatagtttattagttgtttttttattttggtaggtttgggtattaaggaaatagttttttattaagaattatgttatttttttatgtagggttagttagtatttatgtgcgtttttgttgagtttatagggatatatttagtgagaagggtgttggttagggtacggtttttttatgattaggatttagcgggtgttatttttaagtttttggtttttatagggtatgttttagtgtgtgttaggaggaggggggaggtttttttttttttatatagttggtagttttgcgggtattagtgagtaagttgttagagggagggaggttgtgtgtttatagtggtaggataatattaattaggagtttttaagagaagaggttgggtgagaaaagtattgaggttttttttttttttttttttttttttttttttttattttgtttgaagggagtgtcgttttttgggttagagataagtattagtttgtagtggagaacgtaggatttcgttgtttagaaggagtagttacggtaaggtttttattgtcgttgcgtgtttcggatttttgggttagggacgggggtgttaaggtgtttaggttgttttttatttgggatagggaggttaattttatagttgtgggtttttgggttaaggggttttattttttattcggtttgttattttttttttagattgattgtgaaatagtttaattttagttggtttttggttttttagttagagggagaggtgtttgtttttattttttttgttttagttgggttaagttagtgttatcgggatatttttatttaaggttttttttattttattatttttgggatattttttttgtgtatttattttataaatatttagggagtattgttgggttttaggttttaagttatattttttggttgggtttgatttggtatagattttgattttgaaatttagtattagggtaggtttagggagttgtttggttaagtacggttattttttataggttttggtttttttatttttgttgtagggtggatgatttggttagttttggggatatcgggtttagtgagttcgggtttataaagtattgggttttatcgggaagtaaggttaacgttttgtggtttttagttattttttttttggtattgtatattaagaggtttgtgtcgttttgtttggggtttttttgaggttggttttggtgggaattgggttgtaggaggagaggatgagtttaggagtcgtgtggtttttaggtttggtgggtttgggatttagttttacgggagtttatttagttggggttgaggtttttggggtaagtaaggagttttttttgtaggtaggtttttttggcggttgttttggtttaggtttggaggtggtatttgggagttttagtgatagagcgtttggttagggaagggtcggtattagaggtaagtttttttgggagtagttgatttggatggaagttttgtgtatttgagagggggagtgtggggattgtacggtttttttagtgtttcgaggataaattgatgttttgtgagtgttttgggttttttcggatttgttagatatagggagggtgtagtgggtggggtttttagttaaggaaagttcgttttgtgtataatttttaaggatgattaaaaagttttttgttttggaggagtatatgtgtttagagttaggaggaatttataagtgttttttatgttagtgaatttttatatttggtttttggatgaggagaatgatttagttgtgggggtattttatgttgttttataaaaggtgattttgtgtttaggagttttttatgtatgtagagttgagtaggggttgttgtttagttggggttagaggggcggaggttgtcgagtattaggtagatagtaggttagtagcgggtagtaggttgggttaggagggagtagagagtaggggttagggtaggttgagtaggaaaggaaaaggttgtttggggttttgagggtttagggaggattttagatagttggtttttttatgttagttcgtttttgtgggagaggttttttgcgtaggtgattgggtagggaagaggttaagatattgaaagattgaattttttatttaaatggtttagagatgtttatcgtatatagtgttttgggtgtagaaggtaggaaggatttatgggaggttgttttgtggattgaagtagaaagtttttttcgtaagatgcgttcgtcgttttgagtaggaaggtttaggttgcggaagtagtgtttgagatttgagtagtaggaaggatattagtaaagtttattaggaggtatttggtcgtttgtatttatcgggttttaaggagagagtttatttttgggagtttttttggtagaaagaggtggattagttagtaggttggggaggagtattgtaaatggaagtttttgagggtagaatgagttttgaatttgttgaagttaaggttggtttttttgtttagggcgagtagtttgtttgggtttgggaagttgtttttttttgaggaggtgttttttattttattagagtttagttttaggggttaggaagggttaaagcgagaagagtgagatgtgagataaaggggatcgtgtttttttttgggagggtgtggggtttaggtagtattttgttttggcgtataggttgttaagtagatgatagttatggtttgattattaggtgtaagtattggtggtaggaagagggggtggataaagtaggatagagtttttgttttggggatgtttatagttttgtagtagagtagtggaaaggaaagttgagttgagcgtggggttaatcgcgttagaaataagcggagttataaagttattattagtttttaggtggtttcgtttttttgttaattttgggtttaatttatcgttgaagttggtagttatgatttatttagtttagataatttataaatttatattaatattgggtaacggtttttaatatagaattttataaagatggataaaaaagataagttgagaatgataaataaaggaagaagtagtttttatttgtagttgtaggaggaggtgaaggttcggggagatagattagggcgggaagaggtaggatggtggttggttaatatgaagttagtagtatgagttttaggttcggtgttgtttttttttggtgattcgggtaagttattttatgtttttgggttttaatttttttttttgtttaatagagataattatagtatttatgagttagggttgttgagaggattaaataagataataagtgaatgttttgaatggtatgattggtatatacgtatatgtttagtaagagataattattattatcgtgatgataattggtgttagaggaataaagtgttaggagagattatattttgttcgggggaattaggaaaggttttacggaggaggtgattttgaaagaatttttttttgaggagaaataaaagtttttagaatgtttaggaaagttgggaagaaataataatgttaggtttattttttttttaaatagtatattgtttgtttattga

SEQ ID NO: 471 - DNA, 6224 bp, Artificial Sequence
  chemically treated genomic DNA (Homo sapiens)
ttagtggataaataatatgttatttgggaaaaaaatagatttggtattattgtttttttttagtttttttgggtattttgagagtttttgtttttttttagaggagggtttttttaaagttatttttttcgtgaagttttttttgattttttcgaataaggtatggttttttttggtattttgtttttttgatattagttattattacggtgataatagttattttttgttgaatatgtacgtatgtgttagttatgttatttagagtatttatttattattttatttaatttttttaataattttaatttataggtattataattatttttgttggataggagaggaaattgagatttagagatatgaagtaatttgttcgagttattaggaagaggtagtatcgggtttgaggtttatgttgttgattttatgttaattaattattattttgttttttttcgttttggtttattttttcgagtttttatttttttttgtaattgtagatagaagttgtttttttttttgtttgttatttttaatttattttttttgtttatttttataaagttttatgttaagaatcgttgtttagtattggtgtaaatttataaattatttgggttggatgggttatggttgttaattttagcgatgagttggatttagagttggtaaaaggacgaagttatttgggggttgatggtggttttgtggtttcgtttgtttttggcgcggttggttttacgtttagtttagtttttttttttattgttttgttgtagggttatgagtatttttagggtaagagttttgttttgttttgtttattttttttttttgttattagtgtttgtatttagtagttaggttatggttgttatttgtttggtagtttgtgcgttagaataaggtgttgtttggattttatatttttttaggaagagatacggttttttttattttatattttatttttttcgttttagttttttttggtttttagggttgagttttggtggggtggagggtatttttttagaaggggataattttttaggtttaggtagattgttcgttttgggtaggagggttagttttggttttagtaagtttagaatttattttgtttttagaagtttttatttgtaatgtttttttttaatttgttggttagtttatttttttttattaaggaggtttttagaaataagttttttttttgaggttcggtaggtgtaggcggttagatgttttttgatgagttttattggtgttttttttgttgtttaggttttaggtattgttttcgtagtttgggtttttttgtttagggcgacgagcgtattttacgggaaggattttttgttttagtttataggatagttttttatgagttttttttgttttttgtatttaggatattgtgtgcggtgggtatttttgggttatttgggtgaggaatttaattttttagtgttttagttttttttttgtttagttatttacgtagagggttttttttatagaagcgggttggtataagaaggttagttgtttggagttttttttgagtttttaggattttaggtagttttttttttttttgtttagtttgttttggtttttattttttgtttttttttggtttaatttgttgttcgttgttggtttgttgtttatttagtgttcgatagttttcgtttttttgattttaattgggtagtagtttttgtttagttttgtatgtatggaagatttttaggtatagagttattttttgtgaggtagtatgagatatttttatagttgggttattttttttatttaggagttaggtgtgggaatttattggtatgagagatatttatgggttttttttgattttgagtatatgtgtttttttagggtaggggattttttggttatttttaggagttgtgtatagagcgggttttttttggttggagattttatttattgtattttttttgtgtttggtaagttcgggagggtttagagtatttataaagtattagtttgttttcggggtattggagaggtcgtgtagtttttatatttttttttttaggtgtatagagtttttatttaaattagttgtttttagaagggtttgtttttggtgtcgatttttttttgattaggcgttttgttattagggtttttaggtgttatttttaagtttgggttaggataatcgttagggaagtttgtttgtagaggggattttttgtttgttttaaaggttttaattttagttagatgagttttcgtggggttgagttttaggtttattaggtttgggggttatacggtttttaagtttattttttttttttgtagtttagtttttattagaattagttttaggaagattttaggtagaacggtataaattttttggtgtataatgttagggaaaggataattggagattataagacgttagttttgtttttcggtggggtttagtgttttataaattcgagtttattgggttcgatgtttttaaagttgattaggttatttattttgtagtaggggtggggagattaaggtttgtgaggagtgatcgtgtttggttaggtagttttttgaatttgttttgatgttgagttttagagttagaatttgtgttaggttaaatttagttaaagggtgtgatttggagtttgggatttagtagtgttttttaaatatttgtggaatgaatatataagggaaatgttttagaggtggtaaagtgagaggggttttggataggggtgtttcggtggtattggtttggtttagttggggtaggaagagtagaaataagtatttttttttttagttagggagttagagattagttgggattggattgttttataattaatttggaaagaaggtggtaggtcgggtggggagtggagttttttgatttaggaatttatagttgtggagttagtttttttgttttaggtgggaggtagtttggatattttggtattttcgtttttagtttaggaattcggagtacgtagcggtagtggggattttatcgtggttgttttttttgggtagcggggttttgcgttttttattgtaggttggtgtttgtttttagtttaggaagcggtattttttttaggtaaaatagaaaaaaaaaaaaaaaaaaaaaggaaaagaaaattttagtgttttttttatttagtttttttttttgaaggtttttggttggtattgttttgttattgtgggtatatagtttttttttttttggtagtttatttattggtgttcgtaaagttgttagttgtgtgggggagaagggattttttttttttttttgatatatattggggtatgttttgtggggattaggggtttgagggtggtattcgttgggttttgattatggggaagtcgtattttggttagtattttttttattgaatgtgtttttgtgagtttagtagagacgtatatgggtgttgattggttttgtataagagagtgatatggtttttggtaggaagttgtttttttggtatttaggtttgttagaatgaaggggtagttgatgggttgtttagttttttagtgatgggtttttattttggttagttttttcggacggttttttatttgggtattttgttgtgtttttgttttgtgtatttagatagggtttgggtttgtcggggttggtagttgttttttattttgtttaggtcgtgtgtttggcgttttttttttttgacgtttattttagggtttgcgtttatttagtattagttaggataaatttttgttaagtttttagttagttttttgttggatttagttgttgtttttagtagggggacggtatatatattggtttatatattttcgtatttatatatacgtgggtttatatttaatatagagttatttatttgtttaggttagtttaagttaatttagtttcgttttttaaatgttatttcgattttagaagttatttttttatcgaaatattttcgtgggagatgagtttagagttagttcgggaggattttagttagttcggataagattgtttttttgttttaatatttttagaggatatatataggtagtttgattattatatttgttattgtattttgtttgttgttatagtttttcgggtatttttggtttttatagcgttttttatatttttagggggtggtagtagatttatagtaagttttatttttttggagtttaaggtagggaggggagagttagaaggggcgggatttaggtgtagttttaagtttttagtttttaaaataattagatgtaaaggagaagtaagaatagttcgaggcgggcggtgatttagtgttagtgggtcggtttagttatttggatggttgttggcggtttttggtatattaggacgggagtagcgtttttttttatttgtttggatcgtggttgtttttagagtgtggtcgtcgagtttcgcgtttagggttgtttggtaggcgaggtcgttttatttcgttttcgtttattagggtttagcggtttcggttgcggcgcgttttttttttatcgcgcgtttcggtttattttgggatttttttattaaatttttaggtatcgatttgttcgtttggggcgtcgagttgttttaacgttgtttggtaattttgatatcgtcgggggttgttatggggaggaaggtgatgttattgatataaaaaatttattgaatttataaattagttggggttggagttatttataaaaatacgtttttatttgtttttttttgttgaaggggaggaggaggaagggttgtttgtcgggtttagggtgagtttttttgttgttttttttatttttgttttagagaagttagatttttttggtttatttttatttttattttttagaatttggagttgcgtatttagatttggtaggtgttggttttagttggttttgtttcgaaggttgagagtggtatatgggatgtaaggtagggtgggtgttggttttttgggttggtagggattagaaattagttatttaatcgggtttttttattttattgtttttggttagaaatagaggtatttgttggtgaggtagtttgagttttttgatgtgtttttttgttagtttttcggagcgttaggtggagtttagttttttatagtgttttttttatttttagttttagtgttttttttattggttttttttttttttttagtgtttaatcgtgggttgtttaagttttaggtttggttttttgtttatttttttttatatttagttattattttattaaaatattttttttttgtggttttgattattatttgggtaaatgtttgttcgaaaatttattttgtgtttgttttattttaggcgttatttttgatggtttagtttttattgttaggatttattagttattgatagttagagggaagtttgggagtttttgttttttttcgttttttagttttttatatttaaggtggtatttggttttatattttatttttgaaaattttttaatttttttttgtagcgaagttatgtggtgtttggttaaaagtttaggttgtgagtttttagtttttcgtattttagttttattgtttattagttgagtgatttttggtatgttattgaattaattgaattttaatttttttatttataaaatggggatgattttatttgttttatagggttgtggaaattaaaggaataaagtttttggtatagagattgtttattttgattttaataaatattagtttttatttatttttttattgatggtagattaatttttttaaattatgattttaggtattttttgtgtaaaggttttaagttgtatgcgtagatattttgattgaacgtagtgttagatgttatggtattaaatataagaattttaatttgtggttaggtatagtggtttacgtttgtaattttagtattttgagaggttgaggcgggtggattatgaggttaagagattgagattagtttggttaatatggtgaaattttattttattaaaaatataaaaattagttgggcgtggtggtatatgtttgtaattttagttatttgggaggttgaggtaggagaattgtttgaattcgggaggcggaggttgtagtgagttaagattgtgttattgtattttagtt

SEQ ID NO: 472 - DNA, 6225 bp, Artificial Sequence
  chemically treated genomic DNA (Homo sapiens)
ttgagagaaaaattatgttttaaagatatggttattaattataatgggtttagatattatataatagaaataaggaatatttatattagttagattaaaaggaggtgattagtattttagaataaatagggttttttttatttattatagagatttggtagtattatttagtatttttttgttttaagaatttatttaaatttttgttttttttattaggttttaaatatattaatatttgaaattgtagttggtaaaggatttagataattaattttttatttttaaagttaattttaaatgtttttatatgataatttaaatgttagaaattaaaaataaatttataaggtgttgatttgtaaagtgttttaggtaatagttattaattataaggtatatttaaagttgtaaagaaaaattaaaaagttaagttatagtttgatatatagttaaattttttagaatattaagaaaataaatttttatttttttttgatttttttttttttttttttttttttttagttttattttttttttttatgattttttttttatttatttttttttttttgtttttttttttttttttggtatttttttttttttttagttttatttttaagattttttataaaaaatttttgtttattaaagttattgtatagaaaaaattagaataatagaaggatttattgagttattatattagtaatttatgaagagaaaattggtgaatattttattttttagttttaaaggggaaattatattgttttaaatttgtatattgttagtttttaattgtttttgtttaggaaatgatttagaattatttaattagaataagaaaatggtattatttttttattgggattttaatttgatattaaaattagtatattaattttaaaaattatttagtatttatgtgttattaagatattaatatttgttaagatataattgttatgagttagatatttttataattagaattttaaattttaaaatttttgttttattttagaattgagaaaattttgttttagtattatattatagttttaagagtataaaaatgtaaagacgaaattagaattatagagaattggtgaaaaagaaagtaaaattaattaaaatgaatgtttttagattttttttttttttatataatgttatgttttttcgtaattaaataatttttaataagattataaaattttttaggaataatttggttaaaaaataaaattaatattatattagtattaaaggcgttattatatatggttttttattgagggtggaatgtaattttattatagttaagattagtgtttttgttttaattggattatagttagatatattttaatatttggtatttattttattaataaagaaaatttatttaatttgaattattatttttgaatttatttttattttgatttttatttttttattatttgagttgattttagatataggataagttagaatttattaggttataaaattaataaaatatatatatttaaaataaaatagttttatgttataaaggaaggttttttaaaattaaatattttatatttgaaatattaattttatatttatattttttttaatgatgttggaagggaataatatagttttgtgttaatatatatttttgattgttgttttattgttatggatatatattgataaaaatatataaatatataagaaattatttgttggtattttaatttgtaaatagttttatttttggttaagagagtagggttgaaaaatagtatttaaaacggtttaaaaagtaataatttagggaaaatagtttttttttaagggtattataaaatgttaaatattttaatagtaatatttttaaatgttgaaaataaaataataaagatatttatatattagggataaattttagttatagtatttttagatatttattgtattttagtaaaaaatatgaataaaattaaaagattaataacgtatttaatataaattattgtttaaataatgtaatttaattttaaatatttttttgtagaaaagtttaataaggttttttttcgtaaatattgttaatatagtagagtattatatggaattttatatgaacgatgagatagtaagtaaaattgaatgaattgaatttttaaaatttttataaaagtatttttaagtttattatagattgtatattatatttattaatttatgtaaattttttttttaaaaaatgtttagggttgataggtgcggtaaattattatggtatatatgttataaatatattatgtaataaatttgtacgttttgtatatttatttcggaatttaaaattaaatttaaaaaagaaaaaaaatgttaattttatatatatataaaaatgtttggtatttggtaaagtaatgtagttaataagatatttttatatatgaagttttttgttataatagaaataaaagaatttaaatatatatttgaagaggtgaagtatttatatttatattatgattataagtttttagttttgttttataaagaatatttttgatttaaatagaaagattttaatagaaattttaatttattaatatagttgtaatattaaggtttttttttaaagttaatagtttttttttagataagtagagaggtagagaaagcgagtaagtaatcgagagaaatatatacgagcgagaataggtaggaaggagaatattaaatttatttgatttttaaaaagtattgatttatattgttttttttttttaaataaataggatttatttttaataaaaatttatatttatataaaaaataaattttgttggatatgtagtgttttaaaagtttttgaatatcgtagataatagtagttgtgatttgtattttataatatgttaaaaatttgatttatatggttgtagtgtgtagtgtgggcgaggttacgttagattaaggtgtgtatagaggttaggtattggttacgggagttatttttttaatttacgtgtttagagttgtaaatggagtagaattttatttagaaaaggagttgaattaagttgtatttttaaattattgtttacgttttaaaggtaaaaattaaattatattttttagattttttatttatttttgtttgtttgaataatttaagacgtagtgtaagtttgggagaaaagaaattttaatgtggagttaatagataagtgttttataaattaaaaaaatatttttttaaatttatgttttatgaggtttgtgttattttataagttagataaaatttatataaataatgatttgaagaatttataaagttaaaagaaggtaatagttataataaaatttgtaatattaagtttaatttgaaatgaataaaattattgaatttgattaatattaatgatagtgtaatgtttgaatgttatggtaaagttgttaaatatatagtgaggaaagttaagttttaaaaattataaataattttaaaatattgattaaaattgtaattttgtttaaatgaatatagagttttttattatataattatttaaaatatgttaaatatttagatggttattttttttaaaacgataatttagatattattatttgattgatgtaaagtttaaattaataagtttgttttgttgttttaagaaaatattaaaataaatttaaaattaaatattttaaaaataatttgtttattaggagaatggtgtgaattcgggaggcggagtttgtagtgagttgagattgtattattgtattttagtttgggtaatagagtgagatttcgttttaaaaaaaaaaaaatgtttattattatatttttaaaattatattttaagttttgggatatatgtgtagaatatgtaggtttgttatataggtatataagtgttatgttggttttttgtatttattaatttgttatttatattaggtattttttttaatgttattttttttttagttttttatttcgataggttttagtgtgtgatgtttttttttttgtgtttatgtatttttattgtttaatttttatttatgagaatatgcggtgtttggttttttgtttttgtgttagtttgttgagaatgatggtttttagttttatttatggttttgtaaaggatatgagtttatttttttttatggttgtatagtattttacggtatatatgtgttatattttttttatttagtttattattgaggggaatttgggttggttttaagtttttgttattgtgaatagtgtcgtaataaatatatgtgtgtatgtgtttttatagtagtatgatttataattttttgggtatatatttagtaattggattgttgggttaaatggtatttttagttttagatttttggggaattattatattgttttttataatggttgaattaatttatatttttattaatagtgtaaaagtatttttatttttttatattttttttagtattgttgttttttgattttttaatgatcgttattttaattggtatgagatggtattttattgtgttttttgatttgtatttttttaatgattagtgatgatgagtttttttttatacgtttgttggttatataaatgttttattttgaagattgtttgtttatattttttatttattttttgatggggttgttggttttttttttgtaaatttgtttaagttttttgtagattttggatattagtttttttttagatgaatagattgtaaaaatttttttttattttgtaggttgtttgtttattttgacgagagttttttttgttgtgtagaagttttttggtttaattagattttatttgttagttttggtttttgttgttattgtttttggtgttttagttacgaagtttttgtttatatttgtgttttgaatggtattgtttaggtttttttttagggtttttatggttttacgttttaggtgtatgtttttaatttattttgaattaatttttatatgaggtgtaaggaaggggtttagttttagttttttgtatatggttatttaatttttttaatattatttattaaataggaaattttttttttattgtttgtttttgttaggtttgttaaagattagatggttgtagatgggtggagttatttttgaggtttttgttttgttttattggtttatatgtttgttttgatattagtattatgttgttttggttattgtagttttgtagtatagtttgaagttaggtagcgtgatgtttttagttttgttttttttggttaggattgttttggttatataggtttttttttggttttatataaagtttaaagtagatttttttaattttgtgaagaaagttaatggtagtttgatggggatggtattgaatttttaaattattttgggtagtatagttatttttaagatattgattttttttatttatgagtatggaatgtttttttatttgtttgtgtttttttttatttttttgagtagtggtttgtagttttttttgaagaggttttttatattttttgtgagttgtatttttaggtattttatttttttagtagtagttgtgaatgggagtttatttatgatttggttttttttgtttgttattggtgtataggaatgtttgtgatttttgtatattgattttgtattttgagattttgttgaagttgttattagtttaaggagttttggggttgagatgatggggttttttaaatatataattatgttatttgtaaatagagataatttgattttttttttttttatttgaataatttttattttttttttttgtttgattggtttggttagaatttttaatattatgttgaataggaatggtgagagagggtatttttgtgttgtgttggtttttaaagggaatgtttttagtttttgtttatttagtatgatattggttgtgggtttgttataaatagtttttatgatttttgatatgtattttatcgatatttagtttattgtttttagtttttagtataaaggggtattgatttttattaaaggttttttttgtatttattgagatatttacgtggtttttgttattggttttgtttatgtgatggattacgggtattgatttttgtatgttgaattatttttgtattttagggatgaagttgatt

SEQ ID NO: 473 - DNA, 6225 bp, Artificial Sequence
  chemically treated genomic DNA (Homo sapiens)
agttagttttatttttggaatgtaaggatgatttaatatatagaaattaatattcgtaatttattatataaatagaattaatgataaaaattacgtgagtattttaatagatgtagaaaaggtttttgataaaagttaatatttttttatgttaaaaattaaaaataataaattaggtatcgatggaatgtatgttaaaaattataagagttatttatgataaatttatagttaatattatattgaatgggtaaaagttggaagtattttttttgaaaattagtataatataaggatgtttttttttattatttttatttaatatagtattggaggttttggttaggttaattaggtaagagaaagaaataaaggttatttaaataggaagagaggaagttaaattgtttttgtttgtagatgatatgattgtatatttagaaaattttattattttagttttaaaattttttaagttgatagtaattttagtaaagttttaggatataaaattagtatgtaaaaattataagtatttttatatattaataatagataaagagagttaaattatgagtgaatttttatttataattgttattaagagaataaaatatttaggaatataatttataagggatgtgaaggatttttttaaggagaattataaattattgtttagggaaataagagaggatataaataaatggaagaatattttatgtttatggataggaagaattaatattttgaaaatggttatattgtttaaagtaatttagagatttaatgttatttttattaggttattattgattttttttatagaattagaaaaatttattttaaattttatgtggaattaaaaaagagtttgtgtagttaagataattttaattaaaaggaataaagttggaggtattacgttatttgattttaaattatattataagattatagtaattaaaatagtatggtattggtattaaaatagatatatagattaatggaatagaatagaggttttagaaataattttatttatttataattatttgatttttgataaatttgataaaaataagtaatggggaaaggattttttatttaataaatggtgttgggaaaattggatagttatatgtagaaaattgaaattggattttttttttatattttatataaaaattaatttaagatggattaaagatatatatttaaaacgtaaagttataaaaattttagaaagaaatttaggtaatattatttaggatatagatatgggtaaagatttcgtgattaaaatattaaaagtaatggtaataaaagttaaaattgataaatgggatttaattaaattaaagagtttttgtatagtaaaagaaattttcgttagagtaaataggtaatttatagaatgggagaaaatttttgtaatttatttatttgagaaagggttaatatttagaatttataaggaatttaaataaatttataagaaaaaaattaataattttattaaaaagtgagtgaaggatatgaatagatagtttttaaaataagatatttatgtggttaataaacgtatgaaaaaaagtttattattattggttattagagaaatgtaaattaaaaagtataatgagatattattttatgttagttagaatggcgattattaaaaagttaggaaataatagtgttggagaggatgtgaagaaataagaatgtttttatattattggtgggagtgtaaattagtttaattattgtggaagatagtgtggtgattttttaaggatttagaattagaaatattatttgatttagtaatttaattattgggtatatatttaaaggattataaattatgttattataaagatatatgtatatatatgtttattgcggtattgtttataatagtaaagatttggaattaatttaaattttttttaatgatagattggataaagaaaatgtggtatatatatatcgtggaatattatgtagttataagaaaggatgagtttatgttttttgtagggttatggatgaagttggaaattattatttttagtaaattaatataagaatagaaaattaaatatcgtatgtttttataggtggaaattgaataatgagaatatatggatatagggaggagaatattatatattagggtttgtcggggtggggggttaagggagggataatattaggagaaatatttaatgtaaatgataggttggtgggtgtaggaaattagtatggtatttgtatatttatgtaataaatttgtatattttgtatatgtattttagaatttaaagtataattttaaaaatgtaataatgaatatttttttttttttgagacggagttttattttgttgtttaggttggagtgtagtggtgtaattttagtttattgtaagtttcgtttttcgggtttatattatttttttaatgaatagattgtttttagagtatttgattttgagtttattttaatatttttttaaaataataaaataaatttattagtttgggttttatattagttaagtaataatgtttgaattgtcgttttagaaaagataattatttaaatgtttggtatattttagataattatatgatgaagaattttatatttatttaaataaaattatagttttagttaatattttaaaattgtttatgatttttaaaatttaattttttttattgtatatttaataattttgttatagtatttaggtattatattgttattggtattagttaagtttagtgattttatttattttaaattgaatttggtgttataagttttattatagttattatttttttttagttttataagttttttaggttattatttatataaattttatttggtttgtaaggtaatataaattttataaaatataaatttaaaaaaatgtttttttaatttgtgaaatatttatttattagttttatattaaaatttttttttttttaaatttatattacgttttgaattatttagataagtaaagataagtaaggagtttaaggaatgtggtttggtttttatttttaaaacgtggatagtaatttggaagtgtagtttagtttaattttttttttaaataaaattttgttttatttgtaattttgaatacgtaaattgaaggggtggttttcgtggttagtgtttgatttttgtgtatattttggtttggcgtgatttcgtttatattgtatattgtagttatataaattagatttttgatatgttataaaatgtaagttatagttgttgttgtttgcggtatttaaaaatttttgaaatattgtatgtttaataaaatttattttttgtgtgaatgtaagtttttattgagggtaagttttgtttgtttggaaaaaagaaatagtatgagttagtgttttttaaaaattaaatagatttaatgtttttttttttgtttgttttcgttcgtgtgtgtttttttcgattgtttgttcgttttttttgtttttttgtttgtttaagaaagagttgttggttttgagagaagattttggtattataattgtgttagtagattgagatttttgttagagtttttttgtttaggttagaagtgttttttatagaatagaattgggagtttgtaattataatgtaagtataaatgttttatttttttaaatatatgtttgaatttttttgtttttgttatagtaggaaattttatatgtaagaatgttttattagttatattgttttgttagatgttagatatttttgtgtgtgtgtggggttaatatttttttttttttttaaatttaattttaagtttcgggatagatgtgtaggacgtgtaggtttgttatatagtgtgtttataatatgtgtgttatggtggtttgtcgtatttattagttttggatattttttagaagaaaggtttgtataggttggtaaatgtaatgtgtaatttatggtaaatttaaaagtgtttttataaaagttttaaaggtttagtttatttagttttatttattgttttatcgtttatgtaaaattttatgtagtattttattatgttaataatgtttacgaaaaaaagttttattagatttttttgtagagagatatttaagattaaattatattatttaggtaatgatttatattaagtacgttattgattttttagttttgtttatattttttattgaaatgtaataggtatttaaaaatgttgtaattaaaatttgtttttagtatataaatgtttttattattttatttttaatatttaagaatattgttattagaatatttgatattttataatgtttttaaaagaagattattttttttgaattattattttttaaatcgttttaggtattgttttttaattttatttttttgattaagaatgaaattatttataaattaagatgttaataggtaattttttatatatttatatgtttttgttaatatgtgtttatagtaatagaataataattaaaaatgtatattaatataaggttgtattatttttttttaatattattggaagagatgtgaatatgaaattaatattttaaatatgaaatatttggttttgagagatttttttttgtgatataaagttattttattttagatatatgtgttttattggttttataatttgataaattttagtttgttttatatttgaaattagtttaaataataaggaaatagaagttagaataaaagtagatttagaaataatgatttaggttagatgagttttttttattgataaaataaatgttaagtgttgagatatgtttgattataatttaattaaaataaggatattaattttagttgtgataaagttatattttatttttagtggaaaattatatatgatgacgtttttgatgttgatgtaatgttaattttattttttagttaaattatttttgaaaaattttataattttgttgaaagttgtttgattacgaagaagtatggtattgtgtaaaaaagaaaaaaatttaaaagtatttattttggttgattttatttttttttttattagttttttgtagttttgatttcgtttttatatttttatatttttagggttataatgtgatgttgaaataggatttttttaattttaaagtagaataaaagttttaaaatttgaaattttgattgtggagatatttgatttatagtaattatattttagtaagtattgatattttagtggtatataaatgttagataatttttaaaattaatatattaattttaatgttaaattggagttttagtgggagagtaatgttatttttttattttgattagatgattttgggttattttttagatagaaataattaggaattaataatgtataagtttaaagtaatgtaattttttttttaaggttggaagataagatatttattaattttttttttataaattattagtataatgatttaatgaatttttttgttattttaattttttttatataatggttttggtggatagggattttttataaaaggttttgggggtgaggttagaaggaaggagaggtattaagggagaaagggaaggtagagagagaaagatagataaaggaaaggttataaagaaggaagatgaggttgaggaaagaggaaagagagaaaagaagttagagagaagtagaggtttatttttttaatattttgaaagatttggttgtatattaagttatgatttagttttttaatttttttttgtaattttagatatgttttatggttagtaattgttatttaaaatattttgtaaattaatattttataagtttatttttggtttttgatatttagattgttatataggaatatttaaagttaattttggaaataaaaagttaattatttaaattttttattagttgtaattttagatattaatgtatttgagatttaatagggaaaataagaatttaaataaatttttgggatagggaaatgttaggtaatattgttaaatttttgtagtaagtgagaaaggttttgtttgttttaagatgttgattatttttttttaatttaattaatatagatattttttatttttgttatataatgtttaaatttattatagttaatggttatatttttaggatataattttttttttaa

SEQ ID NO: 474 - DNA, 6216 bp, Artificial Sequence
  chemically treated genomic DNA (Homo sapiens)
tttttttttttttataaatttaaaattgtagtagtttaataaataataaatattttggttttatgattattgttaaatagtttattagtaagagaaaaaaaaaaatgttgagttttaagaggggagaggaaaggtagtttttttgaagttgaattttttgtttaaattgttttagtaataaattttgttatttattggtaaaaaggaagaattaaaattaaaaggtgtttgtcgtttttataggtagttagtagtgtgatcgaaatagaatttttttagcggtgtttttggataaggggtttggaaatatgtgatttgatatggaatttttttttgtgttttgaatttattatggtttatttttaagttataatagttttttgagtagaggaggtatgttgtttttatggttttttttaaaattatattttttgagatagaattttattttaatagattagtggattttaattggatatattttagaggtttgattgattttgaaaatattttttttttttttttttttttgtttttttgtttttttttttattacggttaattgtagtttgaattttttgtgtttagttgattttttcgttttagttttttgagtagttgggattataggcgtgcgttattatgtttggttaatttttttgtagagatggggttttattatgttgtttaggttggttttaagtgatttgtttgttttagttttttaaagggttaaaattataggtgtgagttattgtacgtggtttttttttttttttttttttgagatagggtttttttttgttatttaggttggagtatagtggtattaatatggtttattgtagttttgatattttggggttatttgatttttttattttagtttttggtgtagttgggattataggttgaaaatatttttttaattttgttgttagtttgggtttttttttattttagtttttgaaatttattattttttgtttaacgggataggttagtggtgacgttggtttttggtgttagggtttgtttttttagattatgggtattatataaagataattgttttaaacggtattattgttttagagttattgaatgtttttaaggtgtatttgataaaataaaaatagttttttgttttgaaaatttttaagtatttttatattgggaaaatgttttttttttttttttgatagggttttgttttgttgtttaggttggagtgtagtggcgggattttaatttattgtaatttttgtattttgggtttaagtaatttttttgttttagttgggattatcggtatatgttattaagttcggttaatttttgtatttttagtagagatggggttttgttatgttggttagattggttttgaatttttgattttaagagtgatttatttgtttcggttttcgagagtgttgggattataggtatgagttattatgtttggttaataatgttttttttaatggtgttttttttattatttggatagatatatgaatttagttattaagatgatttagatttaaatataaaatattagtatagtagtttttgatttttaatattattttaaatttatttttttttattgttttttgtatttaaatattttttaatttttgagaaaattaagattattaaagattagtaatttatttgtgattgtgtgtgttggtggatattttaataaatttatgaataaagttaatattgttttgttagtgtttttattttttttttacgtttgtttatatttggaattttaaggtattatttagataattatttgatattttttgttggtatgatatgtttggttaattgttttggtaaaattatttatttattattgggaattaagtattgtaataattaaagaaagaggttatataagggaaattggaagaattatatgttatttgttttaatttttatgtagtatatttatatatgtgtgtaaaaaaaatgtaaattgttataaagtaatatattgatgaatttaaatgagtagagtataataaaagtaaaaattaaatagaagagtggttggagtgaggttataataaattaagagatattttttgaaggaagtgaatatgtttgtattttttagtatattgttatggatgttagcgttaggttaatatatagtattgtagcgtgatttaaaaaggtgagatagaggggaaataagatagttttataaatattattaaggaatttaagatatgagtattttatgtagggaggttgaaatgtattgttataattaggttgtgtaatttttttttgttaagatttatttatttattagtaatgatatttttttttttttttatttttgtttttttttttaggaaaaggaatatatgtttatttattatttaaaatttagagttatttttttgttttagttggttttgtttttggaattattaaagaagagtagaattaggtgtatgtgaaatttttgtttttgttttttttatttaattaatttttatttttttttaatttttatttttttaattattagttttatattatggtatttttttttggtttttttgtattatatttttataaaattagatgtacggggttgttaaaatattgtttggatatattatttattttgtattaagtggttttattataaaatttagttaaatatatattgaagtatttaaattgttttttttttaaataatattatattgggtattggattttttaattaaattattttttttattaaatgatattggttaatttaataagttattgtaggaattttgttaatttagtagtttttattattatgttattatggtaatgatttagttttttataaagttgtatttaaataggtgtttatagttattaattattaggtattttaagtattttttgaaaggggtttgtttgtggtggggtggggggcgttaatatagatatttttttagttacgtagttatttgaagttttttaggtagaagatagttgatagattatttggtgagtaaatgaataattggatgaatatttatttgggaatttttaaagaattgaagatagttttttggttattattgtttatagttatttattatgtgtttattttatgttaagtgttgggttggattttggggttattaaagggaagagaaaatttttattgttttgagggtagttaaaaatttaatggagggaagttgagagtatgagcgagcgtgttattttagttgggtgagcggtatattttgggaatagttgggagatttttagtggtgtgtgttttttttcgtttttagtatttgtttttttttagtttattgtgttttttttttttttggggtttaaggagtttaggttttattgtttgttttttagattgtgggagtaggagtagagagtgggtgtttgttacgggatagggggttttagagataggttttagtatgggaaggtagtggaaatttatgtattgttttttggtattgttatacgttttttgttgtttgttttttagttttttgtttttttttagtttcgttagttttttgtttttgatattagtgatgaaagttaggcgtggggggattagattatttttattggttttgatagatttagatatataatagaagttatgataagtgagttagttttttatgtttgtttattgaagtttatattattttttatgttattaaaatatgttcgtttgtagttattgttaatgtagttatgtaaaattatttgagtgaaatagattttggggatttaattttaggatttaattattatttataaagtttttttggggaaaatgtgttttggatttcgtatagttagtttataaatgagttttggaaatataatttatatgtaagttggagattttttattattagtatttagttttgcgaggagagtttttgttttgttagtaggtttatgtgtttttagttttaagtttttaaaattagtattatttgaggagtttgaattggtgtttttggagttttttagattagttatgagattttagaatttgtttattagtagtattgagtttaagaggaagtttaatttatattttttagaagataattttaagagagtgtgtatgttttcgttttgtgaataaaggaaagttaatttggtgtttcgtgtttgttttgtaattttttaagggagaaggaaagggagggaaatgattgatttttagataggataaaaattagttagtatataatgggttattgttatcgttttttgataaggattttattttaattatttgaagagattttttaaggtggaggatatagtggttatattagttatttttatttttgttattatggaaggtaaaatttttggattttagatttaattttaaaatagtaatttaataatgtttggtggaaattttttaaaaaaaatattttgtagtatatttttggtagttttgtgtttgagatgatttttaggttgttagtttagaagatggaagatataaattgtgttgatgagttggttttttagtggattttgttaggttttttttttaaaaaaataataatttttataatgagtatgttttcgtgagtttttataatttttgaagtttttatttgtttggtagaattaagggtattgaacgtttgtaagtcgtttattaatatttataggaagggtataaaagggtgtttaagttagtttgtaggtggtgggggcggggtggaaagaggggatttttgtaggtttggatgaattagttattgatttttgatggtagttttagttgtaaaaaagtaggaagttttttttatggatagaattataattttttttttttaagttttttagtttttttatatttttttattttttagattttgtaagtttttaaataaaatgtttgtatttttttaaaggaaattatatagttgattgtattatgagagggaaaggagtaaattttgttttatttgaggaggggtttagattaggagttgtgtagggtttttattcggttgggggtggtggagttttggttgtgtgtaggagtgattgtttttggagatgttttggttggattatgagtttgggtttggaaagtattgttttaagtttattagtaggaatgaggtagaatttattatttgttgttttaagatttttttgtttgttaagtgtttgagtaattttttatattttttttttgaattaaagagtaataattggttaagagtttagtagggatgaaaaaggttggttttttgtattttttatttgttgtttagattaagggtcgtattgtagattattttcggttatgttgttttgaattcgaggattagtagaattataggtttaattttaggtagacgtgagtttgtatttgatgataggtaagtatttatatgtgttttttattatttcgttgttttaggagatgttgtttaagttggtagatatgtttatttgaaagtaaagtttgttgttggtgagattattgaatttataaaaaaaaaaaagtggggggattagatgttaagggagagggaagggagtgtgtagtatttaaaagtgtggtgaagttattaagttaataagaaaaagtagaataaaatgtggttttaatttgttgtattgggtttaagatgataatattgtaatagtaaattgtagggatgtgtgcgtgtaaatgtgattatatgtgtgtttgttttttgaattttaaaattgtagaagttattagaagttttaattttagtttttaatttaatttattttgatagtaaattagtaatttttaagggatttattgataattagaataaagatttgtaatttttaggatagatttttaattttgggggtgggaaggagttattttgtatttttttgaaattttgagttattggggtcgaatatgtagggtagatattgaatgattaattttaatgtttttagtaattttgttaagtaaaatttcgttgttatttagtggtaattggttatacggtatggtagttgtaaaatatgtttttttttgtttttttttttttagattttattttttttagatgtttttagtttttttttttagatggtatttgatatagtatttgataggaaaaattgattttatgtttggtttaggtaatttagggtaag

SEQ ID NO: 475 - DNA, 6216 bp, Artificial Sequence
  chemically treated genomic DNA (Homo sapiens)
tttgttttgaattatttaagttagatataaagttaattttttttgttaagtattgtgttaggtgttatttgggaaaaaaaattgggagtatttgagaaaggtggaatttgagggagaaaaggtagaaaagggtatattttatagttattatgtcgtatagttaattgttattggatggtagcggggttttatttagtaaagttgttaagagtattaggattggttatttaatatttgttttatatgttcggttttagtaatttaaggttttagggaaatataaagtagtttttttttatttttaaaattggggatttgttttagaaattgtaaatttttgttttgattattagtaaattttttgaaaattattaatttattattagagtaaattaaattgggaattaaaattagaatttttaataatttttataattttgaaatttagaaagtaagtatatatgtaattatatttgtacgtatatatttttatagtttattattgtaatattattattttgagtttagtataataaattggaattatattttattttatttttttttgttaatttgatggttttattatatttttaaatgttatatattttttttttttttttttggtatttgatttttttatttttttttttttgtaaatttagtaattttattagtaataagttttgtttttaaataagtatatttgttaatttaaatagtattttttaaggtagcggagtaatgaaagatatatgtaggtatttgtttgttattagatgtaagtttacgtttgtttgaaattgggtttgtaattttgttgattttcgggtttaggatagtatggtcgagagtggtttataatgcggtttttagtttaaatagtagatgaaggatgtaaggggttaattttttttatttttgttgggtttttgattagttgttgttttttagtttaagggggagatgtgagggattgtttaaatatttggtagatagaaaggttttaagatagtaagtagtgaattttattttatttttgttgatgaatttgaggtagtgttttttaagtttaaatttatgatttaattagaatatttttaagaatagttatttttgtatatagttaaggttttattatttttaatcgggtgagggttttatataatttttgatttgagtttttttttagatgagatagagtttgttttttttttttttataatgtagttaattgtgtgattttttttggggaaatataaatattttgtttaaaaatttgtaaagtttgaagaatggaaaagtgtgaaaaggttgaaaaatttgaaagaaaggagttgtagttttgtttataaaaaaagttttttatttttttgtagttggggttattattagaaattagtggttgatttatttaggtttataggaattttttttttttatttcgtttttattatttatagattgatttgagtatttttttatgttttttttgtaagtgttagtgaacggtttataaacgtttagtgtttttagttttgttaaataagtaaaaattttaagggttgtgagggtttacgaagatatatttattataaaaattattatttttttaaaaaaggaatttaatagggtttattgaaaaattaatttattaatatagtttatattttttattttttgaattggtagtttaaaagttattttaagtatagggttattagagatgtgttgtaaagtgttttttttaagaggtttttattagatattattaaattattattttaaaattaaatttaggatttaggaattttattttttataataataagggtgagagtaattaatataattattgtattttttattttgaagaatttttttagatagttgaagtaggatttttattagaaagcggtggtagtaatttattgtgtgttgattggtttttattttatttggaaattaattattttttttttttttttttttttttggggaattataaaatagatacggagtattagattaatttttttttgtttataaaacgaaaatatatatatttttttaaaattattttttgaaggatatgaattaggtttttttttgagtttagtattgttggtaagtaggttttgaagttttataattaatttaaagaattttaagagtattaatttaagttttttaagtagtgttggttttaggaatttagggttgaggatatataggtttgttaataaagtaagggtttttttcgtagggttgaatgttaataataggaagtttttaatttatatgtggattgtgtttttaaagtttatttgtaagttggttgtgcgaaatttagaatatattttttttaaaaaagttttataaatggtggttaggttttgagattagatttttaaagtttattttatttaagtgattttgtatgattatattggtaatgattgtaaacgggtatgttttggtgatataaagggtaatataaattttagtaaataaatatggaaaattaatttatttattatagtttttattatatgtttaagtttattaaggttaatggaaataatttaatttttttacgtttgatttttattattgatgttagaggtaaggagttgacggagttggggaaaagtaaagggttggaaggtaggtagtagaagacgtgtggtaatgttagagagtaatgtatgggtttttattgtttttttatgttggggtttgtttttaggattttttgtttcgtggtaggtatttattttttgtttttgtttttataatttgaggagtaggtagtgaagtttaagttttttagattttagagagaaaagaaatatagtgagttggagaggagtaagtgttaagggcgaaggaagatatatattattgggggttttttagttgtttttaaggtgtgtcgtttatttagttggggtggtacgttcgtttatgtttttagtttttttttattaagtttttagttatttttaaggtagtgaaaatttttttttttttttggtgattttagaatttagtttaatatttggtatagagtaagtatataatagatgattgtgaatagtgatggttagggaattatttttagttttttaggggtttttagatgggtatttatttagttatttatttgtttattaaatagtttattaattgttttttatttgaaaaattttaaatggttacgtgattgagaaagtatttatgttaacgttttttattttattataagtaggttttttttaaagagtatttgaaatatttggtaattggtgattataaatatttatttaaatgtagttttatgggaagttaagttattattatagtaatatagtagtagaagttattgggttaatagaatttttataatggtttgttgaattaattaatgttatttagtgaaagaaatagtttagttaagaagtttaatgtttaatatgatgttatttaaaaaagaaataatttaaatattttaatgtgtgtttaattggattttgtgataggattatttagtgtagggtagataatatgtttaggtagtattttaataatttcgtatatttggttttatggaaatataatataaaaagattaagaagagatattatgatatagaattgatggttgagagagtaaaaattaaaaagggataaaagttgattgagtagaaaaagtagaaataaaagttttatatgtatttaattttatttttttttggtggttttaggaataaaattaattggaataggaaaatgattttgaattttaaataatgagtaagtatatatttttttttttaaaggaagagataaaaatagaagagaaagaaggtattattattggtaaatgggtaggttttgatagaaggaaattatatagtttgattataataatgtattttaatttttttatataaaatgtttatgttttaaattttttggtaatatttatgaagttattttattttttttttattttatttttttgaattacgttgtaatattatgtattagtttaacgttgatatttatagtagtatgttggaaaatgtaaatatgtttattttttttagaaaatattttttggtttattatggttttattttaattatttttttgtttggtttttgtttttattatgttttatttatttaaatttattaatatgttgttttgtaatagtttatattttttttgtatatatatataggtgtattatataaaaattgaaataaataatatatagtttttttaattttttttgtatgatttttttttttagttgttatagtgtttagtttttagtggtggataaataattttgttaaaataattgattaaatatgttatgttaataaagggtattaaatgattatttgggtagtgttttagaattttaaatatgaatagacgtaaagaaaaaataaggatattaataaaatagtattggttttatttataaatttgttaggatgtttattaatatatataattataaatagattattaatttttggtaattttaatttttttaagaattgaagggtgtttagatatagaggataatgaggggaggtggatttaagataatattaagaattaaaaattgttatgttagtgttttatatttaaatttaagttattttagtaattgaatttatatatttatttagatagtggggaaaatattattaaaaagaatattgttggttaggtatggtggtttatgtttgtaattttagtattttcggaggtcgaggtagatgggttatttttgaggttaagagtttaagattagtttggttaatatggtaaaattttatttttattaaaaatataaaaattagtcgggtttagtggtatgtgtcggtggttttagttgaggtaggagaattgtttgaatttaggatgtagaggttgtagtgaattgagatttcgttattgtattttagtttgggtagtagagtaagattttgttaaaaaaaaaaaaagaatatttttttagtatggaaatatttgagaatttttaaaataaaaaattgtttttgttttattaaatgtattttaaggatatttaatgattttggggtaatgatgtcgtttagggtagttatttttgtatggtgtttatgatttggaaaaataggttttggtattaaaggttaacgttattattggtttgtttcgttgggtaggaaataatggattttagaggttggaatgaaggaaagtttaaattaataatagagttagaaaaatgtttttagtttgtagttttagttatattagaggttgaggtaggaggattaggtgattttaagatgttaaggttatagtgagttatgttgatgttattatattttagtttgagtgatagaggaagattttgttttaagaaaaaaaaaaaaaaaaggttacgtgtagtggtttatatttataattttagttttttaggaggttgaggtagatagattatttgagattagtttaggtaatatggtgaaattttatttttatagaaaaattagttaggtatggtggcgtacgtttgtagttttagttatttaggaggttgaggcgggaggattaattgagtataggaggtttagattgtagttagtcgtggtggaaagaaaggtagaaagatagaaagaaagaaaaaagaaaaatgtttttaaaattaattaagtttttaaaatgtgtttaattaaaatttattgatttattaaaatggaattttattttaaaaaatataattttaagagagattatgagagtagtatattttttttatttaaaaaattattatgatttagagatgagttatgataaatttaaagtatagggaaaagttttatattaaattatatatttttaagttttttatttaaaagtatcgttgaaagaattttatttcgattatattattaattatttgtgagaacggtaaatattttttagttttagttttttttttttattaataggtggtaagatttattgttaagataatttaggtaaaggatttagttttagaaagattgttttttttttttttttttaaggtttagtattttttttttttttttattaatgagttatttgatagtaattataaaattaaaatatttgttatttattaagttattgtaattttggatttgtaaaggaaaaagaa

SEQ ID NO: 476 - DNA, 6216 bp, Artificial Sequence; identical to SEQ ID NO: 474
  chemically treated genomic DNA (Homo sapiens)

SEQ ID NO: 477 - DNA, 6216 bp, Artificial Sequence; identical to SEQ ID NO: 475
  chemically treated genomic DNA (Homo sapiens)

SEQ ID NO: 478 - DNA, 6204 bp, Artificial Sequence
  chemically treated genomic DNA (Homo sapiens)
aaaaaaacgtcgtggtgtagcggtagcggtagcgtttggttaggaggcgtggaggggtttagggatggttatttttatagggagttagggagggtttggggcgatagcggaaaggttaagcgtcgaaaaggttaagtgttatcgtggagagattatttgagggggaggttttcggtgggatagttattaagaattgtgatatagaaggggaagggggagggtttttttgttataaagattaaaaatttttaaaatgtatttgaataatataatatataataataaatttaaattttgtttttttgttttattgggtaaattttggtttattttttatttttggttttattttaggggtttagttttcgatgacgtttttagagatacggttttagtgttggggggttgttgtgtgtttgttatttttaggagagggtgttggttagtatattatagtgaggttgtatttggtgttattaggttgaattgaggtttagggttttagagagatgatagatagttggtgatagatagtttagggcggttggttgatagagtgaggggatatatgggtaggatttgttcggttttttaatgttatattgcgtatagttgtagaagtttttaatatttttttacgtgaatcggattgttttgagggttgaggttatattcggagaataaattggatgaaataaattaaaattcgtaggatagtttttttttttatttcgttgcgggggagggtgttgtttatagtataaaaacgtttttttatttgggttcgagaggatagcgtggttttttttaaatgtattcgagaaataaaaattattaaatatagattatggtacgaggtcgtttttttatttttttaagttatcgtttagcgtagtttatcgtcgttttaggtcgtgtcgttggtcgagtaggagaattgggggaagtggggtttgcgttcgttgtttatatattttatgttgttatttgtgggtgtagatagtttagatttcggtgttttatttttttgttatttttatttatttatagttttagtaggaagttaattttttaaagtacggttagtacgttgttatattgttaggaaattgagatagggttttatagattgatatagggatttgggtttttagagtattgttttttattttgattattggtattttttaaaaggaatttttttaaatatttagattttaaaatatttgaagttaaaaaagttgaatattgtaggtttttttgagtgtggagagaaaagggagtgggcgggggtaggtagtggttttttattttggttaggtggtgtgatggtgattatttgggtcgtgaattttttattaaaatatttggtgttagttttcgacgtgatttggggtttgaagggtgggttgagttgtagaggtgggtagacgggatagttatgagtttcgttttttatttttagtatatttttaagtgtgtttaagatttttaaagtatttggatttttaaggggtttttaggtaggattgatgttagagagtagtaagttattagttttttatagaggtagttttgggagggagggatatgaggggtgtaggagtacggagataatttttaatagttgagacgtaaagttgtttttatagtagttttagtaggcgataggaggtagtgtagtttagttttgagagattttttttgttattaggaggtgataattttatttttttttttttttttttgtttttttattttttttattggtttttttgtaaattgggaaagagggagattgtggaataaggtgtataggatgagtttattttgtttttatggtttagggattataggattatagtttgttggtatttggttgtagataggatttttaatgatttaggatgaagggtgattataaggtgatgtgtatacgtgaggagttgttagagagttttttaggttttatagttaaggatttttttaagtattgttttattttagagtttgggttgggtattagtattgtttattgttaattagtaaggtttttggttaaggttgggtagaggttgagtattgtttaggttttttatatttttggagggtagggtaggagggtggtaggttttaaggtaggaacggggattaggattagggtattttgtgttaatgggagaataggtgtttagttgggttttagggttgtttagttcgattagttgtatatagtttaggataggtatttaggggaggggtaggttgggaacggggtagaagtatatttggtgatagggtatttagtattttagagtgtaggttttcgaatttagttggtagattttattagttggggtgatggttagggtttttagggtttttgaaagatgagtatttaggatggcgatttatgtagaaagagttgtttttttttagggcggatttttttatgtgttagaaaagtaggtgttgtttttgtttttgtatagttagaaatagggttgggttttttttgcggtagaagggattgaggttaaataggaggaattcgtggaggttaaggggtagtatttttggtttattattagttagtttttattgtatagcgttagggaagggaattttaaggttggtatttagagtgtgatatattttcgaggggaggaggaaatttagagtgtgatatattttcgaggggaggaggaaatgaggattaggttagttttttggtggaattcggtagtgttagagtttttgagtattaggcgttgaggttggtgtagtaaggttttttttgtattaggattgtagtaggtttttgaggtgagggcgagtgtgtgggaaatttggcgagcgtgttacgtgtatgcgtgagtgtggatatgtggggagtatgcgtgcgcgtgaatatgcggggagtagtcgtatttttttttcgtatacgtgttgttatacgatatcggtaaagaagcgatgttgtatgatttttttggcgttttcggagttttcgttaagtttgtaggtaggaaataaggttatagtgtcggtatcgttatttgtttaggttttgggtttaggttttttttttttgtgatgtagggttcgttagataggacgtttcggggttagggaggggagtcggtggtgtagcgtttttgagtagttgtgggtagtaaagtattatagagtttacggtagggtaggggttttttgagtgggtgggtgtaggttgtagggttggggatagaggtttaattgatttcggtttgttcgttattttgtttgggtttgaggttttggagattagttttggttaaggatattaagttttggttattagtgtagtttgggaggtgttaggatcgtttggcgtaggggtaggtgtagtttggggatgaggggatggaggtgtagtttgtagttgggatgggcggtttttatttttgtttggggttttttttgagtagttttgaaagtaaggatttggtttcgggattaagcgtgcgcgggaagcggattttttttatgaggatgagtttaaaaagttttttatggttttggttgtagaagggtaggcgatcgtatattatttcgtatatgattacgtttagtttttattagtttattgtacggtcgtagttattgttttttagtatttgtacgggtggtagatgggtaggattcggtattaaggggtgttcgggatattgtcgggggaggtgtgacgtgtttggggtatagagaggatatagtattgcgtgtgtttaggacgtggggacgtagtaacgcgtatgtacgtaggtggggcgtatatttcgggggttaggtatttaggtgtgtcgtaaaaggtttttatggtggtatcgtttttgattttttttttgtatagttcgaagtttgtgattttaatgtgttcgtttttgtttagtatgaggttttttagttaggggaaaggtggttttaggttagtgtcgttaggtttttagggttttgtttttttgtttgttcgttagcgtattttgaggtttcggtatattacgttttttttcgagtgtaggtagtttagggttgatataattttagcgttatagaagcgggttcggttttcggagaatatacgttttcgggataggtggaagaatagttgcgggaggcgtaatttgaggtatagtcgtggttcgggtttttgtttttatggtttgtagggttggggttttttagatcgggtttcggtattgtatagggaagggattagttattagagggtacgggggtttggaaagttttagaagttttaatttagtaggaataagttattttatagtaggtagttgtttgggtaggtattatattatttatttagtagggagtatcgtttggtgttatggagagtagtcgaggtttcgggaaggatcggttttattatgggcggtttataggtcgcgaagtttatttttcgtagttttagtttttatttcgttttcgttggcgtattttatgataaagtagaggcggtcgtgggtttggaaagagtattttagggtttgtaaggaaggggagttggaattgcggttttataggtaggacggtagtttcgtattacgttgttcgatattacgttgtttgatattacgtcgtttgatattatatcgttcgtagttttatattatattgttcgatattacgttgtttgatattatatcgttcgatattatattgttttatattatatattttattatattgttttatattatatatttttatattatattgtttttatgttacgttgttttatattatattgttttatattatattgttttatgttacgttattattaggttgggtttcggtagtttttgaggtgttaaggagtgtttgaaaggtgagtaaggtggtttgggtttaggttttttagggtgagttgggattttagtaggggatagtgtttttagtattagggttttcgtaaagggaggatatatttttttaggcgagatttattttttcgttttttattataggcgattgtgtttttaaagtaaaggttttatttgtaggagaatcgtttttaaatatagtgatttggaattaattaagtggttggattttggttttttttatagtaaatattttttgggttaagtttttagaataggttttgtaggatagagttcgggttttaataaaagtttggtaggtagggttgtagggtatggggagttggggttttttggagtttcggtagagtgtaaggaagattagggttatttgttttatttatttgttcgtatacgggagtagcgagtatagtttttagtttatattgggtatttttatagtttgattttttagggtaggtttgttttattagcggcggagtttacggtgtgtaaagtttttacgtgtttaagaagataggatatcgttttttagagatagttttaggagtcgttatttggttttagttttttagttttatttgggtttttatttattgtgaggaaggggtgtttggagttttgtaggacgcggttttcggtgagtgtgtgggttatttcgttttgtaaagtagggttgggtgagttgttatttcgtatttttatttttattttgttttatcgtttcggttttattttggttacgatgattttttttttgaggatttttatggcgtagtagcggtttgtggtttttttttttattaggattattttgtcgaaagtgtttttgtttagtagttttaggtatttaaattcgtttatggtttatgggtaggtattagggttagtaagcggcgttgttaatagtgtttagttggtcggtatgcgtggggtggtatgaggggttttagagtcggaggtagagttaggagaggcgtttattttatatttggtggtttattgggtttagcggggagtttaggtttatagggaatatatggttgcggttttagtttagagtatggggtttagggaagggtggggtaatattgtttaagtttggtagggtttagtaattttagtttttttttgatatggggaagaggatttatttgggaagtagttgcgttttatatggaaaatcggtttaggtggagatgtcgtggagtgttgagtgttttttgggtcgagttgggattttatgatttatttagttttttatagtttaaggtagttttaggtataggtagaagtg

SEQ ID NO: 479 - DNA, 6204 bp, Artificial Sequence
  chemically treated genomic DNA (Homo sapiens)
tatttttgtttgtgtttggggttgttttggattgtggagggttgggtgggttatggggttttagttcggtttaggagatatttagtattttacggtatttttatttaggtcggttttttatgtagggcgtagttgttttttaggtgggtttttttttttatgttagaggaaaattggggttgttgagttttgttaggtttgggtaatgttattttatttttttttgaattttatgttttgagttggggtcgtagttatgtgttttttgtaagtttggatttttcgttgagtttagtaggttattaggtgtgaagtggacgttttttttggttttgttttcgattttggggttttttatgttattttacgtatgtcgattagttgggtattgttggtagcgtcgtttgttgattttggtgtttgtttatagattatgaacgagtttgagtatttgaagttgttgggtaagggtattttcggtaaggtgattttggtgaaggagaaggttataggtcgttattacgttatgaagatttttaagaaggaagttatcgtggttaaggtggggtcggggcggtggggtagggtggagatgagggtgcggggtggtagtttatttagttttgttttataggacgaggtggtttatatatttatcgagaatcgcgttttgtagaattttaggtattttttttttatagtgagtgggagtttagatggggttgaagggttggggttaggtagcgatttttggggttgtttttaggggacgatgttttgtttttttgggtacgtgagggttttatatatcgtggatttcgtcgttggtgagataggtttgttttggagggttaggttgtggaggtgtttagtgtgggttaggggttgtgttcgttgttttcgtgtgcgggtaggtgggtggggtaggtggttttggttttttttgtattttgtcgaggttttaggaggttttagttttttatgttttgtagttttgtttgttaggtttttgttgaggttcgggttttgttttgtagaatttgttttggggatttggtttaggaggtatttattgtgaagggggttagggtttagttatttggttagttttaggttattgtgtttggggacgatttttttgtagatggggtttttgttttaaaagtatagtcgtttgtggtggaaggcgggagggtgggtttcgtttgggagggtgtgttttttttttgcgaaggttttggtgttgggagtattgttttttgttgaggttttaatttattttggaggatttgagtttaggttattttgtttattttttaaatattttttggtattttaggggttgtcggggtttagtttgatggtggcgtggtatgaggtagtgtggtgtggggtagtgtggtgtggggtagcgtggtatgggggtagtgtgatgtgggggtgtatggtgtggggtagtgtgatggggtgtgtggtgtggggtagtgtggtatcgggcggtgtggtattaggtagcgtggtgtcgggtagtgtggtgtggggttacgggcggtgtggtattaggcgacgtggtattaagtagcgtggtgtcgggtagcgtggtgcggggttgtcgttttgtttgtggggtcgtagttttagttttttttttttgtaggttttgaagtattttttttagatttacgatcgtttttgttttgttatggagtacgttaacgggggcgaggtaggggttggggttgcgggggatggatttcgcggtttgtgggtcgtttatggtggggtcggtttttttcggagtttcggttattttttatggtattagacggtgttttttgttgggtgggtggtgtgatgtttgtttaggtagttgtttgttgtggggtgatttgtttttgttgagttagggtttttgagattttttaggttttcgtgttttttggtggttggttttttttttgtgtaatgtcgagattcggtttgagaaattttagttttgtaggttatgggggtagaggttcgagttacggttgtgttttaggttgcgtttttcgtagttgtttttttatttgtttcgggagcgtgtgtttttcgaggatcgggttcgtttttatggcgttgagattgtgttagttttggattatttgtattcggagaagaacgtggtgtatcgggattttaaggtgcgttggcgggtaggtaggggggtagggttttgggggtttggcggtattgatttgaggttattttttttttagttggagaattttatgttggataaggacgggtatattaagattatagatttcgggttgtgtaaggaggggattaaggacggtgttattatgaagattttttgcggtatatttgagtatttggttttcgaggtgtgcgttttatttgcgtgtatacgcgttgttgcgtttttacgttttgagtatacgtaatgttgtgttttttttgtgttttaagtacgttatatttttttcggtagtgtttcggatattttttgatgtcgagttttgtttatttgttattcgtgtaggtgttggaggataatgattacggtcgtgtagtggattggtgggggttgggcgtggttatgtacgagatgatgtgcggtcgtttgtttttttataattaggattatgagaagttttttgagtttatttttatggaggagattcgtttttcgcgtacgtttggtttcgaggttaagtttttgtttttagggttgtttaagaaggattttaagtagaggtgagggtcgtttattttagttataggttatatttttatttttttatttttaggttgtatttgtttttgcgttaggcggttttggtattttttagattatattgatagttaaagtttgatgtttttggttagggttgatttttaaagttttaggtttaagtagagtggcgggtaggtcggggttagttgggtttttgtttttaattttgtagtttgtatttatttatttaggaagtttttgttttgtcgtgagttttgtggtgttttgttatttatagttgtttagggacgttgtattatcggtttttttttttggtttcggaacgttttgtttggcgggttttatattataggaggaaggggtttgaatttagggtttgggtaggtggcggtatcgatattgtggttttgttttttgtttgtaggtttggcgggggtttcgaggacgttaaggagattatgtagtatcgtttttttgtcggtatcgtgtggtagtacgtgtacgagaagaaggtgcggttgtttttcgtatatttacgcgtacgtatgttttttatatatttatatttacgtatgtacgtggtacgttcgttagattttttatatattcgtttttattttaggagtttgttgtagttttggtataaggagggttttgttgtattaattttagcgtttggtgtttagaggttttggtattgtcgggttttattaggaaattggtttggtttttattttttttttttttcggaggtgtgttatattttgagttttttttttttttcggaggtgtgttatattttgagtgttagttttggggtttttttttttgacgttgtgtagtgaaggttggttggtggtggattaggggtgttgttttttggtttttacgagttttttttgtttgattttaattttttttgtcgtaaggagagtttagttttatttttggttgtgtagggatagggatagtatttatttttttggtatatgggggagttcgttttggagggaggtagttttttttgtatgagtcgttattttgggtgtttattttttagggattttaggagttttggttattattttagttgatggggtttgttagttgggttcggaagtttgtattttgagatgttgggtgttttgttattaggtgtgtttttgtttcgtttttagtttgttttttttttgaatgtttgttttaggttgtgtgtagttggtcgggttgggtagttttgggatttagttgggtatttgtttttttattaatatagggtgttttggttttggttttcgtttttgttttgaggtttgttatttttttgttttgttttttaagggtatggggggtttgggtagtgtttaatttttgtttagttttgattagagattttgttaattgataatggataatgttggtgtttagtttagattttggggtggggtagtgtttgagggggtttttgattgtgggatttgaggggttttttggtagttttttacgtgtgtatattattttatagttattttttattttgggttattgagagttttgtttgtagttagatgttagtaggttgtggttttgtagtttttgagttatggaggtagggtgggtttattttgtgtattttgttttatagttttttttttttttaatttataagaagattaataagaaaaataagaaaataagaaagaaaaaggaaaaataaagttattattttttggtagtagggagggttttttagagttgggttgtattattttttgtcgtttgttggggttgttgtgagggtagttttgcgttttagttgttgagggttgttttcgtgtttttgtattttttatgttttttttttttagagttgtttttgtggggggttggtggtttgttgttttttgatattagttttgtttggagattttttggagatttaggtgttttgaaggttttgagtatatttgagggtgtgttgggagtggggagcgaagtttatgattgtttcgtttgtttatttttgtagtttagtttattttttaagttttaggttacgtcggagattgatattaggtattttgatgaggagtttacggtttagatgattattattatattatttgattaaggtgaggggttattgtttgttttcgtttatttttttttttttttatatttagagaggtttgtagtgtttagtttttttggttttagatgttttaaaatttaaatatttaaaaaggttttttttggagagtgttaatgattagggtgggaggtagtgttttgagggtttaggtttttgtgttaatttgtggggttttgttttagttttttggtagtatggtagcgtgttggtcgtgttttaagaggttggttttttattggagttgtgggtgggtggaggtggtagggaggtggggtatcggggtttgagttgtttatatttatagatgatagtatggagtgtgtggatagcgagcgtaggttttattttttttagtttttttattcggttagcggtacggtttgaggcggcggtggattgcgttggacgatagtttggagggatggagaggcggtttcgtgttatgatttgtatttaatggtttttatttttcgggtgtatttgagagaagttacgttgttttttcgagtttagatggaaagacgtttttgtgttgtgggtagtattttttttcgtagcggggtagggaagaaaattattttgcgggttttaatttattttatttagtttgtttttcgggtgtggttttagtttttagaataattcgatttacgtagggaaatgttaaggatttttgtagttatgcgtaatgtggtattggggggtcgggtaggttttgtttatgtgtttttttattttgttagttagtcgttttgggttgtttgttattagttatttgttatttttttggggttttgggttttagtttaatttggtggtattagatgtaattttattatggtatgttggttagtatttttttttgggggtggtaggtatatagtagttttttagtattaaggtcgtgtttttgaggacgttatcggaggttgggtttttgggatgggattagggatgggggatgggttagggtttatttagtgggatagaggagtaaggtttaaatttgttattgtgtattatgttgtttaaatgtattttgggggtttttaatttttgtgataggaaagtttttttttttttttttttgtgttatagtttttggtgattgttttatcgggagttttttttttagatgatttttttacggtagtatttgattttttcgacgtttaattttttcgttgtcgttttaggttttttttgattttttgtgggggtggttatttttgggtttttttacgttttttggttagacgttgtcgttgtcgttgtattacggcgttttttt

SEQ ID NO: 480 - DNA, 6186 bp, Artificial Sequence
  chemically treated genomic DNA (Homo sapiens)
tgggagtgagggtggggttggatagttggtttttttgggtatttttcgttttttttgtggttttgttatatgtttttatatggtagttttagggtaattatgatagttgaaggttttagagtgggtggagggggagagggagggagggaaagagagagagagagagagagagagaaagagaagtaagtaggtagaagttttaatgttttatgatttaattttggaaataaattatattgtgttattgttattatttttttttagaagtaagtagatagggttggtgaatatttattgagaggggaattagattttattttttgattgggggagtgttaaagaatttgtgaatatgtttttaaatgattatattttttttttttaaaatgtttgtttaaattggtgtatataaaaagttcgggggttagtgatttatttaaggttattaagttgttaaatggttttattaatattagatttaattttgtgattttaaattttatgtttttttttattattttagataattttcggtgaatattattgtttattagggtagttaagatattttagttgttaaatagatttagtttttttaattgtttcggataatatattttttattttgtagaaaataaatattatttatatggtagttatttataaatattttttaagtttattttaaatatttgtgttttaaatttttttttttaatagatgtatttatttgtatttttttagatgaattattttttttttgttgttgttgttatttttgattgtattttttattttttaagatttttttgtattattaagtttattgtttaagttaatattattttttaatttggggatttttttttgatttttgtgtgttttttttgtgggttattaatgtaatgttatttaagattaggatttggttgggcgtagtggtttacgtttgtaattttagtattgtgggaggtcgagtcgggaggattatttgaggttaggagtttaagattagtttgattaatatggtgaaattacgtttttattaaaaatataaaattagtcgggtatagttatatgtttgtaattttagttattgggtagtttgaggtaggagaatcgtttgaattcgggaggcggaggcggagtttgtagtgagttaagattttataattgtattttagtttgggttataagagcgaaaattcgttttaaaaaaaaaaaaaagattaggatttgatataaggtttgaggggtatttttttgttttgttttgttttgtttttaagaggttaaaatttttatagttgaaaatttttgttgaattatagagatttgaattaatttagtttagaaagtttggggatttgaataacggtatggatcggaaatttttttatttgttagtttttattattttaggtagtaaaatagatttttttttaggagttttttatcgtttggggttttttagtagtgggatgtggggaattaattttttttcgtttttatttaaatattaggtgggagtaaggggtgggaagtagagaaagtggatagaggtttttagtggatatgggatttttgtgtagattagtatagtttttagaaattttatgtaagtaatataggtattgttatattttttagtggttattttttaaaaagtaaataggtgaggtcgggcgcggtggtttacgtttgtaattttagtattttgggaggtttaggcgggcggattacgaggttaagagatggagattattttggtcgatacggtgaaatttcgtttttattaaaaatataaaaattagttgggtatggtgacgcgcgattgtagttttagttattggggaggtcgaggtaggagaattatttgaattttggaggtggaggttgttacgttttattatattttagtttggcgatagagtgagatttcgttttaaaaaaaagaaagtaaataggtgaaattaattttaataatatattttgtttaatttaacgtatttaaaatattattatttgaaagtgtaatgaatataaaaatatttatgagatattttttatttttatatttatattgttttggattttaatgtgtattttatatttatagtataattaatttgggattagttatattttagtttaataatagttaatagtatatgggatagcgtaaataaattttgcgtttttgttgtttttttgggtttcggagattttaattttttttttagattgtaaatttttttgtttttaagtttcggttttaatattagttcggtagaggaatttagtttaatgaggtacgttttttttttgttattttttattttattaatttgtttcgtggtaaacgtaggattgattttttaaaattattttattaattagtttatatatttattatttatttgttttattagaatgtaggttttcggaaggtagggatttaaaaaaatttgttttgttttatgtgatttttttatattaagtatcgtgttcggtataagttgggattttagtatatatttcgggacggaagaatcgtgtttttttagaatttagttagagggtagtttagtaatgtgttataggtggggcgttcgcgtttcgggcggacgtattggtttttcggtcggcgtgggtgtggggcgagtgggtgtgtgcggggtgtgcgcggtagagcgcgttagcgagttcggagcgcggagttgggaggagtagcgagcgtcgcgtagaattcgtagcgtcggtttggtagggtagttcggaggtgggtgggtcgcgtcgttagttcgtttgtagggtttttattggtcgtttgtcggtcgtttttcgtttaaaaggcggtaaggagtcgagaggttgtttcggagtgtgaggaggatagtcggatcgagttaacgtcggggattttgtttttttcgcggaggggattcggtaattcgtagcggtagggtttggggtcggcgtttgggagggatttgcgttttttatttattttttagttgtgttttcgtcgtcgtttcggttagttttcggcgttggcgtttatggtcggttttcgatagcgtttcggagggatcgggggagtttttaggcgttcgggtgagtagttaggcgcggtttttcggttttttcgattttcggcgttagtttttgtttttttagttagggcgcggtggggtttgttcgggtagtgtttcgagtaattgggaaggttaaggcggagggaaatttggtttcggggagaagtgcgatcgtagtcgggaggtttttttagtttcgcgggtcgggtgagaataggtggcgtcggttcgattaggcgttttgtgtcggggcgcgaggatttggagcgaattgttgcgtttcggtgggtcgttttttttttttttttgttttttcgggcggtcgtacgtcgggtcggtcgggtaacggagagggagtcgttaggaatgtggttttggggattgtttcgttcggggaaggggagagggtggttacggtgttaggagaggcgcgggagtcgagaggtggcgcgggggtgttatcgttgtcgtaggttggagagagattgtttttagtgaggcgcgtatcgtttgggcgagggttttattttttcgcggcgtttttggaggtgggaaagttgggtgggtatgtgtgtagagaaaggggaggcggggaggttagttattttcggagtcggttttgattttaatagatcgtttagcgtttggggacgtcgatttcggggtgtcgtggtgttcggttttacgcgcgcgcggggttgaggggtcgggggcgtttttggtcgtttagttttaataaagggtgtttttttttatttcgcgaggaggggtagtttcggagattcggtttttagcgagcggggttttagcgtcggggaggtttatttttttttggggttgttattttattattattattgttttttttttttttttaaaaggattggagattgatgtatgagggggttacggaggcgtaggagcggtggtgatggtttgggaagcggagttgaagtgttttgggttttggtgaggcgtgatagtttattatgatcgtgtttaggtaggaaaacgtggatgattattacgatatcggcgaggaatttggtaggtaaagggggtattagaagcgtatttttttggattgtggaaatgtataacgatggggttattgggtggtaaataaatgtagtttgaattaggcgtttttttcgttttttttggagatgcgtaaattatagagaaaagagttattaatttagcggtaaatcgtttgatttaagggtttgggggtggaggagaggtagtagtttagggttagattatgatgtatagtatattgatttagttttttggataaaattagatttaattgttcgtgttaatttttgttagtttttgtttttttgtgataataggataaatattaagattataattgtaattggagttagtttttatgtgtgatttaaacggagggtataaattaattaataggttttaaaaattttagtattttattttttatttaaatttttagtgtaatttgagtaagtattggtaggtggtaaatggagatttgttagatgttgatattgggtttggattttgaaattttttttaattaggaatttaattatttggttggtgttggtggttgttttggttttatttataatgttaaatttttaataaattaatgagagtttaatatggttatttggatttagagtatatttttattgttgtagtagttgtgatttttagtgtaaaattttttagtttttaggtaaataaagaatagtttttttcggggtatttaagggttgattgttgttttttttgattgtgtattagatagagtgttttgggttttggttaattttagtagaaaatttagtttttatatatatatttaaaattgaatttatggaatttgattgtggtgtatttatattgtgagtggagtaggtaaaaggatttttaaataaataaaatatgtatttatttatatgtgtattgaaatatgtatttttttatatatatttgatgttttgatataaagttttttttttttttatgaaaaggaaattaaaaaatatttatattttggattgtttaatgagaattatggaaattaagtttaattaaatttttttaaaaatttaaatgatagtgtagaatttttttaaaagttattgtaatagagtatttttttaaatatttagtatcgattgaaaatatagatgggggtttgtgtttaggaagagttttttgtatattgatgatttggtgagtaaataaggaaagttttttaaatattatattttatggatatgtttaagattaaagtttaagagtgtgtgggtgaaatatttggtttaattggaattaaataattttattgtggtttttagtaagatgagtggtatttggagtttttttttgggattggaagaaaaaagtaaaaaaataaattttaatttgatttgtatagtgtggtttgatcgtttaagtgttgttagaaagagagatgattaaaattagttgagattattatattatggattaagtatattgattttatttttattatgattttttggtattattatgtgttatgagaaagaaatagaaaaagaggtttttttgtggttggcgaagggagtttttgatttttatttcgtgggcgtgatgatgaggggagggaggtggtttatttatttgttattagtattttgatttgtttagtgtatatttttgtgtataacgttttttttattgtgtaaggtaaattgataaattgtttattaaataatttgtgtgatttaggaattttaaagaaatgttttgaaaaattggaagtttgaagtttttaaaaatgaaatgtatagatttatttattttgtataattgttattgtttttgttaaaaaatgagtgaatgattgttttttggaaaattttttaagttttgattttatgtttgttttggatgtagttattttttgaaaataagttttaatgtaaaatggatatgtaggaagatgttgtttatatgatattacgtgttattgagggaagattgggagtggaggtaggagtttggtggtaggaaaatggaaatgggtagatatgtggtataaatg

SEQ ID NO: 481 - DNA, 6186 bp, Artificial Sequence
  chemically treated genomic DNA (Homo sapiens)
tatttgtgttatatatttgtttatttttatttttttgttattaaatttttgtttttatttttaatttttttttagtgatacgtgatgttatataagtagtatttttttatatgtttattttatattaggatttgtttttaggaagtggttatatttaaggtagatataaaattaggatttgaaaaattttttaaaaaataattatttatttattttttggtaaaaataatagtagttatataagatagatgagtttgtatattttatttttaaaaattttagatttttagttttttagagtatttttttaaaatttttaggttatataaattatttaataaataatttgttaatttgttttgtatagtggggagaacgttatatataaaaatgtatattgagtaaattaaagtgttagtgataaataagtaagttatttttttttttttattattacgtttacgaaataaagattaaaaatttttttcgttaattatagggaggtttttttttttattttttttttataatatataatggtattaaaaaattataatgaaaataaggttaatatatttaatttataatataataattttaattaattttagttatttttttttttaataatatttaaacgattaggttatattatgtaaattaaattaaaatttatttttttgttttttttttttagttttaaaggaaaattttaaatattatttattttgttgaaaattatagtaaagttatttaattttagttaaattaaatattttatttatatatttttaaattttaattttaaatatatttatgaaatgtgatgtttgaagagttttttttatttatttattagattattaatatatagagagttttttttaagtataggtttttatttatgtttttagtcgatattaaatatttagagaaatattttgttatagtaatttttaaaaaaattttatattattatttgaatttttaaaaaaatttagttaagtttagtttttataatttttattaggtaatttaggatgtgggtgttttttaattttttttttatggagaaaaaggaagttttgtattaggatattagatgtatatgggaaaatatatattttaatgtatatataagtaaatatatattttgtttgtttaaagatttttttgtttattttatttataatgtaaatatattatagttaaattttataaatttagttttaaatgtatgtatgaaaattaggttttttattaaagttgattagagtttaaaatattttgtttaatatatagttaaaggaaatagtaattagtttttagatgtttcgaaagaaattattttttgtttatttagaaattgaaagattttatattgagaattatagttgttatagtaatggaggtatgttttgaatttagatagttatattagatttttattgatttgttaaaaatttaatattgtaaatgaaattaaagtaattattaatattaattaggtaattaaatttttggttggaagaagttttaaaatttaagtttaatgttaatatttggtaagtttttatttattatttattaatatttgtttaaattatattgaaaatttagatagagggtaaagtattaagatttttaaaatttattaattagtttgtatttttcgtttaaattatatataaaagttaattttaattgtaattataattttagtgtttgttttgttgttatagaagggtaagggttgataagagttagtacggataattaaatttgattttgtttaggggattggattaatatattgtgtattataatttagttttgaattgttgttttttttttatttttaggtttttggattaggcggtttatcgttgggttagtaatttttttttttatgatttgcgtatttttagaaagggcgagggagacgtttgatttaaattgtatttgtttattatttaatggttttatcgttatgtatttttataatttaggagggtacgtttttggtattttttttatttgttaagtttttcgtcggtgtcgtagtaattatttacgtttttttgtttgaatacggttatgataaattgttacgttttattaaagtttagggtattttagtttcgttttttagattattattatcgtttttgcgttttcgtagtttttttatgtattagtttttagtttttttgaagaaaaaaaaaaggtaataataatagtaaaatggtaattttaaaaggaagtagattttttcggcgttaagatttcgttcgttgaagatcgggttttcggagttgttttttttcgcggggtggagaggagtattttttgttaaagttgggcggttagggacgttttcgattttttagtttcgcgcgcgcgtggggtcgggtattacggtatttcgaggtcggcgtttttaaacgttgggcggtttgttgggattagaatcggtttcggaagtgattggttttttcgttttttttttttttgtatatatgtttatttagtttttttatttttagggacgtcgcggaagaatgaagttttcgtttagacggtacgcgttttattgggagtaatttttttttagtttgcggtaacggtggtattttcgcgttatttttcggttttcgcgttttttttaatatcgtggttatttttttttttttttcgagcgaggtagtttttagagttatatttttggcgatttttttttcgttattcggtcgattcggcgtgcggtcgttcgggggagtaagggagggaagggagcggtttatcgaggcgtagtagttcgttttagattttcgcgtttcgatataaagcgtttggtcgggtcggcgttatttgtttttattcggttcgcggggttggggaagtttttcggttgcgatcgtattttttttcgaagttaagttttttttcgttttggtttttttagttgttcgaggtattgttcggataaattttatcgcgttttggttgggaaagtaaaagttggcgtcgggggtcggggggatcggggagtcgcgtttggttatttattcgggcgtttgggagttttttcggttttttcggagcgttgtcggaggtcgattataggcgttagcgtcggagattagtcggggcggcggcgggaatatagttagggagtgagtggggggcgtagattttttttaggcgtcggttttagattttgtcgttgcgagttgtcgagtttttttcgcggagggaataaagttttcggcgttggttcggttcggttgttttttttatatttcgaagtagtttttcggttttttgtcgttttttgggcggagggcggtcggtaggcggttaatggggattttgtaagcgggttggcggcgcggtttatttattttcgagttgttttgttaggtcggcgttgcgggttttgcgcggcgttcgttgttttttttagtttcgcgtttcgggttcgttggcgcgttttatcgcgtatatttcgtatatatttattcgttttatatttacgtcggtcggggagttagtgcgttcgttcggaacgcgggcgttttatttgtgatatattgttaagttgttttttgattgggttttagggaaatacggttttttcgtttcgagatgtgtattgggattttagtttgtgtcgggtacggtgtttggtatgggaaaattatatagaataaaatagatttttttaaatttttgtttttcggaaatttgtattttggtgggatagatagataataaatatgtaagttaattaataaggtaattttggaggattagttttacgtttattacgaaataggttaatggaatagagaatggtaggaagggagcgtattttattagattgggtttttttgtcggattggtgttggagtcgaggtttgaaggtaagaaggtttgtaatttgaagaaagggttgaggttttcgagatttaaagaagtaatagagacgtagagtttatttgcgttattttatatgttattggttattgttgagttgaaatgtagttagttttaaattaattgtgttgtaagtgtaaaatatatattagagtttaagatagtatggatatgagaatgaaaaatattttatgaatatttttatatttattatatttttaaatgatagtattttggatacgttgggttaaataaaatatattattaaaattaattttatttgtttatttttttttttttgagacggagttttattttgtcgttaggttggagtgtagtggagcgtggtaatttttatttttagggtttaagtgatttttttgtttcggtttttttagtagttaggattatagtcgcgcgttattatgtttagttaatttttgtatttttagtagagacggggttttatcgtgtcgattaggatggtttttattttttgatttcgtgattcgttcgtttgggttttttaaagtgttgggattataggcgtgagttatcgcgttcggttttatttgtttattttttaaaaggtggttattagaaaatataatagtatttatgttgtttgtatgagatttttgaggattgtgttggtttatataaagattttatatttattggagatttttatttattttttttattttttattttttgtttttatttaatgtttgggtggagacgaagaagggttgattttttatattttattgttggagaattttaaacggtgaaaagtttttaaagggaaatttattttattgtttagaatgatgaaaattgatagatgaagagattttcgatttatatcgttgtttaaatttttaggttttttaaattgagttggtttaaatttttgtggtttaatagaaatttttaattgtgaagattttggttttttgaaaataaggtaaaataaaataaaagaatattttttaggttttatgttaaattttagttttttttttttttttgagacgggttttcgtttttgtggtttagattggagtgtagttgtgaaattttggtttattgtaaatttcgttttcgtttttcgggtttaagcgatttttttgttttaggttatttagtagttgggattataggtatgtgattatgttcggttaattttgtatttttagtagagacgtggttttattatgttggttaggttggttttgaatttttgattttaggtgattttttcggttcggttttttatagtgttgggattataggcgtgagttattgcgtttagttaaattttagttttaaataatattgtattaatgatttataggaagggtatataggaattaaggggaagtttttaaattgggagatggtattagtttaagtagtgggtttgataatataaaagggttttgagaggtgagaaatatagttaaaaataataataataataaaaaaagagtgatttatttgggaaaatgtaaatgaatatatttgttgggagaaaaaatttaaaatatagatgtttgggataaatttggaaggtgtttatggatgattgttatatgggtaatatttattttttgtaaaataaaaaatatattgttcgaggtaattaaaaggattgaatttatttggtagttagaatgttttaattattttaatggataatgatgtttatcggagattatttggagtagtgaaaaagagtatgaaatttggagttataaaattagatttagtattggtggaattatttaatagtttaataattttggatgagttattaattttcgagttttttgtgtatattaatttagataagtattttagaaaggggaaatgtggttatttaaaaatatatttataaattttttgatatttttttaattaagaggtggagtttaattttttttttaataaatatttattaattttatttgtttgtttttaagaaaaggtagtggtagtggtatagtgtaatttatttttaaggttaggttataaggtattagagtttttgtttgtttgtttttttttttttttttttttttttttttttttttttttttttttttttttttttttatttattttaaagtttttagttgttatgattattttagggttgttatgtagagatatgtgataaaattatagaaagaacgagagatgtttagagaagttagttgtttagttttatttttattttta

SEQ ID NO: 482 - DNA, 6203 bp, Artificial Sequence
  chemically treated genomic DNA (Homo sapiens)
taaatgtataatgataatttgaatatttatataagtgattaaaataaaaatgattagaagtattaaaaattattggaaagattggtatttaggttttttcgtggtggtatgcggtggttgggaagaagttagagaattgttaattagttgataagtgttgtattgggtattgttttattttgatttttagttttaattattttttttttaaagtattttattttatttttattggaataatttttttttcgtatatatatatttatgtttttaaatttaataattaattgtgtaatatttaattaaattttataaggaatattgtaataggtggaattaagtttgggaataagtataatggatttttatgggatttataatttatttagtgggaatagaagtatgtaggtgtatattagtcgttggtttgagtatttattgtgttgtattatttttttgtatgttgtatattatatagtaatggttggtatttgttattggatgagttagttaaatggaggttggttaagagattttttattataatgttatttatagtgtttttgtagggaattaattattttattgatgataggattttttgatttagaatatttgaaaatatttgggaagtatgttgtttggaaagaatatgtagaaattaaattttagttttagtatttttgtaagtattttataataaatatttgtaagtttgaaagaatattagtttttattttatttttaaggttatattatttttttatgtttatttgaggtatagattttataaatagttatgaatatgtgaatatatttatatattgatggatttggaattttattagttagtttgataaatatttattaataaaaatatttgtagattggaatattttgtttatttatttttgtagaaatgaaaaataataaataatatttttagagaagaaaaatttttgtatatgtatagtaggtgtttattaaatatatgatgaatgatgtataggttgaaatattttttttaatgtatattatgtttgtttattttaatatttgtgatatttatgtatagtgaggaaatgtttagtgttaaagtggatttttaacgtgaatatgttgtaggaattgaagtgtgatgtaggtagtttttagaagtattatgtggaggtagtgatttgtaatgtattggtattaaggttattgaaatggttatgaaattgttatgaaattgtatgcgtgaaattattgtaaggtttacgttttagtgaggatggaaatgaagagtttggaaataggaattggagtttttagtttagaaataattttggaagaaatataagttttttgaatgttattaaataaattatattaagagaatttagagtttatagtatttgatatttgatatttatttttttgtagtaatatagtaggattgaagagtattaaaattagttagagttttaattacgtattagatttagaaatttttattaatatatggtagagggagaatattttttttagttaagtatgttttttgattttttttttaagaaattagtgtgtttatatgtagatgtataatgataatttgaatatttacgtaaataaagaaaaaaatgatttaaagtaataaaaattgtgggaaaatattaatatttaggtttttttatggtaatacgtggtggatggaggaagtgagagaattgtagttagtttatagtgttgcgttgggtagttttttttttttgatttttagttttaattattgtataaatagttaaaaattagttttgttggaattttttttttattttgttattttggttaaagttttttatttattttttttatttataggtatttgaatatgtgcgtgtaaatgtaaaagtttttagattaaaataggaataaggaaagtttattcgttttagtttaggatttggtgggtgtggtaatttaggaagatttgagaaataattattgtttggtttgaatgatatatttgattgttattaaaatagtatataattatagtttaaatgtagatttaatttttaatagatttatttgaatttttaaaatttgtatcgttgggtgtaacgatttaaaattattttatgggagatgttatagtagtttttaaattattgagttaatatgaaatttggattttttaaaatttttttgatttaatttggttacgtagttaatattgtatttgggaaaggggtttttattttatttagtttttagaagttaatggaattattttgtaaatagtttaggtttttgtttaaatatgtgaagattgataagattattttcgtgagaattcgtatttttttattttaattttttttttttttaattatgttttataaagtaaatttatagacgttttttttgggttttgggagattttttattttaaataaattagttggaggaaaggaaaggaaggaagaaataaacgtaatatagaagttttttttagttgataaaaggttaaaaattattaacgtgtaaatgttgttttttttattttaaagtatttttttacgtagagtttagggattaggaggatttataacgtagcgatgggtagttaggttttgtaggagtggggatagagggaattcggtcggtggttcgattttgtagggaagaaggacgtgcggcgagaagtatcggattcggggagggtcgggatttggtcgagggtgatattatcgagtattttttggtatagcgttggttttttttttaaacgcgttatatgtggttttgtacgggattgttttttttaaagatagttaaggaaaaattaaagatcgacggggatattcgtttttttttttcgttttaacggttttttagaggttgtggggatttggtgagggtagggggtagttgttttaaattagtagttttaggatgtaaggtattatagaaaattttgaagttttgttatttgtagtatagggataggggtgggataatagagaaggaatgttttttttttaaaagaaaatataaataaaattttatttttttggttcgcggtagtttgtttgttgaacgttgatttgttttcgttttgtagtaggcgacggtttcgggcgttatttgcgcgtcggtgggaggttggtttacgttcgggtttttcgacgtttattgtaaagggtagtgggaatgatagattgtaaattttttcgtttgcgttttttttaagtattagaaatttaagttggaattaattttttttttcggaaggtgtaatttttttttcgcgagtttcgcggtgtcgggtcgagattgtcgagaggaagcggcgtagcgttgtcgttaaggttttttttgtcgtcggtgcggtcgggattatttggcggcgcggcgcgtgtagcgcgtagagtttcgggagtttacgttttcgttttcgttttcgtttttttcgttttttagtttatttcgttcgttcgttttttcgttcggcggagagtatagtttatttttttttatttgcggtcgtcgggtcgttttttatttatatttttgtcgtaggtcggatttagtgcgttcgttcgtcggttagtttaggttaggcgttcggcgggtcgcgtttacgtagttggcgtaggaggttttacgttggcggcgtagtgttcgttttttgcgtttttttcgttttttttttttttcgtaggggtcgagcgaatgtagttcgcgagagaaaatggcggcggcggcggggaatcgcgtttcgtcgtcgggattttcgggcgttagggttacgagttttgaggtaggcggcggcggaggagtttttaaggcgagtagcgcgttcgcggttgtcgcgggattgttgcgggaggcgggtagcgggggtcgcgagcgggcggattggcggcggcggtagttgcgtaaagtgcggagtgtggagttggattagttgtttgagtagtcgtttttttttgtcgttttatcgtcggttttttcgattttttcgtcgtcggagttcgcggacgtagcggggagtgggatcggtttttagtttgtggcggtgtcgtcgttttacggagtcgcgagtcgcggcggcgtttattttatcgagtcggtggcggcgtcggatagcggcgtttcgagtttcgtagcggtcgagttcggggagaagcgggcgttcgtcgtcgagtcgttttttgtagcggttttcgtcgggtgagtagtacggtcggggtcgcggcggggatttggagagcgggtagagggtaatgaatgaatttcgggtattatgtacggcgtttcggggtttagcgtagcgaggttacgcgtcgttcgtcgggatttacgtttttgagtatttttcgattttttcggagtcgggcggcgtttcggatttagtttgggggatcggacggggacgtgcggaagagtttgttattgtttgtagatatgtgataggcgtgcgagtttttttgcggggaatcgttgcgaaaaggtgtagggggttacggttggttttgtgggatttttggaatcggggtttttcgaggagttcgggggcggggtacggttttgcggcggcgttttcggacgggtgttttcggggtaaaggtattggggggcgaggttcgagtttgaggcgggcggtggtcggaagaggggcggggtgggtgagaagttcgaggtcgggtgggagattgagaggatcgaagagaaagtagtaggttttagcggtcgtgataggtagagtttttcggttcgttcgggattcgagtttttaggtagatatcgcgggttgggttcggacgtaggcggcgcgtttttagcgtcggtcgtagggttttaggaggacggttcggtaacgtttgttaaagtcgtgcggcgggaggttgtatattcgcggaggtttgtagttttttaggaagtgcggtttgtttaattgtagtttttaaggggttttgagtgtttttgggaatgcgaattgtattgttaagttatttgagtgatttttgtttggagtttgaatttggtttttgaagtttgtatttggcggagtggtgtaagagttaggatcggatgtgttagttatttagttttaaagtagtggtgattgtttttcgtagttttttcggtttggttcggggattgcggcgcgggtgtagtgttttttgttcggtgttttggcgcgggtcgttcgttgaattttaggggtcgtagtgcggtgggtttcggtttagatgcgttttttggtgtatatgaagtatagtatgtgtaaggtaatttagattagcggtttattggtttcgtttatttttggttattggaaatttttatgttaaaggaaatttttttaagtgtgatagttatatttttgtttgtttgttttttaaaaatttgattaacgtatgtaaagtataaagttttgatgggtattttgagttgttggaaatgtttttgtgatagtttttcgtggttttgtagaattttttgatttttattatgagaagaaagcgtgttattttgtgagacgaatttgatagtaggagtttttggtttggatttattatttaaagtgatttggtattttttgtgtatttgattatttgtttaaaattacgatttatttagtatttggaagttttttttttttttttaagaattaaaaaatatgtttcgtattgtattatggtattattgagattaaaggagatttgtgattgatatagttttgtgtgtatttgtatatgtaatttatttttataagagttatgtatttttatagtttttttatttttgtgtagattgtattaaaatttaattggaataattttttgaaggtaatttttattttaaatgaattttagataaaaatttttaattttaaatttaagaaattgtatttattgagatttaattttttggatataataaataatttagtaaacgttagtattttagtatttttaatgagttgtgaatatagtagaagagtatttattgtaaaaataatgtattgaaattgtttaatgttgttttttgatataaaataagaggattaaggtggaggtagatagaatttagggattaagtaatttatgtttagtatttgcgttttgtaatcgaggtttttttttttttgtttaaggtgtagattataattgtatagtataagaaaataatgggtttgtaaggat

SEQ ID NO: 483 - DNA, 6203 bp, Artificial Sequence
  chemically treated genomic DNA (Homo sapiens)
atttttataagtttattatttttttatattgtgtaattataatttatattttaagtaaaggggaaaaaatttcggttataaaacgtaaatattaagtatggattatttagtttttaaattttatttgtttttattttagtttttttattttgtgttaagagataatattaaataattttagtatattatttttatagtggatgtttttttattatatttatagtttattaagagtattagaatgttgacgtttgttaaattatttattgtatttaaaaagttaggttttaatagatataattttttaaatttggggttaaaaatttttatttggaatttatttaaagtagaagttgtttttaaagaattattttagttaagttttaatataatttgtatagaaatgggaaaattatagaggtatataatttttgtaagaataaattatatgtataagtgtatataaaattgtattagttataaattttttttggttttagtagtgttatggtatagtgcgaagtatattttttagtttttggggagaggaaggggatttttaaatattaaatggatcgtgattttaagtaaataattaaatgtataaaaaatgttagattattttagataatgaatttaaattaaggatttttattgttaaattcgttttataaaatgatacgttttttttttataataaaggttagggaattttatagggttacgagggattattataaaaatatttttagtaatttaaaatatttattaagattttgtattttgtatacgttaattaggtttttaaaaaataaataaataaggatgtagttgttatatttaaaagaattttttttaatataaaaatttttagtagttaaaaatgggcgaggttaataaatcgttggtttaaattattttatatatattgtattttatatgtattagaagacgtatttgagtcgaagtttatcgtattgcggtttttggaatttagcgggcggttcgcgttagggtatcgagtaggaagtattgtattcgcgtcgtagttttcgggttaagtcggaggggttgcggggagtagttattattgttttgaaattgaatggttgatatattcggttttggtttttatattatttcgttaaatgtaaattttaaaggttaaatttaaattttaaatagaagttatttaagtgatttagtagtgtagttcgtatttttaggaatatttaaagttttttgggggttgtaattagataaatcgtattttttaaaagattgtaagttttcgcgagtgtgtagtttttcgtcgtacggttttgataggcgttatcgagtcgtttttttggagttttgcggtcggcgttgggggcgcgtcgtttgcgttcgggtttagttcgcggtatttgtttagggattcgagtttcgggcgggtcgaggggttttgtttgttacggtcgttgggatttgttatttttttttcggtttttttagttttttattcgatttcgggttttttatttatttcgtttttttttcgattatcgttcgttttaggttcgggtttcgttttttagtgtttttgtttcggggatattcgttcgggggcgtcgtcgtagggtcgtgtttcgttttcgggtttttcggagagtttcgattttaggagttttataaagttagtcgtggttttttatattttttcgtaacggtttttcgtagagaggttcgtacgtttgttatatgtttgtaaataataataaattttttcgtacgttttcgttcggttttttaggttgggttcggggcgtcgttcgatttcgaaggggtcggggggtgtttaggggcgtaggtttcggcgagcggcgcgtagtttcgttgcgttgaatttcgggacgtcgtgtatggtgttcggggtttatttattgttttttgttcgttttttaagttttcgtcgcgatttcggtcgtgttgtttattcggcgggggtcgttgtaggagacggttcggcggcgggcgttcgttttttttcgggttcggtcgttgcgggattcgaggcgtcgttgttcggcgtcgttatcgattcggtaaggtgggcgtcgtcgcggttcgcggtttcgtggggcggcggtatcgttataggttggaagtcggttttatttttcgttgcgttcgcgggtttcggcgacggggaagtcgaggaggtcggcggtgaggcggtaaggaagagcggttgtttaggtagttggtttagttttatatttcgtattttgcgtagttgtcgtcgtcgttagttcgttcgttcgcggttttcgttgttcgtttttcgtagtagtttcgcggtagtcgcgggcgcgttgttcgttttgagggttttttcgtcgtcgtttgttttagggttcgtagttttggcgttcgggaatttcgacgacgaggcgcgatttttcgtcgtcgtcgttattttttttcgcgggttatattcgttcggtttttgcgagggagggagggggcggggagagcgtagggggcgggtattgcgtcgttagcgtaaggttttttgcgttaattgcgtgagcgcggttcgtcgggcgtttggtttggattgatcgacgggcgggcgtattgggttcggtttgcggtagaggtgtgggtggagggcggttcggcggtcgtaggtgggagggagtgggttgtgtttttcgtcgggcgagagggcgggcgggcgaggtggattgggaggcggagggggcgggggcggaggcggaggcgtgggttttcgggattttgcgcgttgtacgcgtcgcgtcgttaggtagtttcggtcgtatcggcgataggaggagttttggcggtagcgttgcgtcgttttttttcggtaatttcggttcggtatcgcggagttcgcgggaggggagttgtatttttcgaaagaaagaattagttttaatttgggtttttggtgtttgaaggggacgtaggcgagagggtttatagtttgttatttttattgttttttgtagtgggcgtcgggggattcgggcgtggattagttttttatcgacgcgtaggtggcgttcgggatcgtcgtttgttgtaaagcgaaagtaagttaacgtttagtagataggttgtcgcggattagaaaaataaagttttgtttgtgtttttttttgaaaagaaaatattttttttttattgttttatttttgtttttgtgttatagataataaaattttaaagttttttgtaatattttatattttgaagttgttgatttgggataattattttttatttttattaagtttttatagtttttgagaaatcgttggggcgaggaagggaggcgggtgttttcgtcgatttttagtttttttttggttgtttttgggaaaggtagtttcgtatagaattatatatagcgcgtttggggaggggattagcgttgtgttaggaagtgttcggtaatgttattttcggttaggtttcggtttttttcgaattcgatgtttttcgtcgtacgttttttttttttgtagggtcgggttatcggtcgggttttttttgtttttatttttgtagggtttggttgtttatcgttgcgttgtgagtttttttagtttttggattttacgtgagaaggtgttttgggatggaaaaagtaatatttatacgttaatgatttttgattttttgttaattgaggagaatttttgtgttgcgtttatttttttttttttttttttttttttagttggtttgtttaggatggggaattttttaaaatttaggaggaacgtttatagatttattttgtgaaatatgattaaggaggggggaggttggggtgggggggtgcggatttttacggagatagttttgttagtttttatatatttagataaaagtttgaattatttatagaataattttattgatttttggagattaggtaaaatgaaagttttttttttagatataatgttaattgcgtaattaggttagattagaggggttttaaaaagtttagattttatattagtttaatgatttgaaaattgttgtaatattttttataagatagttttagatcgttatatttaacggtataaattttgaaagtttagataaatttgttaaaaattaagtttatatttaggttataattatatgttattttaatggtagttaaatgtattatttaaattaaatagtggttattttttaggtttttttgggttgttatatttattaaattttaaattgaaacggataaattttttttgtttttattttgatttaaagatttttatatttgtacgtatatatttaggtatttgtaagtgagaaaagtaagtggaagattttagttagagtagtagagtaaaaaggagattttagtaaaattgatttttgattgtttgtatagtggttgaaattggggattaaagggagagggttatttagcgtagtattatgaattagttataatttttttattttttttatttattacgtattattatggagaaatttaagtgttggtatttttttatagtttttgttgttttgagttatttttttttttgtttacgtaaatatttaggttgttattatgtatttgtatatggatatattgattttttaaagagagaattaaaggatatgtttaattgaaaagggtgttttttttttgttatatgttaatagaagtttttgagtttaatgcgtgattaagattttagttggttttggtgttttttagttttgttatgttattgtagagaggtggatgttaaatattaagtattgtaggttttgaatttttttaatatgatttatttaataatatttaggagatttgtattttttttaaggttgtttttagattgaaagttttaatttttgtttttaagttttttatttttatttttattgggacgtaaattttgtaatgattttacgtatgtaattttatggtaattttatgattattttaataattttaatattagtgtattatagattattgtttttatatagtgtttttggaaattgtttatattatattttagtttttgtagtatatttacgttgaggatttattttgatattgggtatttttttattgtatataaatattataaatattagaatgagtagatataatatatattgggagaaatattttagtttgtatattatttattatatatttagtaagtatttattgtgtatatgtaggaattttttttttttgaggatattgtttgttgttttttatttttataaaaatgaataaataaaatattttaatttatagatatttttattagtgggtatttattaggttgattggtagaattttagatttattagtatgtgaatgtatttatatatttatggttgtttgtgagatttatattttagataaatataaaagaataatataattttgagaatagggtaaaagttggtgtttttttaagtttataaatatttattatggaatatttgtaggagtgttggggttagaatttggtttttgtatgttttttttagataatatattttttaggtgtttttagatgttttaagttagaaaattttgttattagtgggataattggttttttataagggtattgtaaatgatattatagtagaaggttttttaattagtttttatttagttgatttatttagtaatagatattagttattattgtgtggtgtataatatgtagagggatgatatagtataataaatgtttaggttagcggttggtgtgtatttgtatatttttgtttttattaggtgagttatgggttttatgagaatttattgtgtttgtttttaaatttgattttatttattataatgttttttgtgaaatttaattaaatattatataattgattattaaatttaaaaatatgagtatgtgtgtgcgaaaagaaagttgttttagtgaaaatgaagtgaaatgttttgagagaaaagtgattgaaattggggattaaagtgaggtagtatttagtgtaatatttattaattagttaataattttttaatttttttttagttatcgtatattattacggggaaatttaagtgttagtttttttaatagtttttgatgtttttagttatttttattttaattatttatgtgaatatttaggttgttattatgtatttg

SEQ ID NO: 484 - DNA, 6203 bp, Artificial Sequence
  chemically treated genomic DNA (Homo sapiens)
aattgaggtttatagagtttaaattatttggttaaggttataaatagttataagaattatatttaggtagtttgattttaaagatattagtttattttgtattttatagataaataatatatatttatttttttgttgttgttttgttttgagacggagttttgttttgttatttaggttggagtgtagtggcgttatttcggtttattgtaagtttcgtttttcgggtttaagcgatttttttgttttagtttttcgagtagttgggattataggtatgtgttattatgttcggttaattttttgtatttttagtagagatagggtttttttgggttagttagaatggtttcgattttttgattttgtgatttatttattttagttttttaaagtgttgagatgataggcgtgagttatcgcgttcgatttatatttattatttataaattggagagaataagaaaattaaaagggttaggtgtagtgatttatatttgtaattttagtattttgggaagttaaggtaggaggattgtttgaatttagaagttcgagattagtttgggtaatatggtgagattttgtttttataaaaaaatataaaaattagttgggcgttgtggtgagtattttatttttaggaagttgaggtaggaggattatttgaggttaaggaggttgagattgtagtgagttgtgattatattattgtattttagtttggatattagagtaagattttatttttaaaaaggaaattgagaagaaagaaaattaaagggaagtaaaattatttatttttattattttaagatattttttagaagttggtattttagtgtggtttttattgttttttgtgttagttttttgatttgagtaaaatttttgggacgttaaatttaaaattttttttatttttttggaaattttgtagtattagtttagatatgtttttatttttttttgtggtaaagagaaggatttcgtttttggtttttagagttttggtttaagtttttttttaggagggaagatgagtgtttagatatttagagtagttgggggagatataggtttgtgaaattattttggtttaattattaggtcggtagaattttagtgaagggagttttatttttgagttttatttaagttttggttatgggtggggtagataagtaggaatttatttttataggtttaatgttaatatttttaggtgaaatttttgatgaaatttgaggttagggtttcggtaagtagggaaagaacgttggtaatagaggtttttatttttgaggattttgttaggggttagagatggggtaatggttaaaaggaaggaataggttaggtatagtggtttatgtttataattttagtattttgggaggttgaggtaggaggatcgtttgagtttaggagtttgagatttgtttgggtaatgtagtgagatttgttttttatttaaaaaaaaaaaaaaggaaagaataagtaaatttttgagaaataggttgggggaggtattacgtagttggaattgttgttttataaaatagaatggtatgtgttattgttattttttttttttagttttttttttttttaggttgttagcgttttttttgggggattaaattggattgttttttagttttagatagagagtagtttgagttaggtaggaaagtgggatagtcggggagttggattttattttttgtgagtttcgttggtatttgatggtatgtggtttggagagggtaggtgatttggcgtggagggttagagggtaaatttttaaataagtggtaataggttattaatttgaaagggaaaattgtgtagtgatgggaaatgtgtttaataaatttattgggtgattaattataaaggttgggttggagttttagaggttgtttgttaaatattttattaagcggtattttgaaagttgttatttgcgtattttgggagtttagaggggattttgagggggaatgaggtttggaggatggaattatttttaggtagattgagaaggagtttggattttatttttaaatatagtttggagtttataggttagaggttttaatgggagaaaagttaaaggaagagggtgtagaaaggagttttagggaattggtggttatgtgattttgagtaaattttatttttttttgagatttagtgtttttatttttatggttttgtgtgtgttatagagatatggtggggattaaattcgatcgtgaatatgaaagtgtttgggaaattttatggttttatttaaatatgagttatttttatttgaattaaggggggaagttatttggtaggattaggaattttatttttttgaatttttatgggttttgtcgaggttgaagtagttaggggttaaagtcgtttttagtttttggaagggtattgtgaaagtggatttgatttgagaagtcgttttttgatgtgggtagttatgtgatgttagtttcgaataagagggggtagtttggagtttggaaaggtgttagtgtaggtggggtttacgtttagattttttttgttgattgttttgatgatttatttttatattttagtttttttatttttattgtagagtcggaaagggtgtggggaagagaggagagggaggtaggttttgggttttggtttcgttttttgtttttttttatttttttttgggtttggttatttagttaaaaggtaggttaagagtaggagagatatagagttcggtattggttttaggtagtagttagttcgtcgttcgtttgtgtgtttttagagttatggagagagttagtttgatttagaaggttaagttggtagagtaggtcgaacgttatgaggatatggtagtttttatgaaaggcgtcgtggagaagggcgaggagtttttttgcgaagagcgaaatttgtttttagtagtttataagaacgtggtgggcggttagagggttgtttggagggtgttgtttagtattgagtagaaaagtaacgaggagggttcggaggagaaggggttcgaggtgcgtgagtatcgggagaaggtggagattgagttttagggcgtgtgcgatatcgtgttgggtttgttggatagttattttattaaggaggtcggggacgtcgagagtcgggttttttatttgaagatgaagggtgattattatcgttatttggtcgaggtggttatcggtgacgataagaagcgtattattgatttagttcggttagtttattaggaggttatggatattagtaagaaggagatgtcgtttattaattttattcgtttgggtttggttttgaattttttcgttttttattacgagatcgttaatagtttcgaggaggttatttttttggttaagattattttcgacgaggttatggttgatttgtatatttttagcgaggatttttataaagatagtatttttattatgtagttgttgcgagataatttgatattgtggacggtcgataacgtcggggaagaggggggcgaggttttttaggagttttagagttgagtgttgttcgttatcgtttcgttttgttttttttagttttttattttgtcgagaggattagtatggggtgggaggttttattttttttttttaggcgttgtttttgttttaaagggtttcgtggagagggattggtagagttgaggttatttggggttggggattttattttttttgtagttgttgagcgtatttaattattggttatgtttttatttttgtttttcgtattcgttttttttcgattttaggattaggttattttttttttttttttgttttttttttgtttttgttgtttttgatcgtaggaattgaggagtgtttcgttttgtggttgagaattggatagtggtaggggttggagatgggtgtgtgtgtgtgtgtgtgtgtgtgtgtgtgtgtgcgcgcgcgttagtgtaagatcgagattgagggaaagtatgtttgttgggtgtgattatgtttttttttaataaagtttttttgtgatattttttttgttttttttttagtttttggcgatgggttgggagtgggattggaatttgatttagagattttgattttggatttttgagttagggttttgaattttttaggtggtttagtggttcgtacgtaagattttgagtttaggtgaggtcggggttcggttttttttattacggcggttttagttaaattggacgggatcgggagggtcgggtgaatttataggaggcgtcgtggtttttttgtcgggttgaggggaggtgagtgggagttacggcgcgggaggttgacgagttttggtggagcggggtaggaaatagtgaagttttcggcgtgagatttaaggatagcgtcgtagtagtgagcggtattgagtattcgatttgtaggcgggttatagttttattaagggtttagattttagcggaggggagtacgatttgaggaaggggtatagcgtcgttaaaaaagtttagattttaggagagggttacgttttatagagttcggagatggagataaaaggaaacgggttgaaggggaggaaggacgagttgggtgggaagggtcgttgggagttgtgtttatcgagttcgttgtttgagttttttgtagttagtaatacgtcggaatttgtagtcgttttgtttcgtttcgttttcgtagttttggattggaggcggggttcgaggttaatatcgtttaattataggagggagttgttttagggtatcgtttcgggggtttgattggttaatgggaaagtgagcggcggaacgcgcgcggcgagtttttcgtcgttcgttaggtttggcggatattacgattcgttgattgattgagaggcgttttcgtcgttcgttgagcgtcgaggggcggagttttttcggttttatttagataagttgtcgttcgttcggttcgagagttgggaattttttagagtagcgggacgagttaggatcgtaaaatgtagtgtttgttcgttgagttattagtttattcggttgggtttgggtcgggtcggtcgcgggggttggttggaaaaaggtcgttaagatgtttttattatatttcgaaatttaagtagttttggatttgtcgtcgagaggtttggattgtgtttttggttggttgtgcgattttggaaaagtcgttatatttttttgggttttagttttttttttgtattataaggggtttggattaaaggttaatataagagtgaaaatggcggttttggtcgggcgcggtggtttacgtttgtaattttagtattttgggaggtcgaggcgggcgtattacgaggttaggagatcgaggttattttggttattataatgaaatttcgtttttattaaaaatataaaaaattagtcgggagtgatggcgggtatttgtagtattagttattcgggaggttgaggtaggagaatggtatgagtttaggaggcggagtttgtagtgagtcgagattacgttattgtattttagtttgggcgatagagcgagattcggtttttttatttaagaaaaagagaaaatttgcgattttggatttagatagtttgggtttgatttttagtttgttttggttaaggtttttaattttgtttatttttgtgtttttatttataaataggggaattgaaaaatagtattttttttttatagttgttgtaaagtaatttataggatagatttaataaatgttagttttttttttttttttaagatagattttcgttttgtcgtttaggttggagtttagtggtacgatttcggtttattgtaatttttatttttcgggtttaagtaatttttttgtttgagttttttaagtagttgcgattataggtgtatgttattagtttggttagtttttttatatttttagtagagacggggttttattatattaattaggttggttttaattttttgattttaggtgattcgtttgtttcggttttttaaagtgttgggattataggagtgagttattgcgttaggatttttttttttttttttttttttttgagatagggtttggttttgttatttaggtgcgatagtggcgtgattttagtttatagtaaattcgagtttttggttttaagcgatttttttattttagtt

SEQ ID NO: 485 - DNA, 6203 bp, Artificial Sequence
  chemically treated genomic DNA (Homo sapiens)
ggttgaagtgggaggatcgtttgagattagaagttcgagtttgttgtgagttgagattacgttattgtcgtatttgggtgatagagttagattttgttttaaaaaaaaaaaaaaaaaaaaaaaagttttggcgtagtggtttatttttgtaattttagtattttgggaggtcgaggtaggcggattatttgaggttaggagattgagattagtttggttaatatggtgaaatttcgtttttattaaaaatataagaaaattagttaggttggtggtatgtatttgtaatcgtagttatttgggaggtttaggtaggagaattgtttgaattcgggaggtggaggttgtagtgagtcgagatcgtgttattgaattttagtttgggcgatagagcgagaatttgttttaaaaaaaaaaaaaaagttaatatttgttgagtttgttttatgggttattttatagtaattataaaaggaaggtattgttttttagtttttttgtttataaatgaggatataaaggtaagtaagattaagagttttggttaaggtaggttgggagttaaatttaggttgtttgagtttaaaatcgtaaatttttttttttttttgggtggggggatcgagtttcgttttgtcgtttaggttggagtgtagtggcgtgatttcggtttattgtaagtttcgttttttgggtttatgttatttttttattttagtttttcgagtagttggtattataggtgttcgttattattttcggttaattttttgtatttttagtagagacggggttttattgtgatagttaggatggtttcgattttttgatttcgtgatacgttcgtttcggttttttagagtgttgggattataggcgtgagttatcgcgttcggttaaaatcgttatttttatttttgtgttagtttttagtttaagttttttatgatataagagggaaattgaggtttagggaggtataacggtttttttaaggtcgtatagttagttagggatataatttaagtttttcggcgataggtttagggttgtttggatttcggagtgtggtgggggtattttggcggtttttttttagttaattttcgcggtcggttcggtttaggtttagtcgggtgagttgatgatttaacgggtaagtattgtattttgcgattttggttcgtttcgttgttttagagggtttttagttttcgggtcggacgggcggtaatttgtttgagtgaaatcgggaaagtttcgtttttcggcgtttagcgggcggcgggggcgttttttagttagttagcgagtcgtggtgttcgttaggtttggcgggcggcgggaaattcgtcgcgcgcgtttcgtcgtttatttttttattggttagttaggttttcggggcggtattttggggtagtttttttttgtgattgggcggtattggtttcgggtttcgtttttagtttagggttgcgaaggcgggacggagtaaggcggttgtaggtttcggcgtgttgttggttgtagagagtttaggtagcgggttcggtaggtatagtttttagcggttttttttatttagttcgtttttttttttttttagttcgtttttttttgtttttattttcgaattttgtgggacgtgatttttttttaagatttaggtttttttggcggcgttatattttttttttagatcgtattttttttcgttgagatttgagtttttgatgaaattgtgattcgtttgtaaatcgggtgtttagtgtcgtttattattgcggcgttgtttttagattttacgtcggagattttattattttttgtttcgttttattagagttcgttagtttttcgcgtcgtggtttttatttatttttttttagttcggtagaggagttacggcgttttttgtgggtttattcgattttttcggtttcgtttagtttgattggggtcgtcgtgatggagagagtcggatttcggttttatttggatttaaagttttgcgtgcgggttattgagttatttagggagtttagggttttaatttagaggtttaaagttagggtttttaagttagattttagttttatttttagtttatcgttaagaattggaagagagataggaggagtgttataggggaattttattgagaggaaatatggttatatttagtagatatgtttttttttaatttcggttttgtattggcgcgcgcgtatatatatatatatatatatatatatatatatatttatttttagtttttgttattgtttagtttttagttataaggcgggatattttttaatttttacgattagaggtagtaggggtaggagggaggtaagaggaggggagaagtagtttggttttggggtcgggaggaagcgggtgcggagagtaggggtgggggtatgattagtggttaggtgcgtttaatagttgtaagaagagtgggatttttagttttaggtggttttagttttgttagtttttttttacggagttttttggagtaagaatagcgtttaggggagaagggtggggttttttattttatattagttttttcggtagggtgggggattggagggggtagggcggggcggtggcgggtaatatttagttttggggtttttggggagtttcgtttttttttttttcggcgttgtcggtcgtttatagtgttaggttgtttcgtagtagttgtatgatgagggtgttgtttttgtaggagttttcgttgagggtgtgtagattagttatggtttcgtcgaaagtggttttggttagagagatggttttttcggggttgttggcgatttcgtagtggaagacggaaaagtttagggttaggtttaggcggatggggttggtgggcggtattttttttttgttgatgtttatggttttttggtaggttgatcgggttgagttaatgatgcgttttttgtcgttatcggtggttatttcggttaggtagcggtagtagttattttttatttttaggtagaagattcggttttcggcgttttcggtttttttgatgaggtggttgtttagtaggtttagtacggtgtcgtatacgttttggagtttagtttttattttttttcggtatttacgtatttcgggttttttttttttcgagtttttttcgttgtttttttgtttaatattggatagtattttttaggtagttttttggtcgtttattacgtttttataggttattgagagtaggtttcgtttttcgtaggagagtttttcgtttttttttacggcgttttttatgaaggttgttatgtttttatagcgttcggtttgttttgttagtttggttttttggattagattggttttttttatggttttggggatatataggcgggcggcgggttaattgttgtttgggattaatgtcggattttgtgttttttttgtttttggtttgttttttggttgggtggttaggtttagagaagggtggggaggagtagggggcgggattagggtttaagatttgtttttttttttttttttttttatatttttttcggttttgtagtaaaggtaaaaaggttgggatgtgggggtgaattattagaatagttagtaggagaaatttgggcgtgggttttatttgtattggtatttttttaggttttaggttgtttttttttgttcggggttggtattatatggttgtttatattaggaaacggttttttaaattagatttatttttatagtgtttttttaggggttaaggacggttttagtttttggttgttttagtttcgatagagtttataaaggtttaggaggatggggtttttaattttgttaggtaatttttttttttggtttaggtgaggataatttatgtttaggtagggttatggagttttttaagtatttttatatttacgatcgaatttaatttttattatgtttttgtgatatatataggattatagagatgggaatattaagttttagagaggggtgagatttgtttaaagttatatagttattaattttttgaaatttttttttgtattttttttttttagttttttttttattgaggtttttgatttatgagttttagattgtgtttggaagtgagatttaggtttttttttagtttatttgaagatggttttattttttaggttttatttttttttagggttttttttgagtttttagaatgcgtaggtggtagtttttagagtgtcgtttaatgaagtgtttaataagtagtttttgaagttttagtttagtttttgtaattagttatttagtaggtttgttggatatattttttattattatataatttttttttttaagttggtggtttgttgttatttgtttgaggatttattttttggttttttacgttaggttatttgttttttttaagttatatgttattaggtattagcggggtttatagagggtggggtttagtttttcggttgttttatttttttgtttgatttagattgttttttgtttgaggttgggaagtagtttagtttgattttttaggggggacgttagtaatttggggagagagaggattgagaaagggaggtggtagtgatatatattattttgttttatggggtagtaattttagttacgtgatgttttttttagtttgttttttagaagtttatttgttttttttttttttttttttttaaatagagagtagattttattatattgtttaggtaggttttaaatttttgggtttaagcgatttttttgttttagttttttaaagtgttgggattatgggtatgagttattgtgtttggtttgttttttttttttgattattgttttatttttgatttttggtagagtttttagagatggagatttttgttgttaacgttttttttttgtttgtcggagttttggttttaagttttattaagagttttatttaagggtgttggtattgagtttatagggatggatttttgtttatttgttttatttatagttaaagtttagatggggtttagaggtagggttttttttattgggattttgtcgatttaatagttgagttaggataattttataggtttgtgttttttttagttattttgagtgtttgaatatttatttttttttttggagggaggtttaggttagaattttggggattaaagacgagatttttttttttgttataaggaggagtagggatatgtttgggttaatgttatagggtttttaaggaagtaaaggggattttaagtttgacgttttaaagattttgtttaaattagagaattgatatagaaaataataggaattatattaaaatattaatttttagagggtattttgaggtagtgagagtgagtgattttgtttttttttgattttttttttttttaattttttttttagagatagggttttattttgatgtttaggttgaagtatagtggtatgattatagtttattgtagttttaatttttttggttttaggtgatttttttgttttagttttttaagaataaggtgtttattataacgtttagttaatttttgtatttttttgtagagatagggttttattatgttgtttaggttggtttcgaatttttgggtttaagtaatttttttgttttggttttttaaagtgttgggattataggtgtgagttattatatttggtttttttgatttttttattttttttaatttataaatagtgaatataggtcggacgcggtggtttacgtttgttattttagtattttgggaggttgaggtgggtggattataaggttaggagatcgagattattttggttaatttaggaaaattttgtttttattaaaaatataaaaaattagtcgggtatggtggtatatgtttgtagttttagttattcgggaggttgaggtaggagaatcgtttgaattcgggaggcggagtttgtagtgagtcgagatggcgttattgtattttagtttgggtgatagagtaagatttcgttttaaaataaaataataataaaaaagtgaatatgtattgtttgtttatgagatatagaatagattagtatttttggaattagattgtttaaatgtaatttttatagttgtttgtggttttggttaagtgatttaagttttgtgagttttagtt

SEQ ID NO: 486 - DNA, 6193 bp, Artificial Sequence
  chemically treated genomic DNA (Homo sapiens)
tatgtgaatttggggtgggggatgtatatttagtttatagtgatatttttgttttttttgggttttttttttgtaaaggggtttttgtaggttttggtttttaattaattttattagataatattttttaggattatgtatagggtatggtatatgtagtaggtattttggaggtttttgtttaattgttaaagtgattgtaaaagagggtaagtgtttgaataaggttttttatagaaattataataatagttaattagatattgagtattttttatgtgttaggtattttataaatatgatattacgtttttttataatgaattttatattatgtaggaataattatattaatttttattttttaaggttgtatggttaggaagttgtaagttggtatttgaatttggtattttggtttcgggttatttgtatatatatatatatattttggagatggagttttgtttttgttgtttaggttggagtgtaatggtataatgtttgtttattgtaatttttattattcgggtttaagtgatttttttattttagtttattaagtagttgggattataggtatgcgttattatgtttagttaattttgtatttttagtagagatggggttttattatgttggttaggttggtttttaatttttgattttaggtgatttatttgttttagttttttaaagtgttggaattataggtatgagttattgtgttcggttttatttgtagtttttgattgttttgtgatgtttttgtttttttggagggtttaagatgtgggcgatgagattataggttgttttttgatttttgtgttgttttggattatggggttattggtatagtgggcggggtattagaggtaggttttgatattgtttttttgaatcgtgagtattttagttttgttgtatttatttgttgtgtggttttggataaggttttagtttttttgaattttgattttatttgtaaagtgggtgtagttatagtttttgcgttattgtgttgttgggttaattaagaattaattgtgtgtaaagcgtttagttttgtgtttggtatttaaggttttgttattgtttttttttattttttggaatgataataataatagtaaataatattgtgtgttgtttgttatgtatttattttttttttgttataaggatttttattcgtattttttagttgttaggtttttatttttattttaaaggggaggaaatttataggtaaagtgatttgtataagaaaatgtagttattaagaagtgtagttaggattcgaatttaggtttgattggagtttttatttttagtttttaagtttttggtttattttttatttttagaagaggtgagatgatgttttttagagttaggaaggaaggggttggtgtgtggtggttgaatagtagtgtgatttgagtatttgtgagttaggaggtgagagagagtgtgtggtattttgtggttgggtagattattgtgggaggatgggatacgtcgtgggagtatgggatatattatgggagacggtagtattattagttgtagggttatgtggatttaggtgatggttttaggttttatttataggtttatgatgggaagtttttgaatattttttaaaaattgttattttagaaaattatgataaagttatttttaaatgttaattgatatagggtgtaaagtgaaaaagggatttttttttttttattttatatttttgagatgaaatattgtgatgaatttggaatttttttagagttttttttttttaaagtttttttaatttttaatttttatgggtatatagtaggtgtatatatttatggggtatatgagatattttgatataggtatatattgtgtaataattatattagggtaagtagggtattcgttattttagttattatttttttgtgttataaataatttaattttatttttttagttttttttaaaattattattattattttatttttattttttttgagatatggttttattgtgttgtttaggtagagtgtatgtgtgtgtgtgtaatttttttttttttttttttttttttttttttttttttgagatagggtttcgttttgttatttaggttggagtgtagtggcgcgatgatagtttattgtagttttaaattttagggtttaagtgatttttttattttagttttttaagtagttgggattataggttaatttttaattttttatagagatatagttttattatgttgtttaggtttaattttttttatagagataatagtagtttatgtttgttataggtttagtattatattaagtttattgtttgtattattatgtttgattgtttataattttattatgtgggtagtatcgtttttattttttagaggaggaaattgaggttttaatatgtttagaggagattttattttgtcgttgttttttttttattgaaatagtgtgttggggttttttattaggttatttttagtttttattttttgtaatggttgtattgttgtttatttgaggattggagtttttttatttaattagtttttttttgaggaatacgtaggttgttaatggttttttgtggagagttttaagcggaggaggtttagttgtttgtgaggtttatagagtcgtttttggttgcggggggagggtggattggaggggtttatattgttgtgtttaggtttaggattatagggttttggtttgaaggattggagatagatagggtggaggggaggaatgcgtttgaggaagatttaggaattatttcggggttttttaagggtagagttttatatagggtttggtacgtggtaggtgttttgcgaatatttggagaatgattggggtgggatgtgtaggggttgtcgttgagttagtgatggggatgggggtgggggggagatgtaggtttagcgggaggtattaggttatttggggatttgttgagtttaaggtattgggaacgtcgagggaaaagtttttatagtagtaattcggtatttttcgagggagcgagttatagtgtaggttttttgtttgttgaggagtttagagtttacggtgaggagtggtttttcgaaggaaaggggttatttttttttgggaattttaggtagttttattgtggggtttttattgtttttttttgattttcgtaagggtttatttttattttggaggttgtaagtggcggaagagatgaggggggttggtttttttttaaggagtaatttatggtgattcggtagttgggttttagaattaggaagtgtaaggatagagttttgtgttagggaggagggtggttttttatgaggttttacggtatggaagtagtttttcgagattaatttttatttttattgagttatcgagtgaagagtcgtgtagttttcgagattagtttagtcgatatggtggaatttcgtgtttattaaaaatattagaattagtcgggagtggtggtatttatttgtaattttagttatttaggaggttgaggtagtagaattgtttgaatttgggaggcgaagggtgtagtgagtcgagattatattattgtattttagtttgggcgatagaggagattttgttttaaaaaaaaaaaataataataataattagttaggcgtggtattcggtgattgtaattttagttatttgggaggttgaggtaggagaatcgttggaattcgggaggcggaggttgtagtgagtcgagatcgcgttattgtattttagtttgggtaatagagtgagattttattttaaaaaaaaaaaaaaaaggaaaagaaaaagaacgagagagtttggagtaaaaaaaaaaaaaaaaaaaaaaaaaggaaaagaaaaaagaaaaagatcgagagagtttggagtggtttgagaagatgttttgaatatattaatatataaagtgaaaagagggaggcggtagtgtagaattttttttgggtattttagggttttagtttttttatttggaaagtgggggttatagtgttattcgtatgatttttagtgggttatttttgtttaaggacgttttgttcggagtttttttaggttttttttgggagtggggtgggttgttttatttttttattttttttttaaggttatttggttgttttgtgagagagatttttgggggtaggaggtggggtttgtgagttttagtttttgatttttatttgtttagtgtggtggtttttttttatttttatttatgttgtgtgattttaggtaagttttttaatttttttgtgttttaatgtttttaatagtaagataaagatatgattagtatttattttttagattattatgaggagtcgatgagttaatgtttgtaaagtatttagagtaaggtttaatttaaggtttgagttttgggagtatttgaatattacggaatgatatttagtttttttagtgtggtattgtaggaataaagtaggatgtaaattatatatttatgtttatttagttttttgtttattttgtaaatagttttagagtatttagtgggtgttaggttcgttttggtttttgggggtatggagatggattttgtttggttttgatagtcgcgagtgtatagtggagggtattgggtggattttagtttgttgatcgttttgcgttgttgtgacgttggaaggaaacgtattattatatttaggtgtttgttttttaggggtagaattatggggtatttttttttatttttttttttttttttttttaatttttttgtagtttttaaagagtttattttgaatgataaaagttattatttacggaggtttggtaacgtttcgtgttattttgagtatgtttcgtgtattttttttacggatttttttagtagttttgatacgggtgttattttcgatcgatagagaggaaaattgaggcgaagggcggtcggttaggatttaaattagggagtttgttttagtatttcggtttttaattttaatcgtttgtttttttataaatattaggattaattattaagattaaaaaaatagttttataaattattaaatattgtatttggtggtttaggattttagtttcgttttaaaggtttttgttatgttttttttgagtgttttagtgtggagtggttttcgtgtttgtgagtgtaggggttaggggttgtgttttttttttttgtttttttttaagaggtgatatgtatttttgatattggaagggtttttaaggtttagttttggttttttgtttttttttatggtatattagttaagtatttattttttcgtttttgattatttttagtgatagggagtttattttttaatatttattttattttaaagaaaatttaggtttttagatagttttttttttataaaaattttttaaaaaaatttttatttttttttaaagttttataaataagttttttgttttggggttttgaggtaggatttggttaattcgtttttatgtttttttatagtgaggagtatagggtttgttagtaggtattataaatgttgtattaggaagtaagtggttagggggcgggttggttgggtttttattaatttttgggttgtaggtaattaggttagtagtttttgtgggatattagttgggtgagtgttgatgggtatcgtgattttaatggaataggttgttatagaaattgattttggatttgtttttaggtttattgatttgttttttaggagattatggtaattttttgagttttttagtaggtttttttagggtttttttaattttatattttttgagttgggtggtttttagggagtatgtaaattatatttttattgtgtagttgggtagtttgaggttttaggggtataggggataggttgaaatttatataggtagggggcgttttatagttgggttgggcgtttagggtaaatagttttgttcgaggatttagttagttagggggttttttttttatttatgggtttttagaggaaattttggatcgatttttaggttttttgtttttttaaagaataatcggaatttgtttttttggtgtgtttagaattatataatattaataacggttgaggtgatttgtgatgtttttagtattttatagtgttttg

SEQ ID NO: 487 - DNA, 6193 bp, Artificial Sequence
  chemically treated genomic DNA (Homo sapiens)
taagatattgtagggtgttaggggtattataggttattttagtcgttattgatattgtgtaattttggatatattagggaggtaggtttcgattattttttggggaggtagaaggtttgggaatcggtttagaattttttttgagaatttatgagtggggaaaaggttttttgattggttgggttttcgggtaaggttgtttgttttgagcgtttagtttagttatgagacgttttttgtttgtgtgaattttagtttgttttttgtgtttttggggttttaggttatttagttgtataatgggggtatggtttgtatgttttttggggattatttagtttagagaatgtggggttggggaggttttggggagatttgttgaagagtttaagggattattatggttttttgagggataagttaatggatttggggataggtttaaagttagtttttatggtaatttattttattgaggttacgatatttattagtatttatttagttggtgttttataagaattgttgatttggttatttgtagtttaaggattgatgggggtttaattagttcgttttttagttatttgttttttggtgtagtatttatagtatttattagtaggttttgtgttttttattatagggggatatagagacgaattagttaggttttgttttaggattttaaagtaggggatttgtttatgagattttaagaggaagtaaaaatttttttaaaaaatttttatggaggaagaattatttaagagtttgaattttttttagaataaaataaatgttgaggagtgagttttttgttattggaggtaattaaagacgggagaatgggtatttggttgatgtgttatgaagggagatagagagttagggttagattttaagggtttttttagtattaaggatatatgttattttttggaaggggataagaagaaaagatataatttttgatttttgtatttataaatacgaagattattttatattggggtatttagaaaaagtataatagggatttttaagacgaagttaaggttttgagttattaagtgtaatgtttgatggtttgtgagattgtttttttggttttggtggttgattttggtgtttgtggagaggtagacggttgaggttaagagtcggagtgttggagtagattttttggtttgaattttggtcggtcgtttttcgttttagtttttttttttatcgatcgggaataatattcgtgttaggattgttgggagaattcgtgagaaaagtatacggaatatgtttaggatggtacggaacgttattaggttttcgtaaatggtaatttttattatttagagtggattttttgagaattataagaagattaaaaaaaaagaaaagaaaaaataaaagaaaatgttttataattttgtttttagaagataaatatttgggtgtggtggtgcgtttttttttagcgttatagtaacgtaagacggttaataaattggggtttatttagtgttttttattgtgtattcgcggttgttagggttaggtaggatttatttttatgtttttagagattaggacgggtttgatatttattaggtgttttggaattatttgtagaatagataaaagattaaatgggtatggatgtataatttgtattttattttgtttttgtaatgttatattgaaaagattaaatattatttcgtggtatttaaatatttttagagtttagattttgaattggattttgttttaagtattttgtaaatattgatttatcggttttttatgataatttaggaggtaaatattaattatgtttttattttattgttgaggatattaagatatagagaggttgaagaatttgtttgaagttatatagtatgggtgagagtgaaaaggggttattatattgggtaggtgggaattaggggttgaaatttataggttttattttttatttttagggattttttttataaagtagttagatggttttggaagaggggtgagaggataaagtagtttattttatttttagagaaagtttgagaaagtttcgagtagaacgtttttgagtaagaatggtttattgagggttatgcgggtagtattgtggtttttattttttagatgaggaaattgaggttttgagatatttagaggagattttatattgtcgtttttttttttttattttatgtgttagtgtgtttagagtatttttttaggttattttaagttttttcggttttttttttttttttttttttttttttttttttttttttttttttattttaagttttttcgtttttttttttttttttttttttttttttttgaaatggagttttattttattgtttaggttggagtgtagtggcgcgatttcggtttattgtaattttcgtttttcgggttttagcggtttttttgttttagttttttaagtagttgggattatagttatcgaatattacgtttggttaattattattattattttttttttttgagatagagttttttttgtcgtttaggttggagtgtaatggtgtgatttcggtttattgtatttttcgttttttaggtttaagtaattttattgttttagttttttgagtagttgggattataggtgagtgttattattttcggttaattttggtatttttagtagatacggggttttattatgtcggttgggttggtttcgaaagttatacggttttttattcgatgatttagtgagggtgggagttagtttcggagggttgtttttatgtcgtgggattttatgagagattatttttttttttggtatagagttttatttttgtattttttggttttggggtttaattgtcgagttattatgagttgttttttggagaggggttaattttttttatttttttcgttatttgtagtttttaaggtagagatagatttttgcgggggttaaggggaagtagtgggggttttataatggggttgtttgaggtttttagggaaaggtggtttttttttttcgggaagttattttttatcgtgggttttggattttttagtagatagggggtttgtattatggttcgttttttcgagaggtgtcgagttgttgttataagaatttttttttcggcgtttttagtgttttgagtttagtaggtttttaagtggtttagtatttttcgttaagtttgtattttttttttatttttatttttattattgatttagcgataatttttgtatattttattttagttattttttaggtattcgtagagtatttgttacgtgttaagttttgtgtggggttttgtttttggggagtttcggggtagtttttgaattttttttaagcgtattttttttttttattttgtttatttttagttttttaggttagggttttgtgattttaggtttggatatagtagtgtgggtttttttagtttatttttttttcgtagttagaggcggttttgtaaattttatagataattgggtttttttcgtttaaaattttttatagaaagttattaataatttacgtgttttttagagaggggttggttaaataaaggggttttagtttttaagtggatagtagtgtagttattataaagaatgagagttgagagtggtttgataagagattttaatatattgttttagtgaaaagaaggtagcggtagggtagaattttttttgggtatattagggttttagtttttttttttggaaaatggggacgatgttatttatataatagggttgtgagtaattaaatatgataatgtaggtagtgggtttaatgtggtattggatttgtagtaaatatgagttgttattatttttgtaaagaagattgagtttgggtaatatagtgagattgtatttttatagaagattaaaaattagtttgtagttttagttatttggaaggttgaggtggggggattatttgagttttggagtttgaggttgtagtgagttattatcgcgttattgtattttagtttggatgatagaacgagattttgttttaaaaaaaaaaaaaaaaaaagagaagaaagaaaggaaattgtatatatatatatgtattttgtttgagtaatatagtgagattatgttttaaaaaaaataaaaataaaataataataataattttaaaaaaaattaaaagagtagaattggattgtttgtaatataaaggaatgataattgaggtgacggatattttatttattttgatgtgattattatataatgtatgtttgtgttaagatattttatgtattttataaatatatatatttattatgtgtttataaaaattaaaaattaaaaaaattttaaaaaaagaaagttttggaaggattttaaatttattataatgttttattttaaaagtgtgggatggggagaggaaaattttttttttattttatattttgtattagttgatatttagaaatgattttgttatgattttttaaagtgataatttttaaaaaatatttaagagttttttattataagtttgtggatgaggtttaaagttattatttgggtttatatggttttgtagttggtggtgttgtcgttttttatggtgtgttttatgtttttacggcgtgttttatttttttataatgatttatttaattatagggtgttatatatttttttttattttttggtttatagatgtttaggttatattgttgtttagttattatatattagtttttttttttttgattttgaagaatattattttattttttttaagggtggagagtaggttaggagtttaggagttgagagtgaggattttagttaaatttgggttcgagttttggttgtattttttagtagttatatttttttgtgtaagttattttgtttgtgagtttttttttttttaaaatggggatagaaatttaataattgaaaagtacgagtgagagtttttgtggtaggaaaagaataagtgtatgataaatagtatataatgttgtttattgttgttattattattttagggaataagaggaggtagtggtagggttttgaatgttaagtataaggttgggcgttttatatatagttggtttttaattgatttaatagtatagtgacgtagggattgtaattgtatttattttatagatgggattaaggtttagagaaattaaaattttgtttaaggttatatagtaagtgagtgtagtagagttgggatgtttacggtttaggagagtagtgttagaatttatttttggtatttcgtttattgtgttaatgattttatggtttaaagtaatataggggttagagggtaatttatgattttatcgtttatattttagattttttagggaagtagaagtattatagagtagttaaaaattataggtggggtcgggtataatggtttatgtttgtaattttagtattttgggaggttgaggtaggtggattatttgaggttaggagttagagattagtttggttaatatggtgaaattttatttttattagaaatataaaattagttgggtatggtggcgtatgtttgtaattttagttatttgataggttgaggtaggagaattatttgaattcgggtggtggaggttatagtgagtagatattgtgttattgtattttagtttgggtaataagagtaaaattttatttttaaaatatgtatatatatatataggtggttcggggttagaatgttaggtttagatgttagtttgtaattttttaattatgtagttttgggaaatgggaattggtgtgattgtttttatataatgtggggtttattgtgaggaagcgtgatgttatatttgtaaagtgtttggtatatagaaagtgtttaatatttaattggttattattatgatttttgtggaagattttgtttagatatttgtttttttttgtagttattttgatagttaggtaaaagtttttaaaatgtttattatatgtgttatgttttgtgtatggttttgaggggtgttgtttggtggagttgattaggagttaaggtttataaaagtttttttatagggaaagaatttagaaaagataaggatattattatggattgaatgtgtattttttattttagatttatatg

SEQ ID NO: 488 - DNA, 6193 bp, Artificial Sequence; identical to SEQ ID NO: 486
  chemically treated genomic DNA (Homo sapiens)

SEQ ID NO: 489 - DNA, 6193 bp, Artificial Sequence; identical to SEQ ID NO: 487
  chemically treated genomic DNA (Homo sapiens)

SEQ ID NO: 490 - DNA, 5999 bp, Artificial Sequence
  chemically treated genomic DNA (Homo sapiens)
attttttgtttatgttattagattttgaattttaaataataaaaatttttaaagtttttgtatattttaaaatataaattttatagaaataattttaaaatgttttttattataaaataagttattttttttatttatttatatagaggaaatatatatttgtgtttagtattttgtgttttattttttaattttaatttattgatagattttttttgtttagttttatattttttgatgagtgttttttggtttataattagttgtgaatatataaacgaataggtagtttttttaagtatgggtagggcgtagaagaggaatttattggattggggtataaagttagttgtttgtgagatttattattgggtggaagtgttttgaggttaggatttttatgtttcgtgtttttttggatatagtatttagaaaaagattagtttaagattcggttttttataaatatttgtagaatgaattttttggaaagtttttaataagatttttaaatttttagggttttttttttttagtaatagaatgaggaaagttatatatgttatttcgatttttataagtattaaataatagaaagttggggaatgtatttgtaaaaaagagagtattgtattagtattgatttttttttttttgagataagtttcgttttttcgttaggttggagtgtagtggcgtaatttcggtttattgtaatttttgattttttggtttaagcgatttttttgttttagttttttgagtagttgggattataggtacgcgttattatgtttagttaatttttgtatatttagtagagatggggtttttttatgttggttagaatggtttcgattttttgattttataattcgttcgttttaggtttttaaagggttggtattataggtatgagttattgcgttcggttattattgattattttagtgagatttttagtatttagtacgggatttggtatataggaagtattaattgattatttgtttttagattatatgtatttttagtttatttgattttttatatcgttgatggtttatgtatgatttttagaaattttatttttatatggaagaaatttcgttttttatttttattatttttttattttttttttcgtttgttttttattgtatttttttcggaggtacgtttgtagtttagttttttttgtagaattttgtgatattagaggcgtgtgtatttagaattaggtagatttttgaatttttattggttagttagtgtttagtgttgttttttataaataatgtttggagtgtgtttatacgtgtatttttttttggtaaagatagtaaatggaaggagataaggagttgtttaataaatttggtattgagatgaaataggaaataaagatatgtattcggataaagataaatattgttttgagtttttgattttgttaattttagattttttaagtgtttgtgttttaggaaaatgatttgttttattggtgtgttttattttttttaatattagatttaaaagtaagtttttttttagtattggattaatagttttgtttgaaagatgtgttttattttcgggaatcggttatattgattttatttagtatttttaattttgatttagggatgttataagagaaattttttaaataagtaatttttttttatttttttgtttattttttaggttttttaatggttatagaatttatgtttgtgtttaatattatggtagttgggataaagaaaattaagatgaaatatttgagattgttttagttgaaataaattaattaaaattttataggtgttagttttgaggtaaaggcgggatagtgttaggcgaaatttttgggttttagttttagtttttttattattatgttttttttatttaaatacgttttattgttttgttatttatagatttaataatgtgatttggatattgggaataagagaataagatttgatggttgaaataaaatatattacgagagaatcgtttataaggaaattttaagatgttaagatgcgggataggtagaaaggatagggttttgggagtattttgggtttttaggacgaatttgtattagtttcggcgttgcgaggatattgtattaggttttttatttttgaacgtcgttttagacgtttaagtagattgtgttgttgtttgttttttttcgttttgtgaattttatattgattttaagtgtacgaatgagttataagataaggtggaatttgtcggtcgggtacggtagatagtatttgattagcgtttcggagggcggagttggggggtttttttattcgggattttgagggattttcgcggagcgtttcgcgttattcggcggtttagttgtagagaaagtttttttttattcggggttttttgtggtttataggggattattttatatttcgtgtagttagcggcggagaaattagttggaaatgtagtgggggtggagttgttttcgcgaggatttacggatcgtttaattattacggagttttagcgataacgtttggagtcgtttggttcgattttcggaatcggattagttttttagtaatttgaattttttgacgggtttcggggtttatttaggggtggcgaggcgggttcgggcgattacggttcgtttagtgttcggtatttgcgcgtttcgagggcggtcgtattatttcgagtcggtttaggttggagtttttggagcgcgattttttgcgtaggtatatagagaagaatttgcgtacggcgaatttttttatgtttaggtttatcgtttcgcgtttagttcggagtagtcgtagggtcgggggacgcgtattttcggtattttaggcgcggggtttaggttcgcgggcgggtacgcgtggttagggagttcggtacggcggttatgggcgcggggcgtggggcgcgagttgcggttataaagggtaggtcgcgtcggttatcgcggtcggggttataatcgtttttttcgttttttttttcgttttttttgcgagtattagcgtcggttacgcgttacgtttatattacgtttattattattattattaattagcgttcgtcgtttcgcgtttcggtacgtatatttttttttttttcgtttcgtttcgttattacggttaattagcgtttattatttttttcgtttttatttattattagtattgttaatgagagtttatcgtttcgttcgggagagtttcgtttttgtcgatatttttaattattagcgtcgttttgtggttttaggtgtttatttttttttttttttttatttttttttataagaattagtttcgtgtagtttcgtttttacgcggtttcgtttacggtttcgtttatagtattgttcgttaattagtgttcgtagtcgtcgtatatttaatgagtttcggttcgggatagttttcggttcgggcgagttgtgtagttgtttcggagtcgcgtagtcgcgggcgtttttgttacgtaatttcggttcggttgtttttttttttagtttggggtcgttattatgttttttttttttaaaatatttttatgtatattttgttattatgtttttttttgtcgaattaaattttaattgttgattagtaaacgtagttaaaattttagcggtatagcgagcgagggatcgtcgtttgttagcgggttttgtagttcggttaggagtcgtttttcgcggaatcggcgtttttttttcgtcggagcggataaaggcgttcgagggcgggggtttaggtagttttcggggcgtttttttttcgcggttgtagaataaagacgtattcgtttttcgtagtcggtttcgttttaggaaacgtttatatagatggtttattagggttcgcgttgggaatattcgggcggggtgatttgggtttagggtaaggtttttagattcgttgttggcggtagcgtcgttcgggattcgttttaaagggaaatatttttttttttttttttttagaaatgtttattaagggttgtagtagggtcgagaatgcgggtttacgatttcgtgtagtttgttttgttttttttttgtgtacgtgttgagtttgtatttaaaaatagggagaaatcgagtttattgatatagtattattattatttgtaaagagtagaaacgagtgcggtggtgagttgataagttttgtttgtttttttgtagtgcgaattgtaaaattttcgcgttgttttgttttttggattagttagatgttgcgttaatatttgtgtagtttattttggttaaggtgggtagagaggttagaatgtttttaaataagagttttaaagttatgttgtattcgggttgaggtgaggttagataggttttttgggttttttggagattcgcgttgagcggtgttgtttcggagtggaagtcgggagtttagtattacgattttggcgttgttttttttttgtttggtgaatttgggtgtcgttgtacgttgtttttacgatttatttttaagaggaaaatacgagtgaaatttgttttattttttttattggatattaagaggtttatgtaagattacggatgtgggagtgttttgtgaatttaaatagtgtaattgatttttatattatgtattaaaggatttataatgattattttttaaaaatagaagtgtaggattttataaggatattaaatattattttttgtttttttttaagatggtgtgttagttaagtgtttatgaaaattgttttgtttgttttttttaaggttttgttgggagggtagtaatttgtgtttttagaattagttttttagtgttttgtatttttgttgggatttttaggtattttggttttaggtaaatataaagatattttgtatttagtacgggaagaggtagatggatttttaattggatatagatttcgggaatgagggaggattaattcgattatgtttttttcggaaggggagttagtaatattggtcggagataggagtgttgaatgttatttatattaatttatgggtattttgtttaggataaaagttttaaggtaggtaggtttaagttaaggtttgtgttgtattaataatagtattttgatttgatttgataaaattggaaaggaaatattttatgggatatttattagttttttaaatttgaaggtaataaaattgttttgttgaatttgggagggaaaattatttagattttattggaatttattgttagaataataaatttgtttgtttttgttttttttttggtaaaatatacgtatattaaaatttttagtgattatggaatattattttatgtgattatgtaatgaaattttttaaaattattaaatttagggtaggtataatattaagatttattgtaatcgaaatttaaattatttttattaaatattagaaaagaaagtgaatttgataaaggtttttgtttagatgatggaatgggagaggattgaagagaagataaagagtttggtagatttttgagtattttatattttttttgatttaagtatagtaagtttgagattgaatttcgtggtgattgttgtttttatgagtattagattagttgatgtgtggttaatgtaattttataagtgattatcgagtattaatatttggtattgtggtggttatttgtgatataaaatgattataatattttaagaagtttatagttttatggaagagaaggtgagtgaatagataaagtttatgtcgtttttatgtaaagtgaaagaaatgcgtaagagatgaatgagaagttaattttaattggcgaagttaaggaggagatggtttttgttttgaatttttgagggtaagaagatgagggaataagttttttggatagataagaggaggcgggagttttaggttgaggaataatagggtattgttaggtagttgtgataaggttttttattttttt

SEQ ID NO: 491 - DNA, 5999 bp, Artificial Sequence
  chemically treated genomic DNA (Homo sapiens)
ggagagatgggaaattttgttatagttgtttgatagtgttttgttattttttagtttgggattttcgtttttttttgtttgtttaggaaatttatttttttatttttttatttttaggggtttagagtaaaggttattttttttttgatttcgttaattagaattggttttttatttattttttacgtattttttttattttatataaaaacggtatgagttttgtttgtttatttatttttttttttataagattgtgaattttttgggatgttgtaattattttgtgttataaatgattattatagtgttagatgttagtgttcgataattatttgtggaattgtattgattatatattagttaatttggtatttatagaagtagtagttattacggaatttagttttaaatttattgtgtttgagttagaggaaatgtgagatatttagaggtttattaagttttttattttttttttagtttttttttattttattatttgggtaagagtttttattaagtttatttttttttttggtatttggtaaggataatttggatttcggttatagtgggttttgatattatatttattttagatttagtggttttggaggattttattatataattatatgaagtagtgttttatgattattagagattttggtatacgtgtattttattaggagaaaaataaaggtaaatagatttattgttttagtaatgaattttagtgaaatttgaatgatttttttttttaagtttaatagaatagttttgttgtttttaaatttggggaattaatgaatgttttatgaaatattttttttttaattttgttagattaggttaaaatattattgttggtataatataagttttgatttaggtttgtttgttttggggtttttgttttgaataggatgtttatgagttggtataggtggtatttagtatttttgttttcggttagtattattggtttttttttcgagggaagtatggtcgggttggtttttttttattttcggagtttgtgtttagttggaggtttatttattttttttcgtgttgggtatagagtgtttttgtgtttgtttagagttaggatgtttgagggttttagtagggatatagggtattaagaggttggttttgagagtatagattattatttttttagtagaattttaaaggaagtaggtaaagtagtttttatgggtatttaattggtatattattttgaaaaggagtaaaaagtggtgtttggtgtttttgtggggttttgtatttttgtttttaaagaatagttattatagattttttaatatataatatgaaaattaattgtattatttaaatttataaagtatttttatattcgtgattttgtataagttttttggtatttagtaagggaggtgagataggttttattcgtattttttttttagagatgagtcgtgggaataacgtgtaacggtatttaagtttattaagtaaggaaggggtagcgttagagtcgtggtgttaaattttcggtttttatttcggagtagtatcgtttaacgcgggtttttaggaaatttagagagtttatttgattttattttagttcggatgtagtatgattttaaagtttttatttaaggatattttgatttttttatttattttagttaaaatagattatataagtattaacgtaatatttgattagtttagggagtaaaataacgcgaggattttgtagttcgtattgtaaaagagtaagtaagatttgttaatttattatcgtattcgtttttgttttttgtaggtggtgatggtgttatgttaatgggttcggtttttttttgtttttaaatataaatttaatacgtgtataagaggaaaatagagtaggttgtacggggtcgtgagttcgtattttcggttttgttgtagtttttggtgagtatttttaggaaaaaaaagaaaaaagtgtttttttttaaggcggatttcgagcggcgttgtcgttagtagcgggtttgagggttttgttttagatttaggttatttcgttcgggtatttttagcgcgggttttgataagttatttgtgtagacgttttttagagcgggatcggttgcggagggcggatgcgtttttgttttgtagtcgcgggagggaggcgtttcgagggttgtttgagttttcgttttcgggcgtttttgttcgtttcggcggagggaaggcgtcggtttcgcggagggcggtttttggtcgagttgtagggttcgttggtaggcggcggtttttcgttcgttgtgtcgttgaggttttggttgcgtttgttgattaataattaaagtttggttcggtagagaaaaatatgatgataaagtgtgtatagggatgttttaaggaaggaaaatataatgacggttttaagttggaagaaagagtagtcgggtcgaagttgcgtgataggaacgttcgcgattgcgcggtttcggagtagttgtataattcgttcgggtcgggagttgtttcgggtcgaggtttattaggtatgcggcggttgcgggtattgattggcgggtagtgttgtgggcggggtcgtgggcggaatcgcgtgggggcggggttgtacggagttggtttttgtaggaaggagtagaaagaggaggagggatgggtatttggaattatagggcggcgttgatgattggaggtatcggtagaggcggggttttttcgggcggggcggtgggtttttattggtagtgttggtggtgggtgggaacgggaggggtggtgagcgttgattggtcgtagtggcggggcggggcggaggaggaggaggtgtgcgtgtcggggcgcggagcggcgggcgttgattggtggtagtggtggtgggcgtggtgtaggcgtggcgcgtggtcggcgttggtattcgtaggggaggcggagaaggaggcggagggagcgattgtggtttcggtcgcggtggtcggcgcggtttgttttttgtgatcgtagttcgcgttttacgtttcgcgtttatggtcgtcgtgtcgggttttttggttacgcgtgttcgttcgcggatttgagtttcgcgtttgggatgtcggggatgcgcgtttttcggttttgcggttgtttcgggttgggcgcggggcgatggatttgagtatgaagaagttcgtcgtgcgtaggtttttttttgtgtatttgcgtaggaagtcgcgttttaagagttttagtttgagtcggttcgaggtaatgcggtcgttttcggggcgcgtaggtgtcgggtattgagcgggtcgtggtcgttcgagttcgtttcgttatttttgggtggatttcgagattcgttagggagtttaagttattggaaagttggttcggtttcgaaaatcgaattaaacggttttaaacgttatcgttgggatttcgtagtaattgggcggttcgtgggttttcgcgggggtaattttatttttattgtatttttagttggttttttcgtcgttggttgtacggggtgtgggatggttttttgtgggttatagggagtttcgggtgaggaggggttttttttgtagttagatcgtcgagtggcgcggagcgtttcgcgggggttttttaaagtttcgagtggagaagttttttagtttcgtttttcgaggcgttgattaggtgttgtttgtcgtgttcggtcggtaggttttattttattttgtagtttattcgtgtatttgaagttagtgtagaatttatagaacggggaagaataggtagtagtataatttgtttaggcgtttaaaacggcgtttaggagtaaagagtttgatgtaatattttcgtagcgtcgaggttgatatagattcgttttgaaaatttagagtatttttaaagttttgttttttttatttgtttcgtattttggtattttagagtttttttgtggacggttttttcgtggtgtgttttattttaattattaaattttatttttttatttttagtgtttaaattatattgttgaatttatagatgataaaatagtgaaacgtgtttaagtgaaaaagatatggtgatggggagattgaggttgggatttaaagatttcgtttgatattgtttcgtttttgttttaaggttggtatttgtggggttttggttggtttgttttagttggaataattttaaatgttttattttggttttttttgttttagttgttatgatattagatatagatatgggttttgtaattattgagagatttgaggaatagataaaaaagtagaagagaattatttgtttaaaaagttttttttatggtatttttaaattagaattggaagtattagataggattagtatggtcggttttcgagggtaaaatatattttttaaataaaattgttaatttagtattggaggagggtttgtttttaagtttaatattgaaagaaatgaagtatattagtgaggtaaattatttttttgggatataggtatttaaaaaatttgaagttgataagattagaaatttagaatagtatttatttttattcggatatatgtttttgttttttgttttattttaatgttaagtttattagataattttttgtttttttttatttattgtttttgttaagaagaggtatacgtgtgagtatattttaggtattgtttatgaagagtagtattagatattggttgattagtgggagtttaggaatttgtttgattttggatatatacgtttttggtgttatagggttttgtaaggagggttgggttgtaggcgtgttttcggaaagaatatagtgggaaataagcgggggggggggtgggggggtggtgggaataggaaacgaggttttttttatgtagaaataaaatttttagaagttatatataaattattagcgatgtaggaggttaaatgggttgaaaatatatgtagtttaagagtaagtagttaattagtgttttttgtgtgttagatttcgtattaggtgttggaggttttattaagatggttaataatggtcgggcgtagtggtttatgtttgtaatgttagttttttgggagtttaaggcgggcggattatgaggttaggagatcgagattattttggttaatatggagaaattttatttttattaaatatataaaaattagttgggtatggtggcgcgtgtttgtaattttagttgtttaggaggttgaggtaggagaatcgtttgaattagggagttagaggttgtagtgagtcgagattgcgttattgtattttagtttggcgagagagcgagatttgttttaaaaaaaaaaaggttaatgttaatataatgtttttttttttataaatgtattttttagttttttattatttgatatttgtgaaaatcggggtagtatatgtaattttttttattttattgttaaggggaagaaattttgagagtttgagagttttgttaaaagttttttaaggaatttattttgtaagtgtttatggaggatcgggttttgggttggtttttttttggatattgtgtttaaaaagatacgagatatagaagttttggttttagggtatttttatttagtgatgagttttataagtagttgattttgtgttttagtttagtaagttttttttttgcgttttatttatatttgagaaggttgtttgttcgtttgtgtgtttatagttggttataggttaagaagtatttattaaaaaatgtaaaattgagtaggggaggtttgttaatggattgaggttgagaaataggatataaagtattgaatatagatgtgtattttttttgtgtggatgaatgagaaagataatttgttttataataggaaatattttaaaattgtttttgtgaaatttatattttgaaatatataaagattttgaaaatttttgttatttgaaatttaaagtttagtgatataaataggaaat

SEQ ID NO: 492 - DNA, 6091 bp, Artificial Sequence
  chemically treated genomic DNA (Homo sapiens)
agtattttgggaggtcgaggtgggtggattgtttgagtttaggagtttgagattagtttgagtaatacggtgaaattttgtttttattaaaatataaaaaattagttgggtatggttttagttattcgggaggttgaggtaggagaatggtttgaattcgaagtggaggttgtagtgagttaagattgtattattgtattttagtttgggtgatagagcgagattttgttttaaagaaaaaaaaaaggtaaaaaaaagggtaatttttttttttttattaattttatttatttatttgtttatttatgtttttgagatagagttttatttttgtcgtttagtttagagtgtagtggtataatttgggtttattgtaatttttggtttttgggtttaagcgatttttttgttttagttttttgagtagttgggattataggcgtgcgttattatatttagttattttttttgtatttttagtagagatggggttttattatgttggttaaggatggtttcgattttttgatttcgtgttttatttgtttcggttttttaaagtgttgggattataggcgtgagttattacgttcggttttatttttttatttttagtaaagataagattttattatgttggttaagttggtttttaatttttgatttgaggtgattcgtttttttcggttttataaagtgttgggattataggtgtgagttattgtgttgggtcgaatggattggattttaaagtatattttaggtagatggaataagggaatagtttgagtaacggtgatgagaaaagaaagaattggttaggtgcggtggtttatatttatgattttagtattttgggaggttgaggagggtagatttttttaggttaggagttgaagattagtttggttaatatggtgaaattttatttttattaaaaatataaaaattagttaggtgtggtggcgggtatttgtaattttagttattcggggggtagaagttgtagtgagttaagattgtgttattgtattttagtttgggtgatagattttgttttaaaataaaataaaataaataaataaataaaaaagaaataattgtatttgatgatttggtgagttagttagtataagatatgtgtattagggagtagtataaaattataaggttgtttagtttggagttagagtaatttgttaattttattttcgaggtaatgggaggtgtttaaagtttttttgcgatgttgtttgaattatattttaggaagtttatggtggtaggatgaattgaaggtataggaaaaggttttaatatttaatagtttagggaaaagaaacggaggatttgtaattaggtgttggtattaagggatggagttttgtttagattttttttttgtagatttttttttttttggatggaaaatgataaaaggaaatttttttgatagtaaattataatgttgattttaaaattaattttagataaaggcgattaaattgtaaatttaggatgtttgtttgaatggtttttgtatttaaagatatttttttttttataggagtatcggataaatttaattttttaatttgttaagggttttgtggaagagtttggagggggatcgaaggcggaattgatattgatatatttgggtttgtaaatttttaaaattgaggtttagaattagtaaattagggtagggtatttttttttttggaagggaagtttttatttttaaagtttttttaacggaatttttatattagagaagtgtaattgattgagaagtggaagtgattaggaatagtatttttgttttttgggcgggagagagaattttttcgggcggagttagtagtaggttagtttttgagggggtttttatgttggcggcgtcgatttgtggtgtaatgttttgagtaggagaattttaaatatatgtttgagatttaatttttagaaacgtaattagtttttataagttaaaaaaataaaaataaaaaataaaaaaaggaagtgatttttttttaagaggttaaagggtttggaagaagaggttttggtttgagtgttttaaggttttttggggtttaattcggttggaatgggtcgtagtatttatatttttgtttttggtcgtgttttaatgaagaattgaaaataataaggggtggagaaataattttttttttttttttattatttttttatagtgtaaataaataaataattttaagttcgatttttttatttgttaggggtggggaaagatttgatattaggatttttttattttatcgttatttgttttaatttaaatatttttatgatttattttagaagcgttaatttttcgtttataaggagtatggaagttttggtttttggttattgcgtagattttattttggatttattttttaatttttcgtcgttttttttttcgtttttttagtagagggcgtaggtttaaaggtttcgtcgatttcgttttagtttggtttcgtttcgtttcggcgtaggggcggggaagacgggtatagaaatttggtcgcggtttttcgggagttgtgggtacgcgagttgttcgaagtcggtggttcggggatcgtcgttgtttagttcggtcgcggtcggtcgttttttcgagtttattagtaagtcggttcgttttcgggacgcgtttcgttcgtttcgggttcgcgcgttttgaaggggcgcgtttcgcgtattttcggcgtcgtttatttttttttttacggtcgttttttttttcgttcggatagtcggcggcggcggcggcggcggcggcggcggcggtcgggagaggttttttttttacgttttgtttttttttttcgttcgtagtcgagtcgagtcggcggattcgtttgggtttcgattttgtttaggttatggtcggtaacgtgaagaagagttttggggtcgggggcggtagcggtttcgggggttcgggttcgggtggtttgattgggtttatgaaggacgttttttagtcgtattattattattattattattttagtttttattcgtcggggacggtggataagaagatggtggagaagtgttggaagtttatggataaggtgaaaggtcggttgagcgttcgttgttgtagggtgggcgtgggcggagggtcgcggggaggggaacgagcggacggaggaagcgggggaggggacgggtttggtgaagtcggggaggcgcggagtcggggtgatcggtcgggggcgtgggggtagggacgaggtcgggagggtggggggcggcgtgggggaggggttgtcgttgggagtcggggaacgttggggtgtcgcgtttggggtagttagataaagatggagtgggggttggggcgaaggttaattgggaagttagtggggcggaagtataatgaggggtgcggagtttggggttttgtgtagggtgtagggatgtaggttacggaattggtttgggaggttagtagggagggggtgaggaagagtgatgtatcggttggggtttttggttgggtgagatttgattagggaattaggtttatgggttttgattgaggaatttggttggggttaggatagtttttagggaagttgtgttttgggtgagagtatagtttttttttattaagatgtaatacgaagataaaagatatattgatgtttaagtgaggtaaggaaagaatttttttttttatttagcgtcggtttaagttttttgttatttttagaaatattggatgtgatttattgttggtgttgagatatgtattgattaaattataagttttggttagaattattattttttgaaagatggattggttgagtttgttaagtagtagtagattttgattttttaataattttttttttattatatcgtttgagttgggttttttttttttggtaacggttttgattttttattataggttttgattttaaatttgttcgttgagtttttttgattacgtttttttgtttgtttgttttttgtaagtgcgaataaaaataatttttttatatttagttattaagtttgttatttgggagaattttatttttttatagttgtgtttatatgatgaaatgtagttagttttaagtatttaattgtttaagtagtcggacgttttgttagaatttaatacgtttttttggtattttttatattttttaattaattattttgataaaatttatattgcgtatgaaaagtgattagaagtatttggtacgttttaagagaatggtgttattttttttagggtaaaatttggttttttttggtttttttttgggtttcggttttttttttgtaaagttttttatgggttgttttggattagaaatcgttaataaaatgattatgaagtatttagttaatgtaatgtgtaatttaaatgtttaataagttttgtgtgtgaattaatattttagtagtgtatgttagtggttttatagttatttttttagggttggttttttttatgttaaataattggtattgtaattaatgatataagtattcgtgtgttgattatattggtggtgtagtattaattttattgttagaaattataataaaatttttatagaaagtttaggtgtgtaaaggaaattttaaatgtgtcgatttttttaaaaaaaatatatcgaagatatttaaatgttaaagtttgttagtttgttttttagggatttatcgttaaggattataaattttattttggtatagaaaaaatatttttttaatgagtgtttcgtattagatatgtgggtgtagtataattaaaattgtgttgattagtggtttttgtttaagaataatttgtttattaaagagtttttgtattttgtattttttttttttttttgagacggagtttttcgtttttgttatttaggttggagtgtatggtgcgatttcgatttattgtaattttcgttttttgggtttaagatattttcgtgttttagtttttcgagtagttgggattataggtgcgcgttattacgtttagttaattttttgtatttttagtagagacggggttttattatgttgattaggttcgtttcgaatttttgattttaggtgatttatgcgttacggttttttaaagtgttgggattataggtgtgagttattgggtttggttttgtatttttaaagaataagagtattttgtatttttattaaagtgtttttataaatatagagtaagttgtagatagttttattttataaggtagtttaaataaaatttttttttaagttttatttttttatttatttaaagtatgtgtattgaattttgatttattttgtagaatgtttaattatttgggaagaataaagaggatttaaagtttagatttaaattgttttttaggtttgatagttttacggaaagtaggtttttagttttttttttttagtgtagggagagggatgttttatttttgtattatttgtttcggaagttgattttaatattgtttgttttttttttattacgtatttttagttgttttgaaaacgtagtattttttaatgtgttagtttgatacgtttatattgttttttagattttttgaatatttttgtgatgttattagattgtattattttttttatttttgatgttttgagtataaggtgttttttttttttattttatttttattgttgaaagttttaaatgtgttattatattttgattttatgtgttataagtggtgaagaatttattgttaaatttatagatgttttatatatttaattttttttaataaaatttttgggtcgggtttcgtggtttacgtttgtaattttagtattttgggaggtcgaggtgggcggtttatttgaggttaggagttttagattagttttgttaatatggtgaaatgttgtttttattaaaaaatataaaaattagttgggtgtggtggtagacgtttgtaattttagttatttgggagattgggataggagaattttttgaatttggggtagaggttgtagtgagttaagatcgtattattgtatt

SEQ ID NO: 493 - DNA, 6091 bp, Artificial Sequence
  chemically treated genomic DNA (Homo sapiens)
agtgtagtggtgcgattttggtttattgtaatttttgttttaggtttaagggatttttttgttttagttttttaagtagttgggattataggcgtttgttattatatttagttaatttttgtattttttagtagaggtagtattttattatgttggtagagttggtttggagtttttgattttaagtgagtcgtttatttcggttttttaaagtgttgggattataagcgtgagttacggggttcggtttagaaattttgttaaaaagaattaaatgtgtgggatatttgtggatttgatagtaggttttttattatttatagtatatgaagttaaggtgtggtgatatatttaagatttttaataataaaaataaagtgaaaaaagaggatattttatgtttaaaatattaagggtaaaagagatggtgtaatttagtaatattatagaggtatttagaaaatttggaaagtagtataaacgtattagattaatatattagaaagtattacgtttttagagtaattagaaatacgtgataagaggggaatagatagtattaaaattaattttcgaggtaagtaatataaaaataaaatatttttttttttatattggaagggaaaagttagaagtttatttttcgtgaaattattaaatttgaaaagtaatttgagtttaaattttgagttttttttattttttttaaataattaaatattttgtagaataaattaaaatttaatatatatattttaaatagatgaaggagtaagatttaagggaggattttatttgggttattttgtagaataggattatttataatttattttgtatttatagaaatattttaataagaatatagaatatttttattttttaagaatatagggttaggtttagtggtttatatttgtaattttagtattttgggaggtcgtggcgtatggattatttgaggttaggagttcgagacgagtttggttaatatgatgaaatttcgtttttattaaaaatataaaaaattagttgggcgtggtggcgcgtatttgtaattttagttattcgggaggttgaggtacgagaatgttttgaatttaggaggcggaggttgtagtgagtcgagatcgtattatgtattttagtttgggtaataagagcgaaaaatttcgttttaaaaaaaaaaaaagaatatagaatatagaaattttttagtaaatagattatttttaagtagaggttattaattaatataattttgattgtattgtatttatatgtttgatacgagatatttattagaaaagtattttttttatgttagagtaaaatttgtagtttttaacgataaatttttaaaaagtaaattaataaattttagtatttgaatattttcgatgtgttttttttaaaggagtcgatatatttaaagttttttttatatatttaaattttttgtaaggattttattataatttttaataataaaattagtattatattattaatataattaatatacgaatatttgtgttattaattataatattaattatttaatatgagaaaagttagttttaaaaaggtggttatgaaattattggtatgtattattggagtgttaatttatatataggatttattaagtatttaaattgtatattatattggttaagtgttttataattattttattagcggtttttagtttaaagtaatttatgaagaattttatagaagaggaatcgaggtttagggaggaattaaagaaaattaaattttattttggaggaaataatattatttttttaaaacgtgttagatatttttaattattttttatacgtaatatgaattttgttaaagtaattaattaaagaatatgaaaaatattaagaaaacgtattgaattttgataaagcgttcgattgtttaaatagttaaatatttgagattgattatattttattatatagatataattataaggaagtaaaatttttttaaatgataaatttagtggttaaatataaaggagttatttttgttcgtatttgtaaaaagtaaataaataaaaaagcgtaattaaagaagtttaacgaataagtttaaagttaggatttgtaataaggagttagaatcgttattagaaaaaaagaatttagtttaagcgatgtagtagggaggaagttattaagaagttagaatttgttgttgtttaataggtttagttagtttattttttagaagataatagttttaattagaatttgtggtttaattagtgtatattttagtattagtaatggattatatttagtgtttttgagggtaataaaaaatttgagtcggcgttagatggggaggaaagttttttttttgttttatttaaatattaatatgttttttattttcgtgttatattttaatgagaaaggattatatttttatttagagtatagtttttttgagagttgttttgattttagttaggttttttagttagagtttatgaatttaattttttagttagattttatttagttaagagttttagtcggtatattatttttttttattttttttttgttaattttttaggttaatttcgtgatttatatttttatattttgtatagagttttaaatttcgtattttttattgtattttcgttttattgattttttagttaattttcgttttagtttttattttatttttgtttggttattttaaacgcggtattttagcgtttttcgatttttaacggtagttttttttttacgtcgttttttattttttcggtttcgtttttgtttttacgttttcggtcggttatttcggtttcgcgttttttcggttttattagattcgttttttttttcgtttttttcgttcgttcgttttttttttcgcggtttttcgtttacgtttattttgtaatagcgggcgtttagtcggttttttattttgtttatgagtttttagtatttttttattatttttttgtttatcgttttcggcgggtgggggttgaggtggtggtggtggtggtggtgcggttggaaggcgttttttatgagtttaattaggttattcgaattcgagttttcggagtcgttgtcgttttcggttttagagtttttttttacgttgtcggttatggtttgggtagggtcggagtttaggcgggttcgtcggttcggttcgattgcgagcgagggagagaagtagggcgtgaaggaggggtttttttcggtcgtcgtcgtcgtcgtcgtcgtcgtcgtcgtcggttattcgggcggagggaggagcggtcgtggggaggggagtgggcggcgtcgggagtgcgcgggacgcgtttttttagagcgcgcgagttcggggcgggcggggcgcgtttcggaggcggatcggtttattggtaagttcggggaagcggtcggtcgcggtcggattgggtagcgacgattttcgggttatcggtttcgagtagttcgcgtgtttatagttttcggaaagtcgcggttaggtttttgtgttcgtttttttcgtttttacgtcggggcggggcggggttaggttggggcggggtcggcggaatttttgggtttgcgttttttgttggagaaacggggaaaggagcggcggggggttggggagtaggtttaaggtggagtttgcgtagtagttagaaattaagatttttatgttttttgtgggcgggaggttggcgtttttggggtgggttatgggaatgtttaaattaagataggtggcgatggaatggaagagttttgatgttaagtttttttttatttttgataaatgaggaaatcgagtttagagttatttgtttatttatattgtgggaggatggtgggagaaaaaggaaagttatttttttattttttattatttttaattttttattaagatacgattaaggataggaatatgaatgttgcggtttattttagtcggattaggttttagaaagttttgagatatttaagttaggatttttttttttaggttttttgattttttgaaaagaaattattttttttttttattttttatttttatttttttggtttgtgaagattagttacgtttttgggaattgaattttaaatatgtatttaagatttttttatttagagtattgtattataggtcggcgtcgttagtatgagggtttttttagaagttgatttgttgttggtttcgttcgagggggttttttttttcgtttagggaatagaaatgttgtttttggttatttttattttttagttaattatatttttttaatgtaaaagtttcgttggaagaattttgaaaataggaattttttttttaaagagggaagtgttttgttttaatttattaattttgagttttagttttgggagtttgtagatttaggtgtgttagtattagtttcgttttcgatttttttttaggtttttttataaagtttttgatagattagggagttaaatttattcggtgtttttgtaaaggggaaaatatttttgaatgtagggattatttagataggtattttgggtttgtaatttaatcgtttttatttagaattgattttggagttaatattataatttattattagaagaatttttttttattattttttatttaggaagagaagaatttataaagggaaaatttaggtaaagttttattttttagtgttaatatttagttgtaggtttttcgttttttttttttggattattgaatattgaaatttttttttgtgtttttaatttattttgttattataggttttttaaagtatagtttagatagtatcgtaaaaaaattttaaatattttttattgtttcgggaataaaattgataagttgttttaattttaagttaaataattttgtagttttatattattttttggtatatatgttttatgttagttgatttattaagttattaaatataattattttttttttatttatttatttattttattttattttgagatagagtttgttatttaggttggagtgtagtggtataattttggtttattgtaatttttgtttttcgagtagttgggattataagtgttcgttattatatttgattaatttttgtatttttagtaaagatgagattttattatgttggttaagttggtttttaatttttgatttgaggggatttgttttttttagttttttaaagtgttgagattatgggtgtgagttatcgtatttggttaattttttttttttttattatcgttatttagattatttttttattttatttgtttgaagtatgttttaaaatttaatttattcggtttagtatagtggtttatatttgtaattttagtattttgtgaggtcgagggaggcggattattttaggttaggagttggagattagtttggttaatatggtgaaattttgtttttattaaaaataaaaaaatgaggtcgggcgtggtggtttacgtttgtaattttagtattttgggaggtcgaggtaggtgggatacgaggttaggagatcgagattatttttggttaatatggtgagattttatttttattaaaaatataaaaaaaatagttgggtgtggtggcgtacgtttgtaattttagttatttaggaggttgaggtaggagaatcgtttgaatttaggagttagaagttgtagtgagtttagattgtgttattgtattttaggttgagcgataagagtgagattttgttttaaaaatataaataaataaataaataaataaagttaataagaaaaggaagattatttttttttttattttttttttttttttgaaatagagtttcgttttgttatttaggttggagtatagtggtgtaattttggtttattgtaatttttatttcgggtttaagttatttttttgttttagtttttcgagtagttgagattatgtttagttaattttttgtattttaatagagatagggttttatcgtgttgtttaggttgattttaaatttttgagtttaggtaatttatttatttcggttttttaaagtgtt

SEQ ID NO: 494 - DNA, 15001 bp, Artificial Sequence
  chemically treated genomic DNA (Homo sapiens)
taggtttaggggcggcgtttattaggcgtggggggtgggagaggataggtgtttagtttcgagtatttttggggagttttgggatgggtagaggtttaaatgggttttgggtttttagtgtttttttttcgtttggttttatagatttagggaatagacggcgattagggtttattttaggagacgggtgtgagtgaaggggttttacgtggtttttgttttcggtattttagtttagtatatagatttttttaggggaggagtaggatttttagggattcggggtaaggggtttagagatatatagttttttttttttatttttcgtttagagggttagttagaggattatttgggggggtgttagttgtagttagggtcgtggcgcgtattttaacgagtttagtttagataggatgttgggtgggcggttagtttcgatagtagatgcggtagggttttattattttttgatttaggattggggtgatataggacggggtaggtggaggagatagttattcggggtttagtattattgtttttatggttataggacgtttgtaggtttgtatttgtttatttcgggttttttaggagggtgggagtatagatatattagttagggttgtttttttagattttttatataaagagattaatttatatggagtttttttttttattattttgagggtttttaggggaattggaatttgttatttaggatttaatttgagttttttattttgttgtggtttttagatgttttttattcgaggtaggagtatagtttatttgaagagtggttttttaatttttgatattttaggaaaagtgttttgtattgttgggggaattggaattaggtagtagggatttcgttttttatatcgattatgggaagtattcgttatagaggggttttttatttttttattattagttagttggtatttttttattttattttagttatttttttaatattattttatttatttgtttgtatagttgagggtattaaatatagagtgggtatagatttttaggttgttacgttaggtttttattttagacgggtataggtaggtaataaatggggaggttagggtacgttttattttatatatagttagagttattttttgttagtagttatttttaagggtaatggagatcgtttagtatttaggtttagggggtttttttagtttttaatttttatatttttatgttgggtttaagaatttttaagtttttattcgttgtatatgttttagattcgggatttggagtaggtagggttttagtgtaatttcggtttgggttttagggtttggtagggaagacggttaggtgtttttttagaaatgttagtaagttcggatgggggattttatattattgttagaagatttgagtggggggtcgagtggaggacggtattggggattggttttatttttttgttttatggttggttttttgggtaagggggaagtagtagtttcggttttatttttttgttttatggtcggttttttcggtagcggggaagtagtagttttagttttatttttttgttggttttttgggtagtgggaggtagtagtttcggttttattttttagggtttttttaaggttagttttgggttaggtgggagttattttgatttttaattttgtgatattgtatttatttaagattaggttttgtgaagttataagggtaggggtttttgtgtttgatgaaattcgtaattttttttattagttagtatatttatggtttagggttttaggtatgggaggtggttgttttcggtggggggtaggtagttggttagatttttgtttttgttcggggggatagcggagattaggttttttcgattttttttgtattttttgggttttatataattttagttttggtttttttggtatttcgatgtttcgggtggtttttcggtaggagtgattttttatttttaatttcgtttatttttaggaaggggttggagtatttttagggaaagagggtttttttttagaagtttttttggattaaatatcggggttttgagaggaagttgtttttgtttggttttttttaatttattttattattattacggggattatatggatagttataggtagtttattttttttacgttttatatacgtgttttaggttatattgtgggttaggttttttaaagcggtatttatttagatatgggggttaggatttacgcgttatgggtaggattgggtgggtttttgagggttagttggtggttttttacgtttcgggattgattattttttgagttattaggtgtgttagtttttttaggttattacgtttttagttttttgaatatttttttaaagtttttagtttttaggaaattgttggataaatatttcgtagagacggtggtggtagcggttggtagggtgttaggcggtatcgagttgtttttttatagtaaagtgagtttagtaggttttgggagcgggcgttagttgatagcggttatcgtggtttttattgtcgatatatttatcgtttcgatagttgtcgggggtttatttattttttttagtatattgagtagacggtttcgttgacggtagtttatgaggggttcgtaatttatttttttcgtttgttaggagatcgtatagtttatcgcgaagggttcggtttgttaggtttttgttcgggttcgggagtatatatttttttattagtagttttcgaattttgtaaataattaggttggggtgggggtaggggaggggttatataacggaggttagttgattttatttggttggagtttttaggtttgtgggtgaaatatatttattgtttttttcggtataagtttttttgagggggtataagtggttagtttgtataaggagaggtgtttgttttcgttaggtagaggattggcgttttatttgtttgggtttcgtttagtttaggatttattttgtttttttagaaagtttattaggtaggtagggcgggtagggtttattatgtttattagttttttgggaaaacggagatttaggggaggtgatttttagaggtagattatgattagagagattttaggttttgtcgttaaggtaggggttgtaatttgatataaattgtaaattttttattttttttcgttttattatggagtaggttttagttcgatatatatatttcgggaggaatatggtgcgggtaggcggtattattatgatttcgtttatttcgttgaggtatagtcggaggcgttggggtttttttttttgttattttagggaagtatttgggttttagttttttatttttttggggttttattgggtggggtattgggtttttttggtgttgtttttgatagattatttgggtttggatgtttttttttataggtattgttcgttatttatttttcgggtcggtaaaggtattttatttgttatatatttatttatcgtagagtttagtatattttaagattttgtttttgtttttgttttttattttatttttggtttgttttaaataagttttatttatgttatggtttattttgtttatttaggatttttgtagatgaggttgtagtttttttttggcgttttttattttgttttcgtttattttttttataatttgtagtaggttttgttaagtgttttttatttagtgggtttttagggtttttattttcgttttttgcgtgggaggaagttgggtatggggatagtatatagtgtttgttgcgagggagggttggttatagtgttttacgtgtagatattgttttcgggaaaggaagtgggtacgggtataggtttttttcggggttcggtcgggggtacgtagttatgtttatagttttttttttttttcgttttttttgggtagggtttttggcggttgaagggttttagtgttggttttttaatttttgatattttaggaaaagtgttttgtattgttgggggaattggaattaggtagtagggatttcgttttttatatcgattatgggaagtattcgttatagaggggttttttatttttttattattttgtttttgttttaatttggagttacgtttggggtaggagggtttttagagtacggttagttgtggagggtgttttttttgatttttcggtttgttgggatattgtggttttgattttcgtggttttattttatattttattaagtttgtgtagtttagcgttttcgcgttttatatttggttgttgtgtttttggttttagtttgtggggaggttagttagattttggttagtcgaagggtttttttgtattttttaggtttagggagtagttattttttcgttaggtttgtttagggggtgtttttatttttgagttggataattagttgagggtttgggtaggtgggttcgttaggttatagggtatgggtggggtttgtagttatcgggttcgtttggggggtgtgtgagtttaaatatagcgttttaaggattttattttaaagttcgtaatattggtagtagagttatttatgaatttttaatttttttaattttaacgtttttgaaatttaaatttattattttttaaggtttaaggaaaatatatttaaaggcggtatggtagggaagggaattttcgttggagatgaggaagtaaggggtttagggttcgtttaatagttttattttggtttggagttttagggttttttgttaatttgttcggggttttagcgttgggttgggggaatttttttttgaggttatgggattaggtataatggtttaagtagatagaagtagtaggtagttgtttatttagggtggtttggggagtaggtttagagttatagttatagttattagttttagttatgggagggttcgagggtagggtgttggttttaagtcgggtcgggtgtgtttaggtagaggggacgttagcgggggtcgcgttagtttttttcgtttagtttcgtgtaggatttttaggaattcggtttgatgtaattcggttaggttttttttgagagtggaaggtgtacgggggtttaggttttagtataggaattattttatttatattttgtttatttttttgggttttagttttttttttcggagtttagttttttatagggtatttttgtttagagagggttagtgattaagaaatatataggaagaagagttgtttatttaggagttattaggcgtgggggttaaggtttagggttggggttagtagtgattttttatttttatttaaggttatttcggtttttttttttgttgtttttgaagtgagaatttaataagtttttaaaataggaatttttttgatgttggcggtttttattatagttatgttatgatttttattagtttgtgttttttgtttttttttcgggtaggtttagggttgttgggatttttattttttgtttagtttttttattaggagttagtatatttgtttttttatttttgtttttggtttgtttacgggggtcgttttagatttttaacgtttttttaggggaggtagagtttggtattaattagtttagggttcgcgggttttatattgaagttatttagacgtagtttggggttgatttttatttgatagtttgggaaaaattgaggtttaggaggtataggtagttttggtttggagtttaaaggtttttataggttgaggggagagtttgcgggtttttttttttagggttttgttgggttttttattttggcggggtaatgagtagtttttatttgtatataaataattagttttgcggggtttttcgtagtagttgttttttggagtgggtttagagttttttatagatttttttttaagggtgtttatttagtaaagttaaggttttttttaggatgaaggggagtggtttgtattttttgaggttttttattttacgtagggattttaggattagttggatggttgagtagtagttggggatgtagtgaggttttatgtcgtttattaaagcgaagtaatatattggggtaggaattattttttttttgttttagtgttttttcgtagggatagttagtgttaggattttaaggcggggagagggggtgggaaggaggtttagtttaggtatttgtttggggttagagattagtttttatattttttatcgggacgtttggggttaatttagtaggagtggtgagggggttgttttgaggtttggattggggggtttatgttaggtatgggttcggggtagggtatggtaaggatttagatgttcggagattggatttttcgtgagtcgtatggatatacggtttcgtgttattcgggttcggttaggtatttagattcgtggtttggatacgttgtttatatatttaggagcgtttgtcgcgtaatttacgcgttttaggtagtttttttcgattttcgtttattcggttttggtttgttgggttatagtttgtcgaaggtagttaggtttgtagttttttttcggtttttttcggatagcgattagtttgagggagtttaggtggtgtttttgcggtcggtatttatttttggtttaggtttagttttttttcgagagtttagagtattttattttgggttttagtatttcggttattcgtttcggtttttttttgatttatttggtttagttatgtggacggggggacgtttaggaagatagtcgcgagtggataaaaataggttttaggtcggggttgtattagggtagttttttacggggttaggttgtagttaggttggtgtacggttttaggagtattggggtaagcgggtaaggtgagtaagttgtttggggaaagtattttaaaagagttatatagtttttggttaaagtttggtacggagttattaaaggaaggaaaattgtaggttggaggtcgagtttagttagatttgcgttttggtttaggattgattttttaaaattgttagtttttaaaaattaggagattttatataatagaataaatttttgaaaatgtaaacgtttgagtaatattgagtttattagattattaatggttagagttgagttgggttgtttatttagtgagatagtcgaaataggaggggatatttggttttttgtttttataggttttattagtttttttattagtttttgtttttaatagtttaagtttattttttaggaattatttttttgttagatgtgtagatttagaggtttcgtttgggtttagttataggtttatataggtttgtagtcggaatttttgtgtttttatgttcggttttttttgtttttgaagtttttttgatttagagtatatatattagaataatagaaagtagtttgggttattttttagagatgacgtttattttttaaggagtaggagaaggagtttgtagatattgttattttattttttatatatagggtatattcgtttttttttattttaatgattatattatttttgaaggtattattacgttacgtgtggttagtttaagtagtcgtggtgggattgttatttggggatttagttgagaattaaagtgttttaggttacggtcgtggggagtttcggtaaaggggataggtgcgggttagtttttgagataagtattttgatttgtaggagtaaggttgggggggagtggaatagggcgtttgtaaggggttgcggtcgggtttggaggatagttattgcgtttttttttttttttttatttttagttaggtttgagtattgtgaagtacgggtggggttagtttagtatagttttgttagggataggaaggtagttagtatttttaattagtgttgcgggtggggttggttttgttaggagggtggtatagtatatttgtaagatatataggggattttagggacgggagtggcgaaatgcggtaggtttcggaggataggttttttttcgtaaggagcggtcggttatgcgggtggacgttatttgttttcggtaataagaggggttatgtttgttaagggtatatgttatatttacgttattttttatttttagcgtttattatattggggatggaggaggaagagtcgggggtagaggtataggatttttttttttggtttgaggttaggggttagatgatagagtttagaggttgttgaggttggtcggattttaatttagggtcgtttataagttattttttattttattaggttttttttttattatcgttttttggtgtagatggggaaattgaggtttaaggagtttaatgattttgtttttggaaagggttatggcgatagagtggttaattagggtttaaatttagttttttggacgttttattgggtttgatgttttgtttttgttaggttttttttgaaggtacgatattagtagtagtttgaaaattatttggtttcgggggagtatttttgtttaggtttagttggttgatgggtgttttagtaattggggtttgggtttttgggtagttaaggttttggtattttttgggttagttcgagatttaatagtttattaataaatatatatttgttaaggataaagaagtagcggttttaggtagtagattatgtgatatagagaggaatagggttagggtcggggtagggggtttttgatattaaagagggttgtgaggtgaggagaggatttttaggtataggtggtaggatttttggggaataagtaggggatagtatacggggaggggatggagaaggtaggatgcggtaggaggttttggggggaagtagagttagaagttttttaaggattataggcgtttgtagtttttttgtttttatttcgaggtttcgcgtgttattattggtagttgtttatttaaatattttaaatatatagttagttatatttttgatttttttagtattttatttcggttatttttttattttatttttaggtttttgtggttttttaggtttgtttttttgtgagtttttatatattttataatgttttattttgtgatatttatttttgttatatttttttgtttgttttagttgtgtttggggtttttttattattagatgtgaaatttatttgttagagggtgtacgtaaagtcggggggttgttggtatgagattattagaatttaggagggaataagtttggaaaaagaagttaggagagggcggatcgatttcgtttggggtagaagagagtgatttggttagaggatttggatttgaataggaagtttattttagtaggatagaggagtaaaatagttatttagattttatcgtatttcgttgagtaacggagggtgggtgaggtagaagggtttgtatagggttggaaggggtggggttatgtttttagtttttattttatttagttgttggttaggtttttcgggtagtattttttttataggttgtaaggttaaatgagtgaggagggggatataggggttgggggatttggtttagttagttttgtagttttaaggtaaatatgttttgtgtttaggcggtacggattttttttatttttaaagtttaggtttgaagtaggtattaggttaagttaagtagttttgttttgtttttaggagtttttgggtagtgttttgggtcgttagcgtgttagattttggaatagtttagtgttttcgttgttttttaggaaagttaggagagaggttggtagtagttttttcgtttgttagggtttatattaggaagttatttagatggtcggttttgtatagggttttatttttttggttttttcgaggtcgtgttttttatgttatgggaagatatggggtttaggatatttattttaggttagtttaggagttttaggggaggtagttttttttatttagtagggtataggtatttatagattttggggttattatttttatttttttttttttaggtttagttttggtagcgggtattaatttcgtttgtgtagttaatttttttttataatagttacgtcgtttatggtgttcgaggttttcgcgacgtttacgcgttttttttaggttggcgtttttcgagtttagttggtttggttatagtttttgggagaagtaaaggaagttgaatgtgaggttacgtttggttaagggtagtttttcgttttgggtgagttagagatttattgtacgtgtttgggggttttattcgtatttgtttttttaggtgggttgttatttttttaagttttttgatttttatttgttcgtttgttttttttttttttaaaatatttagggttgttaagtgttaaatttatgtaattgaatatagttttttggatttgggtttttttttattttaggtttagagtttttagtttttgttattattattcgtaatagttaggttttgagagttgttgttttgtttatttttttatttttattttttttagtcgttggataaattatttttatttttaaaaggtttttttagtttttttaatttgatgtattagttgataggttgttttttttaggtagtttttttgatttttttgatttaggttggttcggttttttttaagtttttggtgatagatggtttcgtttgttttttttgtttatggtgtttttatttatggattttgggatagggtatagggtttttttttgttttttagattaggaaagtaaagaaatttaaatatgaggaagataggattaggatgtaggttattggcgtaaacgggagtttagagttttttagcgtaagtttaaaaattttttgggagaaattttaggttttttttaaattatagcgtttttgtcggtttgaatttggtttatttatttggttaatatgtatcgggcgttttaggttttgttaggtttagtgttgggcgttggagataaagagaggtttagataagttcgttagtgaggagtatttagtttagggtggttatagatttataattatagtagtcgggaggtagtaagtaagtgggggagtattggataggttttcgttttgtagcggtttattagttaatttttatttgagtatattttatttattgattttgtatggtttttttattttttttttgatggatgaatttttaggtattttttaaaatttagtttttatattattaattataggtatttttagaaagagtatttcgtatgttttttttgtgagtagttttttgttatttttttagatgggtttttttgaggggaggagggttttttttgggatttttaggttaggtagagatttttgacgatttttgtggaatggattttaatatgggtttttttatagttagtttagacgttttttttttaggttatttttttggtttttcgaggtaagggttggatatttataaagggttgttttgtattgattgttttaagttatatttagaatggtaggaaggtttattgttttgtgtttaatgttaggatagggaagattatattttatttaaagagggaaatgttttaagtatttagtaggatggaaagtaggttagattcgaggaaggtatcgtaggatttcgagggtagggtttcgagtcgcgtacgttttaggtatagggggttttgacgatattgagtgggcgtggtttggaggtagagggttggatttaaagatttttggatgtttttttatttttatacgggtttgagtttttttaaggtttgttgttgatagagttagatagttgtttagagttatgtgtaaaaatatatttgtgtttatatagggtggtgtacgtttgtatagaaacgtatatattaggttagtatagggttgtttgtgggggcggagggatttcgattttttatagttttcgtatttgtcgtttgtttttattataagtatatatttttgttattattattaagttataatttaaaaaaaaatattttgttttcgaaagggtttttttatttgtttttagaattttggtgtatgagaagtttatatagttttcgggagaggtaatcggatttttattaacggatttcgttcgtttttcgttcggatgagggatttaaagtagttaagaagtggttatttggagtaaggtcgagagatttaggagtgaatgtggggcggtttttggttgtagagtaggggtttaagtttattcgttgattaaggtagtatttagaggtcgtttcgataggattaagttcgttagcgttttaggatatttaatttaaggggtaagttttagttgttttttaagttttggtttttgggatgggcgggtaggatttttagggtttatttaagataggaagtagtttcggggtttaggagggttatagttttttgtggttagtttgggtatttcgttattacgtataatttttcgttcgtgggaaacgaagttttttttcggggtttttttataaatttgaaggtcggtcgcggcgagtttttttttaatttcggggtattttcgtcggttgtttcgttggtttagcgttcggggagttttacggttcgtaggggtatttcgagttttagttttaggttcggcggcgttttttttttcgggtttcggtttcgttcggcggagcggtttttttaaggttatgagggaggttggggtcggtagtttgtattttcggcgttcggcgtggggtcgtttttttttggtcgggttcgcgcgtttcgcgtttttttcgtttaggttcgttcggttattttttgttttcgtttttttattttggcggcgtcgcggttcgcgtttcggttcgatcggtcgcgaataaagcggttcggttcgcggggaggaaatttaggttcgggcggttacggcgggcggggatttatcgggtcgtcgcgttcgggcgcgagcgcgggtttagtcgggtcgcggttttcggcgttcgtcgtttcgtattttcgcgggtcggcgttgggcggggtcgggttggaggtcgcggcgggcgggggcgttgttcggggtcgggtttcgcgtgtcgtcgtcgttcggtgttcggtgtttagcgttcggtgttcggtcgtttgttttcgttttcgggtcgcgttgcgtgcgttgggttagtcgtttgtcgcgttcggttttgtcgtcgtcgtcggttcgtttttttttcgtttcgcgttcgtttcgcgttcggagtcgttcgtttatattcgttttcgtcgttcggggcgtttttatcgcgcggtcggcggcgagggcggagcgcgttcggggagcgcgcggtcgggttgaggggtagttttcgacgatttggggtttgggttgggtcgttaacggagttcggttattagttagttcgtttcggggttacgttttttttggttttagttttttcgtttgtaaagtgattcggcgtttttgggttcgttttgtcgtgattttagtagaaggggttcgagataggttagggacgaatttcggatttttgttttcgcgcgcggggcgggggtggtttaggttgatttttaggttgttttattttggggggcgtggagggggcggttaagagtgatttaaaaggtttaattttaagattttgtgtttttgggggaagtgcgggaggatgttaggataggaggttagttggaggtgggtttttaaggagtaggaaggtttcgaggggagttaattatttatttaggtattggtagttatatttataaaagggggattttgttggggagtgggagaagaggggtatattttgtttggtttttattttgagttgggagtagatattagatagaggaggagcggtgtttagggtgggttgtgatagttgatagtttagagttttttttgttgggtggatttggttagttcggatatttagttcgaagtttattgggaggtagatggttcgggtatggaatgagtaagtgggatatagattttttttttttggatatttataggagagtgtaggtgattgttatttcgatttttttttagttagaagttttttcgataattgttttttttttattttagaggtttatagttgataataatttttttgtgaaagatagatttttgtgagttatttttttgaggttgttaagtattggggttgggggagtatttttatttttagttagagtgagtttagttggtagtaggggagggggtgggaggagatgtagatagaggtagtaggttcggtttagtgtttaggatagagtttgtagttaaaattcgggttttatttttgttttttggggttgattaagagaaggattttttttttttgtatgagggtattcgttttttagataggggattttttatttttgtttttcgtttgagtatttttgtttttttttagtttagattttgtaattttaggaagggtttatttttagggggttaagttagaggtttagtggtttgcgtcgtttgggtgggatatttgatataagggttgtttttagagtttgggcgtttggtgtttgttttttatttagtaaatttgtattatgagttatttggggttttttttgggattgttttatttgtttattgtttttcgaggaagagtttttggtatttgtttattattttgggttttgttatgtaaggatggaggaaggaatttagggaggaagtagagggtaagagggttatgagataaggttagtaagtggtcgaggtttggggatgtgggagggagtagggtatttttttatggaagaggtagtgatattgcgggttgtttttgaagtggttggattttttgtttattttgtattggttgtttttaaggaggttttttagtttttttagtttggtgttttggtatttgttggtgtttgtaatttattgtgggttttatattttagttttgtttttattttggtatgaattgtttttttttaaga

SEQ ID NO: 495 - DNA, 15001 bp, Artificial Sequence
  chemically treated genomic DNA (Homo sapiens)
ttttgggggagggtagtttatgttaaggtgaagataggattggagtgtggggtttatagtgggttgtaggtattagtagatgttagggtattaggttgggaagattgggaggtttttttggagatagttagtgtaaaataagtaagaggtttaattattttaagaatagttcgtaatgttattgttttttttatgagagggtgttttgtttttttttatatttttaagtttcggttatttgttggttttgttttatggtttttttattttttgttttttttttgaatttttttttttatttttgtatggtagagtttaggatggtggatagatattaggaattttttttcggggagtagtgggtaggtgggatagttttagagggagttttaggtggtttatggtgtaggtttgttgggtgagagatagatattagacgtttaggttttgggggtaatttttgtgttaggtattttatttaagcggcgtagattattgggtttttgatttggttttttggaggtgggttttttttggggttataaagtttgagttgggagggagtagaggtgtttaggcgagaggtaggaatggggagttttttgtttgaggagcgagtgtttttatgtagggggagagagttttttttttggttagttttaagaggtagggatgaagttcgagttttggttgtagattttgttttgagtattgggtcgaatttgttgtttttgtttgtatttttttttatttttttttttgttgttagttgaatttattttggttgaaaataaaaatgtttttttaattttaatatttagtagttttaggaaggtaatttataagagtttgttttttataaaagggttattattaattgtgggtttttggaatgggggaggggtagttgtcggaggaatttttggttaggaaggggtcggggtggtagttatttgtatttttttgtgagtgtttaggagaaaggggtttgtgttttatttatttattttatattcgggttatttgttttttagtggatttcggattgggtgttcgggttgattaagtttatttagtagggagggttttgggttgttagttgttatagtttattttagatatcgttttttttttgtttggtgtttgtttttagtttaaggtgggagttaggtaaggtgtgtttttttttttttattttttagtaaagttttttttttgtgagtgtagttgttagtatttaggtgaatggttgatttttttcggagtttttttgttttttggaggtttatttttaattgattttttgttttggtattttttcgtattttttttagaggtataaggttttgggattgggttttttaggttatttttggtcgttttttttacgttttttagagtggggtagtttgaaagttaatttaagttattttcgtttcgcgcgcggaggtagaagttcgggattcgtttttgatttgtttcgggttttttttgttagggttacggtagagcgagtttagaagcgtcgggttattttatagacggggaaattgaggttagagagggcgtggtttcgggacgggttggttggtggtcgggtttcgttagcggtttagtttaggttttaggtcgtcgggagttgttttttagttcggtcgcgcgtttttcgagcgcgtttcgttttcgtcgtcggtcgcgcggtggggacgtttcgggcggcggaggcggatgtgggcgggcggtttcgggcgcggggcgggcgcggggcggggagagggcgggtcggcggcggcggtaggatcgagcgcggtaggcggttggtttagcgtacgtagcgcggttcgaagacgggagtaggcggtcgagtatcgagcgttgggtatcgggtatcgagcggcggcggtacgcgaggttcggtttcgagtagcgttttcgttcgtcgcggtttttagttcggtttcgtttagcgtcggttcgcggggatgcggagcggcgggcgtcggaggtcgcggttcggttaggttcgcgttcgcgttcggacgcggcggttcggtgagttttcgttcgtcgtggtcgttcgggtttggatttttttttcgcgggtcgggtcgttttgttcgcggtcggtcgggtcggggcgcgagtcgcggcgtcgttagaatggaggagcgggagtaggaagtggtcgagcgggtttgggcggggagggcgcggggcgcgcgggttcggttaagggagggcggttttacgtcgggcgtcgggggtgtaggttgtcggttttagttttttttatgattttggggaggtcgtttcgtcgggcgaggtcgggattcgagagaagggacgtcgtcgggtttggagttggggttcggggtgtttttgcgggtcgtggggtttttcgggcgttgggttagcgaggtagtcggcggaggtgtttcggggttggagaaagattcgtcgcggtcggtttttaagtttgtgggagggtttcggaaggagatttcgttttttacggacgaaaagttgtacgtggtggcggggtatttaggttagttataaaggattgtgatttttttgggtttcggaattgttttttgttttgggtgggttttggaggttttgttcgtttattttagaggttaaggtttggagggtagttggggtttgttttttagattgagtattttggggcgttagcgagtttggttttgtcgggacggtttttgagtgttgttttggttagcgggtgagtttgggtttttgttttgtagttagaggtcgttttatatttatttttgggtttttcggttttgttttaggtggttattttttgattgttttgagttttttattcgagcgaagggcggacggagttcgttggtgggggttcggttgtttttttcgggagttgtgtagattttttatatattagggttttggaggtagatggaggagttttttcgaaaatagagtatttttttttaagttgtgatttaataatagtagtaagaatatgtgtttatggtaaaggtaggcggtaggtacggaggttgtgggaagtcggggttttttcgtttttataggtagttttgtgttggtttggtgtatacgtttttgtgtagacgtatattattttgtgtgagtatagatgtatttttatatatggttttggatagttgtttgattttgttagtagtaggttttggaggggtttaggttcgtgtgggggtggggggatatttagaggtttttgagtttagttttttgtttttaggttacgtttatttagtgtcgttagagttttttgtgtttgaggcgtgcgcggttcggagttttgttttcggagttttgcggtgtttttttcgagtttggtttgttttttattttgttaagtatttggggtatttttttttttgggtaaggtgtggttttttttgttttggtattagatataaggtagtgggtttttttgttattttaagtgtagtttaagataattagtgtaaagtaattttttgtgggtgtttagtttttgtttcgggaggttagaaaggtggtttggggggagagcgtttaagttggttgtggaaagatttatgttgggatttattttatagaggtcgttaggggtttttgtttggtttggaggttttagagaggatttttttttttttaggaaggtttatttggaagggtagtagaggattgtttataggaagagtatgcgaagtgttttttttggggatgtttgtagttggtgatgtgggaattgggttttgagggatgtttaggagtttatttattagaggggaaatgaggaagttatgtaggattaatggataaagtgtgtttaggtgagggttggttggtgggtcgttgtagggcgggggtttgtttagtgtttttttatttatttgttgtttttcgattgttgtaattatgggtttgtaattattttggattgggtgttttttattgacggatttgtttgaatttttttttgtttttagcgtttagtattgggtttggtaaaatttgagacgttcggtatatgttggttaaatgaatgaattagatttagatcggtaggggcgttgtggtttaggaggggtttggggttttttttaggaggtttttgggtttgcgttggagggttttggattttcgtttgcgttagtggtttgtattttggttttgttttttttatgtttgaatttttttgtttttttagtttggggagtagggaggagttttgtgttttgttttaggatttatgggtaggaatattatggatagggagagtaaacggggttatttgttattaggggtttagggaaggtcgagttagtttgggttaaagaagttaaaggggttgtttggaggaggtagtttgttagttggtgtattaggttagggaggttgggaaggttttttggggatgggggtgatttgtttaacggttgggggaggtgggaatggggaggtgagtaaggtagtagtttttagggtttggttgttgcgggtggtggtggtaggggttggaggttttaagtttagaataaggagaggtttaggtttagggaattgtgtttaattatatggatttgatatttggtagttttgagtgttttggggagagggaaggtaggcgggtagatgggggttagagagtttagagggatggtagtttatttgggaaggtaggtgcgggtggagtttttaggtacgtgtagtgggtttttggtttatttagggcgaggagttgtttttagttaggcgtggttttatatttagttttttttgttttttttagaggttgtggttaggttagttgggttcggggagcgttagtttgagaggagcgcgtgagcgtcgcgggagtttcgggtattatgagcgacgtggttattgtgaaggagggttggttgtataaacgaggttagtattcgttgttagggttgggtttggggagggagagatgggggtagtagttttagggtttgtgagtgtttgtgttttgttgggtgggaggggttgttttttttggggtttttgggttggtttagggtgagtgttttgggttttatgtttttttatggtatggagggtacggtttcggggaggttaggaggatgaggttttgtgtagggtcggttatttgagtggttttttggtgtgggttttggtaggcgggggagttgttgttagttttttttttggtttttttggaaggtagcgaggatattgggttgttttagggtttggtacgttggcggtttagggtattgtttaagggtttttgagggtagggtagggttgtttggtttggtttggtgtttgttttaggtttgagttttgggggtggggggaattcgtatcgtttgggtatagggtatgtttgttttggagttgtagagttggttgagttaagttttttagtttttgtgtttttttttttatttatttggttttgtagtttatggaggaggtgttgttcgaggggtttggttagtagttgggtgggatgggagttggggatatagttttattttttttaattttgtgtaggtttttttgttttatttatttttcgttgtttagcggggtgcggtggagtttgggtggttgttttgtttttttgttttgttagggtgggttttttgtttaggtttaggttttttggttaagttatttttttttgttttaggcggaatcggttcgtttttttttgatttttttttttagatttgtttttttttaagttttagtgattttatgttagtagtttttcggttttacgtatattttttagtagatgggttttatatttggtagtggggagattttaaatatagttggagtagatagggaggtgtggtaaaagtaggtgttataagatggggtattgtgggatgtataggagtttatagaagagtaggtttaaggagttataggagtttgggggtggggtgaaggagtgatcgagatgagatgttgggggaattaggggtgtggttggttgtgtgtttggagtgtttgagtgggtagttattagtgatggtacgcggggtttcgagatgaagataaggaggttgtagacgtttgtggtttttggggagtttttggttttgtttttttttaaggttttttgtcgtattttgttttttttatttttttttcgtgtgttgttttttgtttgttttttaggagttttgttatttgtgtttggaggttttttttttattttatagttttttttggtgttagggattttttgtttcgattttggttttgtttttttttgtgttatatagtttgttgtttggggtcgttgtttttttatttttggtaaatgtgtgtttgttgatagattgttggatttcgggttgatttaggagatgttagggttttgattgtttaggggtttaggttttagttattggggtatttattagttagttgggtttaggtaggagtgttttttcgaggttaggtgatttttaggttgttgttgatgtcgtgtttttaggaggggtttggtagggataggatattaggtttagtggggcgtttagagagttgagtttgaattttggttagttattttatcgttatgattttttttaagagtaaggttattgagttttttgggttttagtttttttatttatattagggagcggtggtgggagagagatttggtggagtggagaatggtttgtgggcggttttgagttggggttcggttagttttagtagtttttgggttttgttatttggtttttagttttaggttaggagagagggttttgtatttttattttcggtttttttttttttatttttagtgtagtgggcgttgaggatgggaggtggcgtggatatgatatatgtttttggtaggtatagttttttttgttgtcgagagtaggtggcgtttattcgtatggtcggtcgttttttgcggaggaaagtttgtttttcggggtttgtcgtatttcgttattttcgtttttggggttttttgtgtgttttgtagatgtgttgtgttatttttttggtagggttagttttattcgtaatattggttagaggtattagttgtttttttgtttttagtagggttgtgttgggttgattttattcgtgttttatagtgtttaggtttggttgggggtggggagggagggagggacgtagtgattgttttttaggttcggtcgtagttttttgtagacgttttgttttatttttttttagttttgtttttgtaggttagggtgtttgttttagaggttggttcgtatttgttttttttgtcgggattttttacgatcgtggtttggggtattttggtttttagttgaatttttaggtgatagttttattacggttatttgggttggttatacgtggcgtgatggtgtttttaggggtgatgtggttattgagatgagaggggacgggtatgttttgtgtgtgaggggtggggtggtagtgtttgtaggtttttttttttgttttttgggaggtgagcgttatttttgggaagtggtttaggttgttttttgttgttttgatgtgtgtgttttgagttagaggagttttagggatagaagggatcgggtatggggatataggagtttcggttgtaggtttgtgtggatttgtggttggatttaggcgaggtttttgggtttgtatatttaatagggagatggtttttggagggtgagtttaggttgttaagggtaggagttagtgaggaggttggtggggtttatagggatagggggttagatgtttttttttgtttcggttgttttattggataagtagtttagtttagttttggttattggtggtttggtgggtttagtgttgtttagacgtttgtatttttaaagatttgttttgttgtgtgaagttttttgatttttgaaggttgataattttaaaaaattaattttgggttagggcgtaggtttggttgaattcggtttttagtttgtagtttttttttttttgatagtttcgtgttaggttttggttagaggttgtgtggtttttttgaggtattttttttaaatagtttgtttattttgttcgtttgttttagtatttttggggtcgtgtattagtttggttgtagtttagtttcgtggagagttgttttggtgtagtttcggtttggagtttgtttttgtttattcgcggttgtttttttgagcgttttttcgtttatatggttggattaagtgggttaggagagggtcgaggcgggtggtcgggatgttgggatttaggatgaggtgttttgggttttcgagaaagggttgggtttaggttaggagtgggtgtcggtcgtaggggtattatttggatttttttaggttggtcgttgttcgagaggggtcggggaagagttgtaggtttggttgttttcggtaggttgtgatttagtaggttaaggtcgagtgggcgggggtcgagggaagttgtttggggcgcgtgggttacgcggtagacgtttttgagtgtgtgggtagcgtgtttaagttacggatttgggtgtttggtcgggttcgggtgatacgggatcgtgtgtttatgcggtttacggagggtttagttttcggatatttgagtttttgttatgttttatttcgggtttatgtttggtatagattttttagtttaggttttagggtagtttttttattatttttgttgagttagttttaggcgtttcggtggggagtatggaggttggtttttgattttaagtaggtgtttaggttgggttttttttttatttttttttttcgttttgaagttttggtattggttgtttttgcgggggggtattgaggtagggagagagtggtttttattttagtgtgttatttcgttttggtgagcgatatagaattttattgtatttttagttgttgtttagttatttagttggttttggggtttttgcgtgaggtgggggattttagagggtataggttatttttttttattttggaggaggttttggttttgttgagtaaatatttttgagaagaggtttgtgggggattttgagtttattttagagagtagttgttgcggagggtttcgtagggttaattgtttgtgtgtagatggaggttgtttattatttcgttaggatgaggggtttagtaggattttgagggagggagttcgtagattttttttttagtttgtgggaatttttgggttttaggttagggttgtttgtgttttttgggttttagttttttttaggttgttaggtgagggttaattttaggttgcgtttaggtggttttagtgtgagattcgcgggttttgggttggttagtgttaagttttgttttttttgggggagcgttgagggtttggaacggttttcgtgggtaggttagggatagagatggggaggtaagtgtgttggtttttggtgggagggttgggtagagagtgggggttttaatagttttgggtttattcgggagaggggtaggaggtataggttggtggaggttatggtatggttgtggtggaggtcgttagtattagggaggtttttgttttgggagtttgttgagtttttattttaaaaataataaaagaggaagtcgaggtggttttgagtgggggtgaggggttattgttggttttagttttggattttagtttttacgtttggtggtttttgagtggatagtttttttttttgtgtgttttttggttattggttttttttgggtagggatgttttgtggggggttggatttcgggaagggaaattgaggtttaggagagtggatagaatgtgggtggaatgatttttgtgttggggtttagattttcgtatattttttatttttaggagaagtttggtcgggttgtattaggtcgggtttttagaagttttgtacgaggttgagcggagggaattggcgcggttttcgttggcgttttttttgtttgggtatattcggttcggtttggggttagtattttgttttcgggtttttttatagttgagattggtggttgtggttgtggttttgggtttgttttttaggttattttgggtgggtagttgtttgttgtttttgtttgtttggattattgtgtttagttttatggttttaggagaaggtttttttagtttagcgttggggtttcgggtaggttggtagagggttttggggttttaggttaggatggggttgttaggcgaattttaggttttttatttttttatttttaacgggagtttttttttttgttatgtcgtttttaggtgtgttttttttgaattttaaggaatgataggtttggattttagaaacgttggaattgagggggttgggagtttatgggtgattttgttgttaatgttgcgggttttggggtgggatttttggggcgttgtgtttgggtttatatattttttaggcgggttcggtgattgtagattttatttatattttgtaatttggcgggtttatttgtttaggtttttagttggttgtttagtttaggggtggagatattttttgggtaggtttggcggggaggtggttgttttttgggtttggagaatgtagagaggtttttcggttggttagggtttggttggtttttttatagattggggttaggggtatagtagttaggtgtagggcgcggagacgttgagttgtataagtttggtgaggtgtggggtgaggttacgggggttagggttataatgttttagtaggtcgggggattagaaggagtattttttatagttggtcgtgttttgggggtttttttgttttaggcgtggttttaagttggggtagaaataagatggtggggagatggaaggtttttttgtggcgggtgttttttatggtcggtgtggaggacgaggtttttattgtttggttttagtttttttagtaatgtagggtattttttttggggtgttagggattgagaggttagtattggagttttttaatcgttaggggttttgtttaagagagacgggaggagggaggggttgtgggtatggttgcgtgttttcggtcgagtttcggaaggagtttgtgttcgtgtttattttttttttcgagggtagtgtttatacgtgggatattgtggttagttttttttcgtagtaggtattgtgtgttgtttttatgtttagtttttttttacgtagggagcgagggtgagggttttgggaatttattgggtggagggtatttggtaaagtttgttgtaagttatggggagagtgggcgggggtagagtaggaggcgttagggaggggttgtagttttatttgtaggggttttgagtaggtagggtgggttatgatatgggtggggtttgtttggggtagattaaaaatgaggtgggggatagggatagggatagggttttgggatgtgttgggttttgcgatggatgggtgtgtggtaggtggggtgtttttgtcggttcgaggggtgggtgacgggtagtgtttgtgggggaggatatttaggtttaggtggtttgttaggggtagtattagggaggtttagtattttatttagtagagttttaggagaatggaaagttgagatttaggtgtttttttggagtggtaggaagagaggttttagcgttttcggttgtgttttagcgaggtggacggggttatggtggtgtcgtttgttcgtattatgtttttttcggggtgtgtgtgtcgggttgaggtttgttttatggtggagcggaaggaggtgaagaatttgtagtttgtgttaagttataatttttgttttggcggtaggatttggggtttttttggttatgatttgtttttgagggttattttttttaagttttcgtttttttagggagttgatgggtatgatgagttttgttcgttttgtttgtttggtgggttttttgggagagtagaatgggttttgggttgggcgaggtttaggtaggtggagcgttagttttttgtttggcgggaatagatatttttttttgtgtagattggttatttgtgtttttttagaagggtttgtgtcgggaggagtagtggatgtattttatttatagatttgggggttttagttaagtggggttagttggttttcgttgtgtggttttttttttgtttttattttagtttggttgtttatagggttcgagggttgttggtaaaggggtgtgtattttcgggttcgggtagaggtttggtaggtcgggtttttcgcggtgagttgtgcggttttttggtaggcggggagggtgggttgcgggttttttatgggttgtcgttagcggagtcgtttgtttaatgtgttggagaaggtaaatgggttttcggtagttgtcggggcgatggatgtgtcggtagtggggattacggtggtcgttgttagttggcgttcgtttttagggtttgttgggtttattttgttgtggagaagtagttcggtgtcgtttggtattttgttagtcgttgttattatcgtttttgcgaagtgtttatttagtagttttttgagaattggggattttgagagaatgtttagggagttgaggacgtggtggtttaggggggttgatatatttggtggtttaggaggtggttagtttcgggacgtggagggttattagttggtttttaggggtttatttagttttgtttatggcgcgtgggttttggtttttatgtttaagtgggtgtcgttttggggggtttgatttatagtgtggtttgggatacgtgtgtgaggcgtggagagggtgggttgtttgtgattgtttatgtggttttcgtggtggtggtggggtgggttgggggaggttaggtaggagtagtttttttttagaatttcggtatttggtttaggaggatttttgggaaggaattttttttttttgggggtgttttagtttttttttggggatgagcggggttggggatggaaggttatttttgtcggagggttattcgggatatcgggatgttagagggattagggttggggttgtgtggggtttaggaggtgtaggaggagtcgagggagtttggttttcgttgttttttcgggtagggataggagtttggttaattgtttattttttatcgagggtagttattttttatgtttggagttttgggttatggatgtgttggttggtggggagggttacgggttttattaggtataggagtttttgtttttgtggttttataggatttggttttggataggtgtagtgttatagggttaagggttagggtggtttttatttggtttagggttggttttgagagaattttgaagggtgggatcggagttgttgttttttattgtttagggggttagtaggagggtgagattggaattgttgttttttcgttgtcgagggaatcggttatggggtaggagggtgggatcggagttgttgttttttttttgtttaggggattagttatggggtaggaaggtgggattagtttttagtgtcgttttttattcggttttttatttaggttttttggtagtggtgtggggttttttattcggatttgttgatatttttgaaggggtatttagtcgttttttttgttagattttgaggtttaggtcggggttgtattgggattttgtttgttttaggtttcgggtttgaaatatgtgtagcgggtggggatttgggggtttttgagtttagtatgggggtgtgagagttagggattgaagaggttttttgggtttgaatgttgggcggtttttattgtttttgggagtggttgttggtaggagatgattttggttgtgtgtggggtggggcgtgttttggtttttttatttgttgtttgtttgtattcgtttggagtgagggtttggcgtggtaatttgggggtttgtgtttattttgtgtttggtgtttttagttgtgtaggtaggtgggtggggtggtgttgggggggtgattggggtggggtggggggatgttagttggttgatggtggggagatggaaggtttttttgtggcgggtgttttttatggtcggtgtggaggacgaggtttttattgtttggttttagtttttttagtaatgtagggtattttttttggggtgttagggattgagaggttattttttaagtggattgtatttttgtttcgagtggggggtatttgaggattataatagggtggggaatttaagttaagttttggatgataggttttagtttttttggggatttttaggatagtgaaggagaagattttatgtgggttggtttttttgtgtgaggggtttgggagggtagttttggttgatgtgtttgtgtttttatttttttgagggattcggagtaggtaggtgtaggtttgtaggcgttttgtggttatgaggatagtgatgttgggtttcgggtggttgttttttttatttgtttcgttttgtgttattttagttttggattagggagtagtggggttttgtcgtatttgttgtcggggttggtcgtttatttagtattttgtttgggttgaattcgttaagatgcgcgttacggttttggttgtagttggtatttttttaagtgattttttagttgattttttaggcgagagatgaagaaagagaattgtgtgtttttggattttttatttcgggtttttggggattttgttttttttttggaggggtttgtgtgttgggttgggatgtcgaagataaaggttacgtgaggtttttttatttatattcgttttttggggtaggttttgatcgtcgtttgttttttgggtttgtggggttaggcgaggggaaggtattgaaagtttagggtttatttgggtttttgtttattttaggattttttaggaatgttcggggttgggtatttgtttttttttattttttacgtttggtaagcgtcgtttttgggtttg

SEQ ID NO: 496 - DNA, 4000 bp, Artificial Sequence
  chemically treated genomic DNA (Homo sapiens)
tttttttattttaaagaagagagaggttttttttattttttagaagatagaggtttgggaagttgagagagagagagagagataaagagagagagagagagatagagatagagatagagatattaggttttttattttttggtttagtgggtttatatattaattgttcggaagttttattttaagtttaattggaagtttgatcgtttgtatttcgtcgtagtttttttcgggaaggggttttgggtttttttatattttttttttagatttttaggttttttttgattcggggagggaagtttttagatgatagagttattttagggaaggaggggggttttttttaggtattttggatgatagtaggatgggatttgtagattaaaacgagagtggggtttttgatttatatgagtgagtggggggtgttggggacggagttttagattttttggtagaagggaagggtattttattcgagggaggaggtagtcgtcgttttagttcgtttaggcgtcgggggcgtttcgaggtatcggttcgtttttttcgcgtttcgtcgggtcgggggcgaagttcgatttaggttcgcgggtaggcggggatttgtcgggttgggttgggttaggtcgggtttggtaggacgtagttttaaagcggcggggtggggcggggtcgggttaggcggtcgtgggggtttcgggggcggcggtcggggttggtcgggattagtagtttgggggtttaggcgcgttttgggatttggtagatagtcgggtttttcgtttttggttcggggttttaggatagcgttggttttatttttttttgtgttttaatatgggcggcggggagagatttcgggggtcggttcgcgtttagttttgttcgcggattttcgtttgttgttatggcgattaggtttcgtttttcggttgcgtttttcgtcgtcgggttaatggaatattttttaagtcgtttgttttcgcggttttttgtaggtatcgcgggcggaattattgtttgaggggagaggatggtggttggaggttgtcgcggttgggcgggttttaagtattcgggttttcgcgggggttcgtacgtttaggtttttttttcgaggcgtaggatgcggcgggatttagggcggggcgtacggtttcgtaggattcgagtgacggagatagggtcgggttttttttttcggggttgttgttatattttttgtttttgcgttttttttttagtttgtttttaaggaagggagtggggttgggcgatcgcgttttagtcgtcgggttgggtttaggttttaggagtcgatacggtgttgggtaaagtttagggttaataggggagggttttaggatgggggatagagaatatagatgattaagaggttattatcgagggggagtagtagtcgtggaagatttagtagttttggtgcgcgggatttttaaggttttttttttatatgttaattgagtatttttttattgttttttttgtttcgaagatgtgttcggttttttttaatttttttttttattcgggttagtagatgattttagtggtttttaatttttggtagatatgtttttattttttatttggtatattttatttgttttagtgtattttaggtcgtttattagttttttgtatatttagattttttttaatgtttttttttcgtttacgggagagttttagattttggatttagtttttatgagtttttggatttttatttattttttgtaatttaatgggttatgtagttttatttatttattttttttgattttttttttttttcgttttgtgaaaattttagtttcgtatttttttgagttcgggatttttagttaatttttgggttaggtgtttttttaattttttcgatttatagtgtttaatttttatttttgttttttggggttttttaatggattgttagtttttttatttttttcgtattttgggtattttaggggttttttcgtatatattgggatttttattttatttgttgcgtattaggttttggtatttgttttagtggattttagggaaattatttttttttttgaaattttttatttatgtgtttgggttttttagtatttttttttatgcgtatttcgaggttttttgagtttttttttttgtagtttcgtcgagttattcggttcgtggtcgttgtttataaggatacgcgttttttgatagtgacgcgagtcgttttttttttttttttacgttcgaggaggggggcgcgggggttcggtttcggcgacggttaatcggagcgtattttcgtggttgattagcgcggtataaaggcgtgtggtttaggttgagcggttgggattttgagagcggttaggttagtttcggagttagtagggagttgggagttgggggaaacgacgttaggaaagttatcgcgttagagagggcgacgggggttcgggaagtttgatagggtttttgcgtatagttgtcggttggttgttattcgttcgcgttagttttcgagaacgcgcgattaggtatttagttcggttatcgtagcggagagttcgtcgttcgttgtagcgaggttcggagcggtttcgtagggattttttttagatcgtttgggtcgttcggatgtgtattaaaatggaatagtttttttattacgacgatttatatatagttacgggatacggtcgggtttttggtggtttttttttatacgattataaatttttgaaatcgagtttggcggttaatttggtcgatttttatcggagttttaaagcgtttggggttcgcggattcggtttagagggcggcggtggcggtagttatttttttggttagggttcggatatcggcgcgttttttaagttcgttttttcggagttggaacgtttgattgtttttaatagtaacggcgtgattacgacgacgtttatattttcgggatagtatttttattttcgcgggggtggtagcggtggaggtgtagggggcgtagggggcggcgttatcgaggagtaggagggtttcgtcgacggttttgttaaagttttggacgatttgtataagatgaattacgtgatattttttaacgtgtttttgggcgttatcggggggttttcggttgggttcgggggcgtttacgtcggttcggagttatttttcgtttatattaattttagtagttattttttagtttttgcgttttcgggaggcgtcggggttgtcgtcgggatcgggagttcgtattcgacgattattattagttattttttatacgcgtcgtttttcgtcggtggttattcggcgtagttgggtttgggtcgcggcgtttttatttttaaggaggaatcgtagatcgtgtcggaggcgcgtagtcgggacgttacgtcgtcggtgttttttattaatatggaagattaagagcgtattaaagtggagcgtaagcggttgcggaatcggttggcggttattaagtgtcggaagcggaagttggagcgtatcgcgcgtttggaggataaggtgaagacgtttaaggtcgagaacgcggggttgtcgagtatcgtcggtttttttcgggagtaggtggtttagtttaaatagaaggttatgatttacgttagtaacggttgttagttgttgtttggggttaagggatacgttttttgaacgttttttgtttttttacggatattttttcgtttggacggttgggtatacgttttttattggggtttagggagtaggcggtgggtatttattttgggatttaggggcgtcgtaaattatattggatttcggtttttttattttgcgtttagtttttttatttcgacgtttataagtttttttttttatttttttttgtatgttttttttttgttggaaatagattcgatttatattgaatataatatatttgtgtatttaatagggaggggaagagggggcgatcgcggcggag

SEQ ID NO: 497 - DNA, 4000 bp, Artificial Sequence
  chemically treated genomic DNA (Homo sapiens)
tttcgtcgcgatcgttttttttttttttttttgttaaatatataaatatattatatttaatatgaatcgagtttgtttttagtagaaaaaaaatatataaaaaaaagtggaagggggggtttgtaaacgtcgaggtggaaggattgggcgtagggtaggagggtcggagtttagtgtggtttgcggcgtttttaggttttagggtgggtgtttatcgtttgttttttggattttagtgggaggcgtgtgtttagtcgtttaagcgagggggtgttcgtaaaggggtaggggacgtttagaaggcgtgttttttgattttaagtagtagttgatagtcgttgttgacgtgggttatgattttttgtttgagttgggttatttgttttcggaggaggtcggcggtattcgatagtttcgcgttttcggttttgagcgtttttattttgttttttaggcgcgcgatgcgttttagttttcgttttcggtatttggtggtcgttagtcggtttcgtagtcgtttgcgttttattttgatgcgtttttggttttttatgttgatgggggatatcggcggcgtggcgtttcggttgcgcgttttcggtacggtttgcggtttttttttgaaggtggaggcgtcgcggtttaagtttagttgcgtcgggtggttatcggcgaagggcggcgcgtgtgggaggtagttgatggtggtcgtcgggtacgagttttcggtttcgacggtagtttcggcgtttttcgaggacgtagaggttggggagtagttgttgaggttggtgtaaacgggaggtggtttcgggtcggcgtagacgttttcgggtttagtcgggggtttttcggtagcgtttagggatacgttggggggtgttacgtggtttattttgtgtagatcgtttagggttttgataaagtcgtcggcgaagtttttttgtttttcggtgacgtcgttttttgcgttttttgtatttttatcgttgttattttcgcgggggtaaaagtattgtttcgggggtgtaggcgtcgtcgtgattacgtcgttgttgttggggataattaggcgttttagtttcgaagaggcgagtttgagagacgcgtcggtgttcgagttttgattagaaaagtagttgtcgttatcgtcgttttttgggtcgggttcgcgagttttaggcgttttgagatttcggtaggggtcggttaggttgatcgttaggttcggttttaggagtttgtagtcgtgtagagagaggttattaggggttcggtcgtatttcgtagttgtgtatgagtcgtcgtggtagaagggttgttttattttagtgtatattcgggcggtttaggcggtttggggagggtttttgcggggtcgtttcgggtttcgttgtagcgagcggcgagtttttcgttgcggtgatcggattgggtgtttggtcgcgcgttttcgggggttggcgcgggcgggtagtagttagtcggtagttgtgcgtaaaagttttgttaggtttttcgagttttcgtcgttttttttggcgcgatagtttttttggcgtcgttttttttagtttttagttttttgttggtttcgaggttggtttggtcgtttttaaggttttagtcgtttagtttgagttatacgtttttatatcgcgttagttagttacggaagtgcgtttcgattggtcgtcgtcggagtcgggttttcgcgttttttttttcgagcgtggggaaggggaggaggcggttcgcgttattgttaggaagcgcgtgtttttgtaaatagcggttacgggtcgggtggttcggcggggttgtagggggaggggtttaaaggatttcggggtacgtatggaaggaggtgttggggggtttaggtatatgagtgaggggttttagggaggaggatgatttttttggagtttattgggataaatattaggatttggtacgtagtaagtggggtgagggttttagtatgtgcgaagaaatttttgaggtatttagaatacgagaggggtaggaggattgataatttattgggagattttaaaaagtagaaatgagggttaagtattgtaaatcgggagggttaaggagatatttgatttaggaattgattgggggtttcgggtttagaaggatgcgggattggaatttttataggacggaggaggggagagattaaaaggggtgagtgggtggagttgtatgatttattaaattgtaagaaatgagtaggggtttaggagtttatgggagttgagtttagagtttgaggttttttcgtaagcgggaaggaggtattaggggaagtttagatatgtagaaagttagtaagcggtttggggtatattgaggtaggtaaaatatgttaggtagaagatggagatatgtttgttagaaattggggattattggggttatttgttagttcggatgaaggagagagttagaaggggtcggatatattttcggagtagagaagataataagagggtatttagttgatatgtgaggagggggttttgagggtttcgcgtattaggattgttggattttttacgattgttgttttttttcgatggtaattttttagttatttgtattttttgttttttattttaaaatttttttttattgattttgggttttgtttaatatcgtgtcggtttttagagtttggatttagttcgacggttggggcgcggtcgtttaattttatttttttttttagaaataggttggggaaagagcgtagaggtaggaagtgtggtaatagtttcgggggaaggagttcggttttgttttcgttattcggattttacgggatcgtgcgtttcgttttgggtttcgtcgtattttgcgtttcggaagaggaatttgggcgtgcgagttttcgcggaggttcgggtgtttggagttcgtttagtcgcggtagtttttagttattattttttttttttaagtaatggtttcgttcgcggtgtttgtaggggatcgcggaggtaggcggtttggggagtgttttattggttcgacggcgggggacgtagtcgaggagcggggtttggtcgttatggtaataggcgggagttcgcgggtaggattgagcgcgggtcggttttcgaagttttttttcgtcgtttatattagggtataggaagaggtgggattagcgttgttttggggtttcgagttagaagcggggaattcgattatttgttaggttttagggcgcgtttgggtttttagattgttagtttcgattagtttcgatcgtcgttttcggggtttttacggtcgtttggttcggtttcgttttatttcgtcgttttggggttgcgttttgttaggttcggtttggtttaatttagttcggtaggttttcgtttgttcgcgggtttgggtcggatttcgttttcggttcgacggggcgcggagagggcgggtcgatgtttcgaggcgttttcggcgtttgggcgggttggaacggcggttgttttttttttcgggtggggtgttttttttttttgttaggagatttggagtttcgtttttaatattttttatttatttatgtgagttaggggttttattttcgttttagtttgtaggttttattttattattatttagaatatttagagggagtttttttttttttttagagtagttttgttatttgagagttttttttttcgagttagagaagatttgaaaatttaaggggagaatatgagggaatttagagttttttttcgggaagggttgcggcgaggtgtagacggttaggtttttagttagatttaaggtgggattttcgagtagttagtgtgtgaatttattagattaagaggtgagaagtttagtgtttttgtttttgtttttgtttttttttttttttttttgttttttttttttttttttagttttttaggtttttgttttttggaggatgaagagagttttttttttttttagggtagaaaga

SEQ ID NO: 498 - DNA, 6000 bp, Artificial Sequence
  chemically treated genomic DNA (Homo sapiens)
tggattttgaagaataaggcgaggtagttagggataggggttgagtttttttggtaggggttatagtttagtaaaagtttagaggggtagttaaaaataaagagtgttttaaacgtttaataatggaattattgtgttggttatatttttttgagaattttagtcgttgagttaggtttttgaagtcggtagtggttttaggtgggaagttgtatttgtgtttgtagaatttttatttgtttaagttgttttttttttgataagagtatgtagggtatgaatgagaaagagattttatatgtgttgagcgggtattattttattttatttttatatgcgttttttgggggttgtgatatttttagtttattttgtaggttggtatattgaggttttttatattatttgtaaagtggtagagttgagatttgaatttgggtttggtttaaaatttgtgtttttaagttttttgttattttagttttcgaaaagtttagaattttttgttgaatttttggggatgagtttagtgatgtgttcgtatatattgaataattagttttttggaagaaaaaagaggtttgattggtagcgtatttcgatgtttaaggggtaaatatttttattgtggttgatatggagttattagtgtgatatttttgaatatggagttgggaagagatgagtatagttggtttttgtaagtaggtaagggttagttttagcgtgttattgggtaaatgtttttgtttttttttcgagtttagtatggttagtaaaggtttttagatatgtttaaggaatggaagagggttgagaaatttgtttttttagttgggggttcgttttgagttttgggaagttgcggttaatttttaagttagttttgtaaataagtgcggttattttattagtttaggttggtttttgttgttgattggttgtggtattttaagtagttttttttttttttagttttagtttattatcgtaagagttattatttatttagtataatttgattatttttatattggttagttttaatttttttaggaattttttgtggttatgtttatttcggttttataggtgagggggttgggttgggaagttgatcgatttgtttattttatagtagaggggtagttagtttagatgcgaatttagattagtgtagagtaaggttttgtttatttttggttttttggaaggtatgttgtatttagaggtttttgttttttatattttagggtgttttttttagttttttttagtagggatttttgtttagggaatagaagtttgatttgtttgggttttaattttttatttgtgaaatgggagaatttttaaagaaggaatatggaggtaggtgtgatatttaaagttggatttaggtttatttttttttgtgttaggattttaggataggtaaggagttaagggtggggtgtttagttttaaaaggatagttttggagtttgcgttagggggtaagaggggagtttttgtggtttaaagtagtatttttttaatgtttcgtttttttgttatattttttgttttggtttagaggtatttagtttttttatttatttggaagtgtgattgttatttagatgttttggttagttttttttaagtagtaataattagaattaggggattttcgatgggttgttagggatgttttgtttttatgtatttaaaatgaattcgtaattattaaaataaatgtcgtttttttttattttgttttttttgttttagtttttattttgagaaatttaggttaaggttaaagtttaaggtttggtttttgttagtgttttagtttttttatttgtaaagtggggcgatttttcgtcgtttaggttaggtggtggttaggattaaattttgaagtcgatttgagtagtttagtatggcgtttggtttagagcgggcgttttacgttcgttgatattattattaatcgtgatttcgggagaggcggatttggggcgtagaaggtgggtgggttggggagggtattttggtttgggggcggatggggttcgcggggtgcggcgttttggcggagtgggaggcggggtttttgtgttcggtgtttttatttcgttcggatttttagttcgggtcgtttttgggtttttttcgggttatcggcggggaattcgttttcgcgcgtttttttttttttttttttttcggttgtttgtcgggtttttttttttagttcgcgcgttttttttttttttttttttttttcgggtcgtcgtcgttttttttttttttttttttttttttttttcgatttgtttttttcggttcggaatttatttcggtttgggagtcggagcggttaggtcgtcgtttgttcgtttcgttggacgtttcgcggttcgttttttcgtgcgttcgtttgtcggtgagttcgttcgttcgtcggtttaggtgagcgtttttcgttttttcgcggatttttcgtttcggttagcgcgggggagttttcgtttcggattattttggcgtcggatcgcgggtcggcggggatttttgtttatttttttaatttttatttttttttcgggttaagtcgcgatatttaagcgtcgggcgggcgtacggggttatgttcggcgcggttttttgttgtgatgtagcggggggagggggttgggcggggggggcgtagggtttttggttgcgtggggattttttttagtttatgttttttataggattttttagagaagttagcgagttgggttttagttttcgggttaggtttaggttaaatttgaaatttgagttagtcggcgtcgtttttgtttgggttgttcggttttgcgtttttcggtttcgggtgggaggtggggggatcggtagggcgggttgaggggtttcggggttagggcgttaggtcgaattgttaggatttttttgttttcgtggggtttcgggtagggtttggtgttgtcggtttggaagggattgggttagattgcgtttggttttttttgtttatagtttttagtttcgtttttgagtaggtttagttattagtcggtttagaagttggtaaaagttttgggggttggttatcgggttaggtttatttgtttgtttgggttgggattggggtgggtttgagtttttattagggttgttatttgttttgttgtgtgtttttagataattgtttgtttttttgagttgggttttttattggtggtaggtgggtttggttggaattgttaggttggtggaaggatggggtgaatagaaggggtttatttgtgtggtatttttttagtttttgcgttttttaggtggatttaggagtggatagagtttgtgtgtgtttttgggtaagattttttgaattttatggattttgtataatttggggtagtggttgttgggttatttggggtaagtttaggtttagttatagttatagtgtagttgggattagatttggttttaagggtgggttaggttggttttgttgtagattttttttttagttttttggttgggggattaaggtatcgagtttttttgttttatttagtgatttgggttaagagattgtttttttaagtttttatacgtgaaatgagaatttttaggcgaagattttaagcgtttttgtaggtagaggtttggcgtgtagtagatgtttaataaatgaattgtttattggatatattggttgagaaagatgggtgagatgtgaggttgttggttagtttattttagaagaggatgggttggtgttttgagaaagaaatagttttggtatcgttttgttagttagtagttgggtgatcgtaagtaatttattttttttttttggttttagttttgttatatataaaattgggttagtggtaatgatagttgttaatatttattgaatattttttaggaggtatagatttttgtttatttttattttgttgatggggaaattgaggttaagagaggggaagtgatttgattaaggttttatagttggaagttggaatgaaagtttagattttagagattatagtttggttgtttttgtatttttttagtgatggggtagtggaggttcgtaagataggattgtatatatagtagtgtcggaaaagattgttttgttgagggattgaatgaaagttacgaggtttttttggtgatgtggtgatgtggtttttttatttaaggaaatgatttatagtgtgttattttttttagttgattgtttgtttaggttttttcgcgtgtttttgggtttttgtttttaaattgtgttttttttagagtgtttttttttttaggtgttgtttatttgtttttgtttcgttaggtttagtttaggttttttttttttaggaggaaggttcgtggttttttttttttgttttttagtttttgttggagtatgatttatttatagtttagtttggtttttgtttttgtttttttgattgtgattaggggggtggggtggagggatgtttggtttttttaagttttaggaattagagaggagatggtttagtgatttgttgagggattttttgtttattttcgtggtttttagttgattttatttttttaaatttttttatgtataagtatttgtgatttttgtattgagtatttgttgcgtattaggaatttggaattcgggttgagtagtattgtgttggggttagtagggagtgggagttgtgggagttatggaggtttttagaaggtggtagggtttgagttgaggacgagtaagagtttatttggtaaagaaggggagagggagtttttttttttttttttaggggttttgaggtggtggggtgtggttagtttggttggatatttgttggggagttgggaataggtttttggttttttagaagtttgaatttggagggtgagtaaagttgtaaataagttgttagttgagttattatataattatagatatgataaggatttagggagagaggtttagggtatataggaattttgaagagggtatgtaggggttgattaggtatggagttagggaaagggtttgttaggtagtaggaagtgtatgtgtaaaggttttgaggtatgtgttaagacgtgttgttatggagaattagtgggggaagttgtgaggttggagcgtgtataatgaaggggagtgggtaagaggtagaatgagggggtgtattagtagggttggattatgttggggttttgtgggttttggggaggagtttggtttttattgttatatagggggttgatcggtgttttttgtgtgaatagttttaagttggaggttagaggtatagagttgattaatagaaatagatttgatgatagatttagatttgtaggttggattttaaaattttatggaggtttagattaggttttaagaggagcgggtatttgaggttgggttttggaagtggagtaggagtttattagtagtaaggttggagaggatgagagtcgggggtgtgggaagtgtaatgttgggtggttggaagttgggagtgaggtagggagtagggaggggttagttcgagagatggggattaaaggtttggtaagggtttaagagttagataggtttgggtttatgttttgatcgttttatttgttgtgtgtttttggattatttattgtattttttgagagatttagtttttttgttatgaaaatggggataatagatatttttttgttggattagggttaaaggagggttgtgtgtttagtgtttggtatcggtaggtatttggtaaatgggatttgttttgcgttgttgtattggataggttattcggtttttttgggtttggttttgttagttttgtggttaagtttttgtttgggtgattttatggagtttgaaggtgtcggttggggtagggttggttcgggagaggatgttggtagttaaggtcgttaatgtgtagggtgattttgagttttgttttg

SEQ ID NO: 499 - DNA, 6000 bp, Artificial Sequence
  chemically treated genomic DNA (Homo sapiens)
tagggtaggatttaaagttattttgtatattggcggttttggttgttaatattttttttcgagttagttttgttttaatcggtatttttagattttatgagattatttaggtaagggtttgattatagagttagtagggttagatttagagaggtcgagtgatttgtttaatgtaatagcgtaaagtaggttttatttgttaagtatttatcggtgttagatattgggtatatagtttttttttaattttaatttaataaggaggtatttgttgtttttatttttatgataaagaaattaagttttttaaaagatatagtaaatgatttaaagatatatagtaagtgggacggttagaatataaatttaggtttgtttgatttttaagtttttattaaatttttggtttttatttttcgggttgatttttttttgttttttattttatttttagtttttagttatttagtattgtattttttatattttcggtttttattttttttagttttgttgttagtgaatttttattttatttttaaagtttagttttaaatattcgttttttttgagatttgatttaggtttttataaaattttggagtttagtttatagatttaggtttattattagatttatttttattggttagttttgtatttttggtttttagtttggggttgtttatataggggatatcgattagttttttgtgtgataatgaaggttaaatttttttttagggtttataaggttttagtatggtttagttttgttgatatatttttttattttattttttatttatttttttttattgtgtacgttttagttttatagttttttttattgattttttatgatagtacgttttggtatatattttagggtttttgtatatgtattttttgttgtttggtaagttttttttttaattttatgtttggttaatttttatatgttttttttaagatttttgtgtattttaggtttttttttttgagtttttattatatttgtgattatatagtaatttaattggtaatttgtttgtaattttgtttattttttagatttaaatttttgggaggttaaggatttgtttttagttttttagtaagtatttaattaggttgattatattttattattttagggtttttgggaagggaaaaaagagttttttttttttttttttgttaagtgaatttttgttcgtttttagtttaggttttgttattttttagaagtttttatgatttttatagtttttattttttgttaattttagtataatattgtttagttcgagttttaagtttttggtacgtagtaggtgtttaatataggggttataaatgtttatatatggggaggtttgagaaaatggggttagttgaggattacggagatgggtagaaggttttttaataggttattgagttattttttttttggtttttggggtttgggggagttagatatttttttattttatttttttggttataattagagaagtaaaagtaggaattaggttgagttgtggataagttatgttttaataagagttaggggatagggagagagagttacgggttttttttttagaagagaggggtttaagttaagtttggcggggtaagggtagataagtagtatttggaggagagggtattttgggagggatatagtttaggagtaaaggtttaggggtacgcgggagggtttaggtaggtagttagttgagagaggtgatatattgtaaattatttttttgggtggaaagattatattattatattattaaaaaggtttcgtggtttttatttaattttttagtagagtagtttttttcgatattgttgtgtgtgtagttttgttttgcgaatttttattgttttattattggagggatgtagggatagttagattgtggtttttgaggtttgggtttttattttagtttttaattatagggttttggttaagttatttttttttttttagttttagtttttttattagtaaaatgaagataaataagagtttgtattttttaaaaggtgtttagtagatgttggtagttgttattattattggtttagttttatatgtggtaaaattgaggttagaagggaaaagtgaattgtttacggttatttagttgttggttggtaggacggtgttagggttattttttttttaaggtattaatttatttttttttagaatgaattagttagtaattttatattttatttattttttttagttaatgtgtttagtgaataatttatttattgagtatttattatacgttaagtttttatttgtagaagcgtttagaattttcgtttgaggatttttattttacgtatagggatttagaggggtagttttttggtttaggttattgggtgagataagaagattcggtgttttgattttttagttagggggttgagaagagggtttgtaataggattagtttggtttatttttgaaattaagtttgattttagttgtattgtggttgtggttgggtttggatttattttaggtgatttagtaattattgttttaaattgtatagagtttatgaagtttaggaggttttgtttaggggtatatataggttttgtttatttttaagtttatttgaaggacgtaggggttgaaaggatattatataggtgagttttttttgtttattttatttttttattagtttagtaattttagttaggtttatttgttattaatgaggaatttagtttagagaggtaggtagttgtttgaggatatatagtagggtaagtggtagttttggtggggatttaaatttattttaattttagtttaggtagataggtggatttggttcggtggttaatttttaaaatttttgttaatttttgagtcggttggtagttgggtttgtttaggggcgaggttgggggttgtgggtaggggagattaaacgtagtttggtttagttttttttaggtcggtagtattaggttttattcgaggttttacgagggtagggaggttttggtagttcggtttggcgttttgatttcggggttttttagttcgttttgtcgatttttttattttttattcggggtcggggggcgtagggtcgggtagtttaggtagaggcggcgtcgattggtttagattttagatttggtttagatttggttcgggggttagggtttagttcgttggtttttttgggggattttatggggagtatgagttggagggggtttttacgtagttaggaattttgcgtttttttcgtttagtttttttttttcgttgtattataataaaaggtcgcgtcgggtatggtttcgtgcgttcgttcggcgtttgggtatcgcggtttggttcggagggggggtgggaattgggggggtggataggagttttcgtcggttcgcgattcgacgttagggtggttcggggcgggggttttttcgcgttggtcggggcggggggttcgcggaggggcggggggcgtttatttgggtcggcgggcgggcgggtttatcggtagacggacgtacgggagggcggatcgcgggacgtttagcgggacgggtagacggcggtttggtcgtttcggtttttaggtcggaatggatttcgggtcgggagagatagatcgagagagaaagggaggaggaggaggaggaggcggcggcggttcggggaggggaagaggagggagggagcgcgcgagttgggaggaggggttcggtaggtagtcgggaggaggaggaaggaggaagcgcgcggggacggatttttcgtcggtgattcgggagagatttaggggcggttcgagttgggggttcgggcggggtggggatatcgggtatagaagtttcgttttttatttcgttagggcgtcgtatttcgcgggttttattcgtttttaggttaaaatgttttttttaatttatttattttttacgttttagattcgtttttttcgaaattacgattggtaataatattagcgggcgtggagcgttcgttttgggttaggcgttatgttaagttgtttaggtcgattttagggtttaattttaattattatttggtttgagcggcggaagatcgttttattttatagatggggaaattgaggtattgataagaattaggttttggattttagttttgatttgagttttttaaagtaggggttggggtaggagggatagggtggggaggagcgatatttattttaatagttacgggtttattttaagtgtataagggtaaaatatttttggtagtttatcggaagttttttagttttaattattattgtttaggaggggttgattagggtatttgagtggtagttatatttttaagtaagtaaagaggttaagtatttttgaattagggtaggaaatgtagtagaaaaacgggatattgaggaaatgttgttttaggttataaagattttttttttattttttggcgtaggttttagggttatttttttggggttgggtattttatttttggttttttatttgttttggaattttagtatagggaaaggtgggtttgggtttagttttaaatattatatttgtttttatattttttttttgaaagtttttttattttatagatgggaaattaaggtttagataggttaggtttttattttttgggtaaaggtttttgttgagaggagttgggaggagtattttagaatgtggaaggtaaaggtttttgggtataatatattttttaggagattaggaatgagtaaagttttattttatattgatttaggttcgtatttaggttagttgtttttttgttgtggggtggataagtcgattagttttttagtttagtttttttatttgtaaaatcggagtgaatatggttatagaagatttttgggaaggttggaattgattagtgtgaggatggttaggttgtgttagatgaatggtagtttttgcggtgataaattgaggttagaggggaaaggggttgtttgaggtgttatagttagttaatagtagaagttagtttgggttggtgaaatggtcgtatttgtttgtaaggttggtttaaagattaatcgtagttttttagggtttagggcgggtttttagttggaggagtaggttttttagtttttttttattttttagatatgtttaaaggtttttattggttatattgggttcgggggggaggtagggatatttatttagtgatacgttggagttggtttttatttatttgtaagaattaattgtgtttatttttttttaattttatatttaagaatgttatattgatagttttatgttagttatagtgggagtatttattttttggatatcggaatacgttattaattaagtttttttttttttttagagagttggttatttaatatgtacgagtatattattaaatttatttttaggagtttaatagaaaattttgggtttttcgagaattgggatgatagagagtttaaaagtatagattttggattagatttaggtttaagttttaattttgttattttgtagataatgtaagaagttttagtatgttaatttgtagagtgggttaaagatattatagtttttagaagacgtatgtaaggatgaaatgaggtgatgttcgtttagtatatgtgaaattttttttttatttatattttatatgtttttattagagaggaggtaatttagataagtaaaggttttgtaagtatagatgtagttttttatttgaagttattgtcgattttaagggtttggtttagcggttgaggtttttaggaggatgtggttagtataatggttttattattgagcgtttgaagtattttttatttttaattatttttttgggtttttgttaggttgtaatttttgttaggaaggtttagtttttgtttttggttatttcgttttgttttttaaagttta

SEQ ID NO: 500 - DNA, 6000 bp, Artificial Sequence
  chemically treated genomic DNA (Homo sapiens)
gtttggtatattaaagtaatatatttttaatttttttttttttttttttttttttggaggcggagttttgttttgtcgtttaggttggagtgtatggtataaattcgatttattgtaatttttgttttagttttttgagtagttggagttataggcgtttattattacgtttagttaattttggtatttttagtagagatggggttttgttacgttggttagattggtttcgaatttttgattttaggtgattcgtttattttggttttttaaagtgttgggattataggtgtgagttattatgtttagtttaattttttttaaattattgcggatttaagttttataatatttttttttatatgtttttataattatatgtgttattgggtatggtagtatgcgtttgaaattttagtaatttaggaggttaagggaggttgaggtaagaggattatttgagtttaggagttcgaagttataatgtattttggttatgtttgtgattagttattgtattttagtttgggtatatagtaatattttatttttaaaaaataataataataataatatttgtttttttttttatttttagaatttttgttatatttttttattttaaatgtgttttgtttttataaatagattatatttttaaaaatttttatttatatttgagtaaaaatgttagaataaatggaatttattttattgatgaagtttattatttagttggttaattaaaaatagaattgttatattattttattgttgattaagaattattttatttataattaagattagattagaatgataagatatttgaaaagtttttaaaattattatttaatatatgagtttttattatgggataattgttattttaatttttttgtttgtgttattttatttaattttatgagatagttattaattttatgagggtaggtattattattagttttattttatagaggaggtaaaagataaagtaagggttatatatttagtgaaaaaggggaaataagattttattttagtttgatttttgagtttatattttttatttattgttataatgtttttttaaaatataaaattgtttattgtatgtggttttttataaatatgtttattaaagatagatataattttatatgtagtatttagtaaattgagggaatttattattaaaatttaaataattttttattttgtttattttttgtagtagtgttttattttttttttatgaatgtgaagttttattattttttataaaataattattttttaatttaaatattttatgtatttattattttatttatttattgatttatttagtggatttttttggataaaattatattatgtataaaagtaattaaatgtaattataataggaaattttattttatttttagttttttttttgtttgatttttatgagtaaaattatatatataaatatatagaaataataaatatatatttatattatgtatatagtatattatataatatatattataaatataaataagttttttagtgacgtatgtagtatatatgtataaaagtatataaattataattgtatagtttagttataaagtaaatatttatgttttttgtttttaataaatgtatatatttttgtggttttatttttataattggagttgggttatagggaatatatatgtttatttttattagattatgttttttaaattggttgtaataaattatattttaatatttttagtgtatgagattttttattattgtataattttattattttttggtattattagtttttatagtttagttatttttatgtatagtgatatttttatgagattttaatttttattttttgtatgattaataatgattttttttttatgtttattaattatttgaatatgattttataaagtgttttttttaattaattttttttttgtttttcgtttggttgatttttgttttcgtgatttgtaggagttatttatatattttgatgaagattttttttgatgtattatttttgttttaaaattttatataggtggaatgaatggttgaattatgatatatatatttttgatttttttcgtgttgttcgattttgtttttttatttgttttgttaaaggtcgaaagggtgttaaagaggtaaagtattttagaaggaataattatgtttatttttaaaaatttttgattatatcgttgattgaatttttttataaattggatgttattttatatttaagaaaataataataaatttatttttaaaattttaataaatgtattatggaagaatattttgggagagttttaggaatttatgatgaatatgttttgagtttttattgatattatttttaaaaatgtaaagtgattatataatagggattgtatgtaaatattttatgtttgttttggtttatattttttatttataattaaaatatatgtaattttaaatggggaaaaaggaaagaatgggtttaaattttgaaaaattaattttttttttttagatatttttattattatagagatgattgttgaattttttttttggggaagaaaagtgttttgaaatgtgttttataatttagattagtgaatatttttttttgttttttaaggaatattgtttattggtatggggaaatataaatttgtttgattatatagatattttagtatttggaaaaatggttttgaatttttggttagtattttatggattagaagatttgttgaattttattggtgttattggattaaatttaaataaagtaaggtttttattgttataaattagatattttttatggtagttaaatttttttttttatgtatatataatagttttttttttattttttaggaaattttatgtttagagttggagtttgattggtttagtagtgtggtaaagtttttagatatgttagtgattgaagagtatgttaattggtttgtatttcgagaagtaggatttagttatttttacgtaggattggtaaggtaaattattgagtttattaagtattaattataatttgtggatttaggtagatattttttttatggaaaaggatttatatattttattggtatagatattatgaattttaggattaatattgtaatagaattaagttttttatatgttaatatttttattgtatttttgtttttttaaagttttagtttgtttttatttatttaataaatatttattgaatgtcgattatgtgtaaagtattgggaaaggtattaggtaataaagttatgaattaaatagatttttattgagtatgtattttaattgtgaaaatagatattaagtagataaaagtagaaatataagattatagttgatttttgaataatatggatatgaattatattggtttatttatatgtggattttttttaataaatatattggaaaattttttggagatttgtgataatttgaaaaaaatttggagataaattatattgtttagaagtattaaaaaaattgaagttaggtatgttatgaatttataaaatatgtatagatataagtttattttattatttacgattataaaatatatataaatttattataaaaagttaaaatttattaaaatatatatatataaatatagattatatatggtattatttatagttaagagaaatgtaaatatatataaagatgtagtattaaattgtatttgtataaaattaattgtagtatatattgtattattgtaataattttatagttattttttgttgttattgtagtaagtttaagtattgtatatatttatttaaaatgttatgtaggttgggtgtagtggtttatgtttgtaattttagtattttgggaggtcgaagcgggtgaattatttgaggttagagtttaaaattagtttggtaaatatggtgaaatttcgtttttattaaaaatataaaaagtcgggtgtggtggtatgtgtttgtaattttagttattcgggaggttaagttaggagaattgtttgaattcgggaggtagaggttgtagtgagtcgaggttacgttattgtattttagtttgggtaatagagtaagatttcgttttaaaaaataaaataaaataaaatgttatgtaatgttgattatttttatatgagtattttattattttagtaaattgtttattgtagtgaaaagtgattttttatagtttttggatattttttattatgtttagtgtaatatcgtgaattttgaataatattatgagggttgtaaggagtgtttttagtgatgttagaggtatttttaagaagtagagaaacgttatgacgttataagtaaaagttgaattgtttgatgtgtattatatattgaggtttgtagttgtagttgtttttattttagatagataattaattttgtaaatagataatataaattttgtttgtttttgtttttttgagatggcgttttgtttttgttgtttaggttagagtgtaatggtataattttggtttattgtaatttttgtttttcgggtttaagtgatttttttgttttagttttttgagtagttgggattataggtatgcgttattatgtttagttaatttttgtatttttaatagagacggggtgtttttatgttggttaggttggttttgaatttttgattttatgtgatttattcgtttcggttttttaaagtgttgggattataggcgtgagttatcgcgttcggttaaattttttttttttaataagagatggggtaggtggattatatttgtaattttagtattttgggaggtcgaggcgggtggattacgaggttaggagtttaagattagttcggttaatatggtgaaatttcgtttttattaaaaatattaaaattagttaggcgttgttgtatatgtttgttagttatttaggaggttgaggtaggagaattatttgaatttgggagatggaggttgtagtgagtcgagattgcgtcgttgtattttagtttgggtaatagagtgagatttcgttttaaaaaaataaaaaataagagagagatggggttttattgtgttgtttgggttggtttcgaatttttgagtttaagtgatttttttttttttattttttaaagtgttaggattataggtgtgagttattatgttcggttaaaagataaaataaatgtatagtattagtaaatatagtatagtattgtaaatgaatttttttttttttatgatttttttaataatattttatttttattgttttattttattgtaagaatataatgtatagtatatatattaagtaagtgttaattaattgtttatatttttgttaagatttttaatttatagtagttatttgtagttaagtttttggggagttaaaatttatatatggatttttagttgtataggagattagttgtttttattttttatattgtttaagggttagttgtataaattatattaagtgttaggaaggaaaaaataatagtgagttaagaataattaattgaggatttgtggggaaaaggtaaatatatatatattgggtttaggaaagatttttttgagatgataattttgaagttgagattgaagtatagttatatttttgaggtattgtgagtggtttagttttagattattgtattaaagtagaaattataatagagttataaatgttttggttttttagtgtatataaaagttttgtttatattatattgttatttgtaaagtgtgtaatagtttgttatttgtaaagtgtgtgatagttttacgtttaatataataatgtatatattttaaaaatattgtttaaaaatgttgatgattatgtaaggttttagtaagttgtaatttttttgttggtggagggttttgttttagtgttgatggttgttgatttattaagttggtgg

SEQ ID NO: 501 - DNA, 6000 bp, Artificial Sequence
  chemically treated genomic DNA (Homo sapiens)
ttattagtttggtaagttagtagttattaatattgaggtaagattttttattagtaaaaagattataatttgttgaagttttgtatgattattagtatttttgagtaatatttttaaagtatgtatattgttgtgttagacgtaaggttattatatattttatagatgatagattattatatattttatagatgatagtataatgtgaatagaatttttatatgtattgggaaattaaaatatttgtgattttattgtgatttttgttttagtatagtggtttagaattagattatttataatattttagaggtatagttgtattttagttttaattttaaggttattattttagagaggttttttttgaatttaatatatatatatttgttttttttttataaatttttagttagttatttttagtttattattgtttttttttttttggtatttaatgtgatttatatagttgatttttggataatataggggataggggtaattgattttttgtataattgaaaatttatgtgtaaattttgattttttaaaaatttaattataaatgattattgtagattggaagttttaatagaaatataaatagttgattaatatttatttggtatatgtattatatattatatttttataatagagtaagatagtgaaaataaaatgttattaagaaaattataaggaagagaaaatttatttatagtattgtattgtatttattgatattatatatttattttgttttttggtcgggtatgatggtttatatttgtaattttagtattttgggaggtaggggagggaggattatttgagtttaggagttcgagattagtttaggtaatatagtgagattttattttttttttgttttttgtttttttgagacggagttttattttgttgtttaggttggagtgtagcggcgtaatttcggtttattgtaatttttattttttaggtttaagtgatttttttgttttagttttttgagtagttaataggtatgtataataacgtttggttaattttggtatttttagtagagacggggttttattatattggtcgggttggttttgaatttttgatttcgtgatttattcgtttcggttttttaaaatgttaggattataggtgtgatttatttattttattttttattaaaaaaaaaaagtttggtcgggcgcggtggtttacgtttgtaattttagtattttgggaggtcgaggcgggtggattatatgaagttaggagtttaagattagtttgattaatatggagatatttcgtttttattaaaaatataaaaattagttgggtatggtggcgtatgtttgtaattttagttatttaggaggttgaggtaggaggattatttgaattcgggaggtagaggttgtagtgagttaagattgtgttattgtattttagtttgagtaataagagtaaaacgttattttaaaaaaataaaaataaataaagtttatgttgtttgtttataagattagttgtttgtttgaaataagggtaattgtagttgtagattttaatatatggtatatattaagtaatttaatttttgtttgtaacgttatgacgtttttttgttttttgagagtatttttagtattattagaggtattttttatagtttttatagtgttatttagggtttacggtattgtattaaatatgatgaaaaatatttaagaattgtgagagattattttttattgtaataaataatttattgaagtgatgaagtatttatgtagagatgattagtattatatagtattttgttttgttttgttttttgagacggagttttgttttgttgtttaggttggagtgtaatggcgtgatttcggtttattgtaatttttgtttttcgggtttaagtaatttttttaatttagtttttcgagtagttgggattataggtatatgttattatattcggttttttgtatttttagtagagacgggattttattatgtttgttaggttggttttgaattttgattttaggtgatttattcgtttcggttttttaaagtgttgggattataggtatgagttattgtatttagtttatatagtattttaagtggatatatgtaatgtttgagtttattataatagtaataggaggtggttatgaaattattatagtagtatagtatgtattatagttaattttatgtagatataatttaatattgtatttttatatatgtttgtattttttttgattatgagtggtattatgtatggtttgtgtttgtgtgtgtatgttttgataaattttaattttttataatagatttgtgtatattttatggtcgtaaatgataaaatagatttgtatttatatatattttatggatttatgatatatttaattttaatttttttgatatttttggataatgtagtttatttttaagttttttttaaattgttataaatttttaaaaaattttttaatatatttattgaaaaaaatttatatataagtagattagtgtagtttatatttatgttgtttaagggttaattgtaattttatatttttgtttttatttgtttaatgtttgtttttatagttagagtgtatatttaatgaaggtttgtttagtttatgattttattatttagtgttttttttagtgttttatatatagtcggtatttaataaatatttgttaaatgaatgaaggtaagttagggttttaaaaaagtagaggtgtagtaaaaatattagtatatagagaatttaattttattgtaatattggttttagagtttatagtatttatgttagtaaaatatatggatttttttttatagagaaagtatttatttaaatttatagattataattgatatttaataaatttagtgatttgttttattagttttgcgtgggaatagttaaattttgtttttcgggatatagattaattggtatgttttttaattattgatatatttgggaattttattatattgttgaattagttaaattttaattttaagtatggagttttttaagagatggaagaaaagttattatatatatataagagagaaggtttgattgttataaaaaatatttaatttatgataataaaaattttattttatttggatttgatttagtaatattaatagggtttagtaaattttttaatttatgaggtattggttaaagatttaaagttatttttttagatattagagtgtttgtgtaattaaataagtttatatttttttatgttaatggatagtgttttttaaaaaataaagaaaaatatttattagtttaaattataaaatatattttaaaatattttttttttttaaaaggaaaatttaataattatttttataataatgggaatatttaaaaaaaaaaaattgattttttaaggtttaagtttatttttttttttttttttatttgaaattatatgtattttaattataaatagaaaatatgaattaaagtaagtatgagatatttgtatgtaatttttgttatatagttattttgtatttttaaaaatggtattaataagaatttaaaatatatttattataaatttttgaagtttttttaaggtatttttttatgatatatttattaaaattttaaaaataggtttattattatttttttaaatataaaataatatttaatttgtgaaaaaatttaattagcggtataattaggagtttttaaaggtaaatataattgttttttttgaaatattttatttttttagtattttttcggtttttaatagagtaaatggaaaggtaaagtcgagtagtacgaggaagattaggaatgtatatattataatttagttatttattttatttatgtaaaattttaaagtaaaaataatatattaagaaaagtttttattaaagtatataaatgatttttataaattacgaagataaagattaattaaacgaaaaataggaaagagattgattggaaaaggtattttataaggttatatttaaatagttaataaatatgaaaagggagttattattagttatatagaaaatgaaaattaaaattttatggagatattattatatataagaatggttaaattataaagattgatgatgttaaggggtggtaaggttatgtagtaataggaaattttatatattaagagtattggggtataatttgttataattaatttggaaagtataatttaataaaagtgagtatatgtattttttgtgatttagttttaattgtaggaataaaattatagaaatgtgtgtatttgttaaaagtagaagatatgggtatttattttgtgattgaattatataattatgatttgtatatttttatgtatgtgtgttatatacgttattaaaaaatttatttatatttataatatatattatataatatattatatatataatataaatatatatttattatttttatatatttatatatataattttgtttataaaagttaaataaaaggaaaattaaaggtaaaataagattttttattatgattatatttagttatttttatatataatatagttttatttaaaggaatttattaaataaattagtaggtaaataaaatgatggatatataaagtatttgaattgaagaataattattttataaaaggtaatgaaattttatatttataagggaagaataaaatattgttataaaaagtgaataagataaaaaattatttgaattttaatgataaatttttttaatttattgggtgttatatgtgaaattatgtttgtttttggtgaatatatttgtaaagaattatatataataaatagttttgtattttaaaaaaatattataataatggataaagagtatgggtttagaaattagattggagtagaattttatttttttttttttattaagtgtgtgatttttgttttgttttttgttttttttatgaaatgggattaataatagtatttatttttataaggttgataattattttataaaattaaatgagataatataagtaaaggaattagaatagtaattgttttatgatagaagtttatatgttagatagtaattttaaaaattttttaaatgttttattattttggtttaattttgattataaataaaataatttttaattaataataaaatagtataataattttatttttaattagttaattaagtaataaattttattagtaaaataagttttatttattttagtatttttgtttaagtatggataaagatttttaaaaatatggtttatttatagaaataagatatatttaaaatggggaaatgtggtaagaattttaaaggtaaaagaaaaaataaatgttattattattattattttttagagatagggtattgttatgtgtttaggttgaagtgtagtggttagttataggtatgattaaagtgtattatagtttcgaatttttgggtttaagtgatttttttgttttagttttttttagttttttgagttgttgggattttaggcgtatattattatgtttagtaatatatataattgtagaaatatatagagaaaaatattatgggatttaagttcgtaatgatttaaaaaaaattaggttgggtatggtggtttatatttgtaattttagtattttgggaggttaaggtggacggattatttgaggttaggagttcgaagttagtttggttaacgtggtaaaattttatttttattaaaaatgttaagattagttgggcgtggtggtgggcgtttgtaattttagttatttaggaggttgaggtagaggttgtagtgagtcgagtttgtgttatgtattttagtttgggcgatagagtaagatttcgtttttaaaaaaaaaaaaaagaaaagaaaaattaaagatatattattttaatgtattagat

SEQ ID NO: 502 - DNA, 6000 bp, Artificial Sequence
  chemically treated genomic DNA (Homo sapiens)
gatgaattttaaaaatattatgttatgtaagttaattataaaaggatagttatttattgtatgtttttatttatataaagtattaagaataggtaaattggtagagatggaaaatagaatagaaataaaaaggaattgagggaaaggggtagttatgggtatgaagtttttgtttgggatgatggttaagtgttggaaatggatattggtgatggttgtatagtattgtgaatgtatatttaaaaatgtttaaatagtaaattttaggttatgtatattttataattaaaaagagataaatggttaatttaatgtgaagtatagttataggaatttatatttgttattggtgattataaaaataggtgtattatgtatgagcgtatgagatgtttaagttaattttgtattttttttttattttaaggattatgttattttagaattttagtttttttaatgaagaagtttggaaaggagttaagaggtttgtttaaagttaagagtttttagaggtatattataaatatgtttttttaaaaatatcgtaatttttgatatttatattgggtttagttttttgaaaaatattagaaagaaagtttagaaaaataagtttatgtatatgttggtttttataaattaacggtgtttattaatttattttaaaaattaatgtaatagaaaaggtaagtttgttgagggaaaaatatttggtgaatagtagaaaagtttttttttttttaagagttaaggaaagggggaagagaagaaaaaggagagaagagaaaatgaattaaaaattatatttttaaaagtgtgataagtttaaagatagtaattttaaagacgaatttaaaagaaaatttttttgatagttttaataatttaaataaatattttaaattagttaatataaattaattttttttaattattattattttattattattattattatatataatttatattaatattttttattatagaatgatattttttttaagtgatatagtatgttaaatatatagaaattatatttattaatatatttgtttaatataagaaatggtagtttttcgaggtatttttaattggatataaattttagtgggtaaaaggaaatttataggtatggagttattagatgttatttgtgaatttatcgtttagatgttaaggatgtttgttatagtaggaggtattatgaaattgaagtatatttataattacggggttttagaaattagtaattaaaatatagtaaaataattattagttaaattttatattaagatatgataaagattattaatttataattagtttttagattttaatatagttaataatgtaataggaggttaattaaataatgtgatattttaaaaattaagagtaagttagtagaaataaattatttaaatatatttttattattttataaattatatatatgtatattatttaatttatattattaattaaaggaaaaaaattatttttatatatatataaataaaaatatatatatatatatatgtatatatatatatattatattgatttaaatttaatatagatatttgatatttgaataaattgtatgtttaaggattatagggttttaagaaatttagttaattagtatttgataggtgatttttttttaaattttatttagaaaatattagttttttaggttgagtttttttttgtaaattttaatgaaaatgataattaagagggtttttttttaataagaataatttgtaattaagagggttttttttttataaggataattttttttttttttgagatggagtttttttttgttgtttaggttggaatgtagtagtgatattttagtttattgtaagtttcgttttttagttttacgttatttttttgttttagtttttcgagtagttgagattataggcgtttgttattatgtttggttaaattttttgtatttttagtagagacggggttttaatcgtgttagttaggatggtttcgattttttgatttcgtgattcgttcgttttggttttttaaagtgttgggattataggcgtgatttatcgtgtttagttaataaggataattttttattaattttacggtttattttttaagtattaaaaatattaaatcgtttaatatagatggtaaggttttttgtgttatttttttggtttattttttttgtttttttattattttatagttcgagattggtattatagtgttttttgtttttttgttgttagatttatgtttatatgaggaataaattttttatattaaaataaacgtattattttaataaatgtattttttaatagtgttatttaagttttatttattttttaagggttttttttaagaagatataataataataattggaagaatatgagcgttaaagttaaatgaattaaggtttatttaataattatgttattaatgaaagtgttatattaaaagagataggaggtcgggtatagtggtttatgtttgtaatattattatttggggaggtttagatgggtggattgtttgagtttaggagtttgagattagtttgggtaataaataagattttgtttttataaaatatataaaaaattggttaggcgtagtggtgtatatttgtagttttagttatttgggagattgaggtatgaggattgtttgagtttaagaatttaaggttgtattgagttaaaatagtattattgtattttagtttggataataaagtgagattttgttttaaaaaaataaaaattaaaaaataatttttagaattttttttgttaataaatggaaaaagaataataaattagaaaattataattttgtaagtgttaatgaattaatagatttaggtaatgattattaatagatgttaaagatataaataataataaggtgaaaggagaagaaattttataatcgttcgtgtttgttttgttgatattataggaattttttgattttagtattattaaaagtgggattattagatattatgtgtttttttatgaaatgtaatagttagtatttattatttatataaaataaaattgaatttgaatttaattaaggttttagatttgatttatgtgttagtttataggaaatagagaaaaaagttaaatattttaaggaagtaattagttaagtagagaatgtggtatttttaataaaataaattatatggtttttttagttaattaatattaagaagaggaggaagaagatggtggaaggattgttaaagaatttaaaaaatatttaggagatatagttaaatttaatgttagttggaataaattaattataaaaaattattttagttaggtattgtggtttatgtttgtaattttagtattttgggaggttaaggtaggtggattataaggttaggagttcgaggttagtttggttaatatggtgaaattttatgtttattaaaaatataaaaattagttaggtatggtggcgggtgtttgtaattttagttatttagaaggttgaggtacgagaattgtttgaatttgggaggtagaggttgtagtgagtttagatagtattattgtattttagtttgggtaatatagcgagatttcgttttaaaaaaataaaaatataaaaattagtcgggggtggtggcgtgtgtttgtagttttagttattcgggaggttgaggtagaagaattatttgaattaggaaggtggaggttgtagttagttgagattacgttattgtattttagtttgggtaatagagtgggattttgttttaaaaaaaaaaaattaattatttttgggttaggtacggtggtttatgtttgtaattttagtattttgggaggtcgaggtgggtggattatttgaggttaggagtttgagataagtttgattgatatggcgaaattttgtttttattaaaaatataaaaaaattagttaggtatggtggtttaagtttgtaattttagttatttaggaggttgaggtaggagaatcgtttgaatttaagaggtggaggttgtagtgagtagagattgtgttattgtattttagtttgggtaataaaagtaaaaatttattttaaaaaaaataaaaaataaataaataaaatttatttttgaaataatttgggaaatttaaatatggatttattataagttttttgaggagatataatgtttagtggttttatttttagttatgttaagattgattatagaatttaggtattgttaatatgttttttaaagtattgttttttattatagtatatggaaaggtttttatatttaggaatttttaattaataaatttttataaatacgaataaaattatatagttattatatatgttattaaggtattagttttaaaattaagtaaattattttagagtagtttttgaagatttggtgtaggagttttttaattttgtaagtaataagtatttaataagtatttgttgaatgaaaatatgttgtattaatttataaagattatattttgtagggttaggtagggtggtttagtttataattttagtattttgggaagtcgaagtaagtggagtgtttgagtttaggagtttgagattagtttgggtaatatggtgaaattttgtttttattaaaaatataaaaaaattagttaggtatggcggtaggtatttgtaattttagttattagggaggttgagttaggagaattgtttgattttagagggtggaggttgtagtgggttaagattatattattgtattttagtttgggtaatagagtgagagtttgttttaaaaaaaataaaataataataaaaaaatatatatatatattttgtttatatttaaatattattatgtaaagatagaggtggaagttagttattgaataagtaatttaagtattatgtttaattaagagttgttaataaaagttggaggaaaaatgaaagttagtatgtatgtatgtatgtatgtatgtatttgtttagagatggagttttattttgttatttaggttggagtgtagtggtatgattttagtttattgtaatttttgttttttaggtttaagtaatttttttgttttagttttttgagtagttgggattataggtatatattattatgttcggttaatttttgtatttttagtagagatggggttttattatgttggttaggttagttttaaatttttgattttatgatttattcgtttcggttttttaaagtgttgggattataggtatgagttatcgtgttcggtttagaagttagtatttaaaattgaggtgggtttatgaaatattagttttttgttatagaattagaaatataataaatttgtatacgtttttagtttttttaatatagatttttgttaagaattttagaattgaaattaaattatttaattaatataatattaataaaagagtatgaaattagaaaaataaaattttgggattttatttttattagatagttggaaatggtaaggtatttgagatataatgtttagagtagtaatttttttaaagagattgattgtattttattagtatttttattttatagtattaattgttaagatataaaattttaaatttttaagttattagagaaaatgtattaaggtagatataaaaattttttgatgaaggttaggcgcgttggtttatgtttgtaattttagtattttgggaggttaaggcgggtagattatggggttagaagtttaagattagtttgattaatatggtgaaaattcgtttttgttaaaaatgtaaatattagttgggtatggaggtacgtttttgtaattttagttatttgggaggttggggtaggagaatcgtttgaattcgggaggcggaggttgtagtgagtcgagatcgtattattgtattttagtttgggcgatagggtaagattttatttttaaa

SEQ ID NO: 503 - DNA, 6000 bp, Artificial Sequence
  chemically treated genomic DNA (Homo sapiens)
tttggagatggagttttgttttgtcgtttaggttggagtgtagtggtgcgatttcggtttattgtaattttcgtttttcgagtttaagcgatttttttgttttagttttttaagtagttgggattataggggcgtgtttttatgtttagttaatgtttgtatttttaatagagacgggtttttattatgttggttaggttggttttgaatttttgattttatgatttgttcgttttggttttttaaagtgttgggattgtaggtatgagttagcgcgtttggtttttattaagaaatttttgtatttattttaatgtattttttttaatggtttagaaatttagaattttatattttggtagttgatgttataggatgggagtgttggtgagatgtagttagtttttttgaaaagattgttgttttgggtattatgttttagatgttttattatttttagttgtttggtaagggtgagattttagagttttatttttttagttttatgtttttttattagtattgtattaattgggtgatttggttttagttttgagatttttgataaaaatttgtgttgaagaaattagggacgtgtataggtttattatgtttttaattttgtgatagagggttgatgttttataaatttattttaattttaaatgttaatttttgggtcgggtacggtggtttatgtttgtaattttagtattttgggaggtcgaggcgggtggattatgaggttaggagtttgagattagtttgattaatatggtgaaattttatttttattaaaaatataaaaattagtcgggtatgatggtgtgtgtttgtaattttagttatttaggaggttgaagtaggagaattgtttgaatttgggaggtagaagttgtagtgagttgagattatgttattatattttagtttgggtgatagaatgagattttatttttaaataaatatatatatatatatatatatatatattaatttttattttttttttagtttttgttggtagtttttggttagatatagtatttgagttatttgtttagtagttggtttttatttttgtttttgtatggtggtatttgaatataagtaaagtatatatatatatttttttattgttgttttgttttttttgaggtagatttttattttgttgtttaggttggagtgtagtggtgtaattttggtttattgtaatttttattttttggggttaagtaatttttttgatttagtttttttggtagttgggattataggtgtttgtcgttatgtttggttaatttttttgtatttttagtagagataaggttttattatgttgtttaggttggttttaaatttttgggtttaagtattttatttgtttcggttttttaaagtgttgagattataggttgagttattttatttggttttgtaaagtatggtttttataagttaatatagtatgtttttatttagtaaatatttattgaatgtttattatttgtaagattgagaagtttttatattagatttttaaaggttgttttgaagtgatttgtttaattttaggattagtgttttaataatatgtgtagtgattgtgtagttttgttcgtgtttatggaagtttattggttaagagtttttgagtatagagatttttttatatattgtggtgagaaatagtattttaaaaagtatgttgataatatttgaattttgtgattaattttagtatggttaaaagtaagattattagatattatatttttttaaggagtttataatgaatttatatttaaattttttagattattttaaagataggttttgtttgtttgttttttgttttttttgagatggatttttgtttttgttgtttaggttggagtgtaatggtataatttttgtttattgtaatttttattttttgggtttaggcgatttttttgttttagttttttgagtagttgggattataggtttgaattattatgtttggttaatttttttgtatttttagtagagatagggtttcgttatgttagttaggtttgttttaaatttttgattttaggtgatttatttatttcggttttttaaagtattgggattataggtataagttatcgtgtttggtttaaagatagttggttttttttttttgagatagagttttattttgttgtttaggttggagtgtagtggcgtgattttagttaattgtaatttttatttttttggtttaagtgatttttttgttttagtttttcgagtagttgggattatagatatacgttattattttcgattaatttttgtatttttatttttttgagacgaagtttcgttgtgttgtttaggttggagtgtaatggtgttgtttaggtttattgtaatttttgttttttaggtttaagtaattttcgtgttttagttttttgagtagttgggattataggtattcgttattatgtttggttaatttttgtatttttagtagatatggggttttattatattggttaggttggtttcgaatttttgattttgtgatttatttgttttggttttttaaagtgttgagattataggtatgggttatagtgtttggttaagatagttttttatagttgatttgttttagttaatattggatttggttgtgttttttaagtgttttttaaattttttaatagtttttttattatttttttttttttttttttgatattgattagttggagaaattatataatttgttttattgaagatgttatattttttatttggttgattgtttttttgaagtatttaatttttttttttgttttttgtaaattagtatatagattagatttaaagttttgattagatttaagtttagttttgttttgtgtgaatggtaagtattgattattgtattttatgaggagatatataatgtttgatagttttatttttagtaatgttaagattaggggatttttgtagtgttaataagatagatacggacgattgtaaagttttttttttttttattttattattatttatgtttttagtatttattaatgattattgtttagatttgttagtttattagtatttgtagaattgtgattttttaatttattattttttttttatttattagtaaaagaagttttaaaaattgttttttaatttttatttttttaagatagggttttattttgttgtttaggttggagtgtagtggtattattttagtttaatgtagttttagatttttggatttaagtaatttttatgttttagttttttaagtagttgggattataggtatgtattattacgtttggttaattttttgtatgttttgtagagatagggttttgtttgttgtttaggttggttttaaatttttggatttaagtaatttatttatttaagtttttttaagtaatggtattataggtatgggttattgtgttcggttttttgttttttttgatatgatatttttattaatggtataattgttaaatgaattttggtttatttaattttagcgtttatgtttttttaattattattgttgtatttttttgaaggaagtttttaaggaataggtaagatttaaatggtattattaaagggtgtatttgttgggatagtgcgtttgttttgatatgaggagtttattttttatgtgaatataggtttagtagtaggaaggtagaaggtattgtgatattagtttcgggttgtagagtgatgggagagtaagaaaaataggttagagaaatagtataaggggttttgttatttgtattgagcgatttggtgtttttaatgtttaggggatgggtcgtgaggttgatagaaaattgtttttgttggttgggtacggtgggttacgtttgtaattttagtattttgggaggttaaggcgggcggattacgaggttaggagatcgagattattttggttaatacggttgaaatttcgtttttattaaaaatataaaaaatttagttaggtatggtggtaggcgtttgtagttttagttattcgggaggttgaggtaggagaatggcgtaaaattgggaggcggagtttgtagtgagttgagatgttattattgtattttagtttaggtaatagagagagattttattttaaaaaaaaaaaaaattgtttttgtagagaaagggtttttttgattgtaaattgtttttgttgagagagggtttttttgattgttatttttattggaatttgtagagaaaaatttagtttaagaagttaatattttttaaataaagtttggagaaaaattatttgttaagtgttggttaattaaattttttaggattttgtaatttttaagtatgtagtttatttagatgttaaatatttatgttgaatttgaattaatgtggtgtgtgtgtgtgtatatatgtatgtgtatatatttttatttatatgtatataagaataattttttttttttagttggtggtatggattggataatgtatatatatataatttgtgaagtgataaaagtgtatttaaataatttatttttgttgatttatttttggtttttaaaatattatattatttaattggttttttgttatattattggttatattgaaatttaaggattaattgtagattagtggtttttattatattttggtataaaatttggttgatggttgttttgttatgttttaattattgatttttagggtttcgtggttatgaatgtgttttagttttataatgttttttgttatggtagatatttttgatatttgggcggtggatttatagatagtatttgatggttttatatttgtggatttttttttgtttattgggatttatatttagttggaggtatttcgggaagttattattttttatattaagtaggtatgttaataggtataatttttatgtgtttagtatattgtgttatttgggggaaatattattttataatagaaaatgttaatgtaaattatatgtgataatgatagtaatgaagtgatggtaattaagaaaaattagtttatgttagttagtttgaaatgtttgtttgggttattaaaattgttaagaagatttttttttgagttcgtttttgaaattattgtttttgagtttgttatatttttaaaaatgtgatttttggtttattttttttttttttttttttttttttttttttttttttttgatttttgggggaagaaagatttttttgttgtttattagatattttttttttagtaggtttgttttttttgttgtattagtttttaaagtaaattgatgagtatcgttgatttgtaaaaattagtatatatatgaatttgtttttttaaattttttttttaatgttttttaaaaagttgaatttaatgtgaatattaggagttacggtatttttaagaaaatatatttatgatatatttttgaaaatttttggttttggataagttttttaatttttttttaagtttttttattagagaaattggaattttaaaatggtatgatttttaaagtaaaaagaaaatatagaattgatttaagtattttatacgtttatgtatggtgtatttatttttatagttattagtgataagtatggatttttatggttatattttatattagattaattatttatttttttttaattgtgaaatatatataatttggaatttattatttagatatttttaggtgtgtatttatagtgttgtgtaattattattagtatttatttttagtatttaattattattttaaatagaaattttatatttataattgttttttttttttaatttttttttatttttattttgttttttatttttattagtttgtttatttttggtattttatataagtggaaatatataataaatagttatttttttgtagttggtttgtatagtatagtgtttttaaagtttatt

SEQ ID NO: 504 - DNA, 6000 bp, Artificial Sequence
  chemically treated genomic DNA (Homo sapiens)
taataggtgtagattttaatttaagtaatgtaaagatttattttatttttttatttttaatatattagttagtaggtaggagaaagagaaaataaaaatattgtatagaagattatagtgttttgttttagggttgtaagtattgatattttatttattattaatttttagttattgaatgtttatagtgtttggttttgttagagaatagaatatttaaaatatttgattttttagattatgaggtttatattttaagaagttagtattttttttgggtgattttttttttttattttattttatgatgtgtagtattataatattatattaatttaatttatattttaaaaaaattatacgaatgtggtttaatttatatttttaaaaaaggttgaatttattgttagtatttaataattggaaaatagtttataaaaatttgtatttttagtttttttaggaaaattggaaaatttgggtttatatttttgtgcggtaataattagttaaattttagtttagttgttcgttttaagattagttatttgtattttattgtatttagagggtttttttaatagcgttttttttaagtggtttttttaaagtagtggtttttaaaatttggttttttattggaataatgtgaggagtttgaaaagttattaatgtttgtattttattttagagattttgatgtaatttatttggggtgtagattaggtattgagatttttataagttttttaggtatttgtaatgtgtagagaaaattgagaatttttgtttaagatagggttttttaaagtttaatttgtataggaattatttgataattttgttaaaatgtagattttgattaagtatgtttgggatagggtttgggattttgtttttttaataagtttttatatagtgttaaagttgttggtttatgggttttatttgagaagtaaaggtttaagttatttgtattttatattggttttgaattttaagatatatttttaggttttaagtttaatgaaagttaattttagtatttataatattgatgtagttggaatgatgatgttaaatgagagtattttattatattttggggagaatttttttttagtttatagttatttagttttttttgatattggggggtttttgattttttatgttttgtatgtgatatttttgtattatttttttcgttgtaaattgtatattttttgttatttcgagttttttgttggtgttattatttgttggttaatagtttggttattattgattgaattatggtgtttgggtatttaatgtgagtattttattgtagaggtttttaattagtgtttttagaagttttagagtaatagttttgaaattatagggtatgtattagattatttggagagtttattaaaatatagattgttaggttttatttttagtatttttgatttagtgaggataatttgaatttttaataaatttttaggagatttagatgtttttagtttaaggatttagaggttttagatagaaggaagggaggtggtgtaatgggttttttggttttgttatatgattttttattttatagttgtatttggggattttagattagattttattaaataaaaagattatttttaaaaaagtttgaatattgttgttttgttgtttttgtttttgttttatagaaattaattgaaggtgaaaataaataaaaatgttaatattagtgatatggggagatattattagtttaaaataaatgaaatattgaatttatttagtatatgaaaagagagttttattttttttttttgggatattttttatgatgaaaaaacgtaaaggaaatataatgtatgttggaaataaattattaaagattgtgtttaaatgaggaggtgtatttgggaattttattgtttttaggtttgcgggtgaatagaattttattgtaatagtgtataagattttttttagttatttttagaagaaggagataattagtaaggtttttattgttagagtttgtttagagcggaatttaaaggaaatattgggaaggttatagtagttttattttagtttattggattggattaaagtaattttattgtaaggtaaggtatattattttatttatagatagagaatgtatgaagttttttattttatatagtaggtgtgaagaaggtattttggtaaattttttatttgtttttagataaagtgtatttttaaatatgatgtgggtagttgtttgtttttgtgtcgtttttgtaagagatattttggaataatagaaatattagtgtttgaatagtttaaagtggagtttatttttttgttaggtgagttatttttaaaaatgatattttttaaggataagcgatgaattttaggacgtttttttttttatttttaacgtttataagaataaattattaaatttaacgttttatagaggttaagtgtttaggttttgtgtgtttgtttttaagagtttttttgtaaggaaattgggagggaattataaaagggttttaggtaaatagggtgggcgggtgtagggttttaagttgtagaaaggagaatttggaaagagtttttaggaagtagatttttatatgttttaatatgaaagagtggtatacgtggtgttggtattttattttattattagtggaaggtttgaattaatattaaatttttttggagtaatttaggtaattattatttgaagaatatgtattttaaaattaatatttttaagagataatgtaatttatttgcgttttttcgtttttttcgttcgcgttaattttatttttcgttaatttcgttttcgatttcgcgaacgtcgaggggttcgtggtttgtttgagtgatttttatttgttttgttattttaggattagaagttattagttagcgtacgtttttagaaaattttttttttttttcgcgggttcgtttggttttcggaggcggcggtgttaggttgtcggagttagttagcggtaggttgcgggcgttcgttttttcggtttatttttttattttttttttattttcggagcgttaggcgggtgtcgcgggtttttcgtttattcggaaggtagtgttggcgagattaggaattgtagggttttttcgttttggcgagttttggaattcgagttttttttattttagttattttgttggggcgttaggggttcgaaaaagtttggggttggttgaaagatattcggattagagacgtagttagtttttagggaggtttgaatttgttttcgattttttcgaattttttcgtttttgcgttgggagacgtttagtagtcgggcgggttcgggacgtgtagagttagagtatttcgtagcggaggtagcgcgcggtacggtcgttcggggtattttcgcggttggggggcggaaggcgagggcggtggtaggaagggttcgttaggtttgagttcgtttttttattgttagtcgtcggttcggaggttcgagtcgtgcggacggaaaggggcggagtcgcgggttttggttggtgtgggttcgggggcggggcgcgcggggtcgggtcggaggcggggttagcgtcgggcgttggagttgcgggcgtacggagaggagtcgttagtagttggagcggagttggaggaagtagcggtagcggcgagggcggtaggttagttgtcggagacggtaagtacggatcgggtacggtcggcgggtcgtagtcgggttggaggtcggtcggaatcgagcgggtaggaggttatcgttgtagcgcgggtttcgtagaggaaggaagtcggcgggcggggtaggtaggtagtagtagtttcgggtgtgtgtgttcgggcgggggaggcggtgtatgtgtgtacggttgtcgcgattttttttttgttattggtagcggtttttttttttgtagagtttcgtcggggggaagcgggttggttatcggtttttttcgttttcggtattttttggtcgtcgggtagtattattttcgcgcgcggtcggcgttttgtgagattttcgttattttgattttcgtttttttcgtttttttgcgagttggttttgtacgtcgtcggtcgtatttgttttcggagttgtcgacgagttcgggtttttttttatttttcgttatcgtatatttcggagggttttcgttgtcgttttgttgtagtttttcggggttttttatcggaggagagcgttttggtcgttgttttcgtgttgcgggaaggagcgtttttttttttcgtggttttttagttgtagttagggtcgttgttcgggtttttttcggggcgggcgaggcggcggtggttttcggagttcgttttttaattttcgtttttcgaagtttgtcgtttttttttttcggggtgggggaagtgcgtttcggggcggttggtcgttggggttttaatttagcgtttattgttagttaagtttgggtaggttgttggaggtatatttagtggggttttggaatcgttcggaaatttagtttttggaacgtggggcgaggcgggagggatttgtttagtaatatggagtcggttggggagagttagggagtttgtaattcggagttaaaatatcgtgggtaattttttggaaattatagttttaatttaagtttagaaattgttttttagattataagataaagagaatagaaaatttttggttaggtatttttgtatagaaatatattttgataattagaattggagtttgaaatgtaaggatatatgtagaatggttgttacgtgttgaatgtagaatgtgtgttaattgggtttgggggaatttttttgtttttcggggcgttattaatatcggaaaggttttatttttatcgttaattttttgagttgtagcgttgttggtgttcgagtgtgagtttgttttttatttgggggttttatgattttaggttttttttttttttttttttttttttttttttgttagttagtgcgaagtattaatggataaagtagtttcgggttttgaatgtaatataagattgttattttggtgtgatgaggtttaagttttagtaattaggagggatatttatagagtttattggttaaggtttgatgtggagttatattttaatgttttattagttttgttacgttttggtaattttaaagatggttagatattagttaggaagggttggagtgggtagataggtttattttttaagtaggttattagaatattagattgttatagtttgaattattaggaatttggtgatttttgtatagaaggttataagtattttttaatattgaaaaaggaagaaaaagtaatttattagttatataattttttgatagattatattgtttttgaaaaatcgtttagaagaaagtagataagagtttttttaggtgtaaaagttgattaaattttaggaagtaagtgtttttgattagtataaagaaaataagagtaatgtgtgggggtgtgtgtgtgtgtgtgtgtgtgtgcgcgcgcgtgtttgcggttaaagtttgggaagaaatgttggtttagagttaaggtttaagttggaaaggttagtggaggaggttttttgttttgtagaattgttgggtattgttattgtttgtttttttagtttttatatgtaggtaggtattagataattatattattttttttagagaagtggatagatttttatgattgggagaaagtttaatgtatttgatattggtttgtaaagtgtaatgtgtatttatttttaatttttattttgatttgggatttgtttttagttgtataatagaattttgtagtgtatatattgttatttgatgttttatttgttttttaaaaataatgatattagtgagtttttttttatttatgatgttgtatagttagtgtaaaaagtattttgttttttatttattgaatgttttttttttag

SEQ ID NO: 505 - DNA, 6000 bp, Artificial Sequence
  chemically treated genomic DNA (Homo sapiens)
ttaaagaaaaaatatttaataaatgggaaataaaatgttttttatattgattatatagtattatggataggaagagatttattgatattattatttttaaaaagtagataaaatattaaatagtagtgtgtatattgtagagttttgttatgtaattaagaataggttttaagttaagatgaaagttaaaagtaaatgtatattatattttgtaagttagtattagatatattaaatttttttttaattataaaaatttatttatttttttggaaaaagtaatatgattatttagtatttatttgtatataaaagttgaagaggtaagtagtgataatatttagtagttttgtaaggtagggagttttttttattggtttttttaatttaaattttaattttgaattaatatttttttttaaattttagtcgtaggtacgcgcgcgtatatatatatatatatatatatatttttatatattatttttattttttttatattggttaaaaatatttgttttttaaagtttaattaatttttgtatttaagaaaatttttatttgtttttttttaaacggttttttaagaatagtgtaatttgttaaaaagttgtatagttagtgagttgtttttttttttttttttaatgttaaaagatatttgtggttttttgtgtagaagttattaaatttttagtaatttaaattgtgataatttaatattttaataatttgtttaagaaatgaatttgtttgtttattttaattttttttagttaatatttaattatttttaaggttgttaaaacgtaatagaattaatgaagtattaaaatataattttatattaagttttgattaataagttttgtgaatattttttttgattattaaaatttgagttttattatattaaaatgataattttatgttgtatttaaaattcggaattgttttatttattggtatttcgtattggttgataaagaggaaaagaagagaaaaaagaaaaaaaatttaaaattatgaagtttttaaataaagagtagatttatattcggatattaatagcgttgtagtttaagggattaacggtggaagtgagattttttcgatattaatagcgtttcgggaaatagaagaatttttttaaatttagttgatatatattttgtatttaatacgtaatagttattttgtatatatttttgtattttaggttttaattttggttattaaagtgtatttttgtataggagtgtttggttagaggttttttgttttttttgttttgtgatttgaggggtagtttttgagtttaggttagagttgtggtttttagagaattgtttacgatattttagtttcgggttgtaggttttttggttttttttagtcggttttatattgttgggtaggtttttttcgtttcgttttacgttttaaaagttggattttcgggcggttttaagattttattaaatatgtttttaataatttgtttaagtttggttggtaataaacgttgagttagggttttagcgattaatcgtttcgaggcgtattttttttatttcggaagaggagggcggtaaatttcggaaggcgggggttaggggacgagtttcggggattatcgtcgtttcgttcgtttcgggaagggttcgggtagcgattttggttgtagttggagggttacgggggaagggagcgttttttttcgtaatacgaaggtagcggttagggcgttttttttcggtgaggggtttcggaaaattgtagtaaggcgatagcggggatttttcgaagtgtgcggtgacggagggtgggaggaagttcgagttcgtcggtaatttcgggggtaaatgcgatcggcggcgtgtaggattagttcgtaggaggacgggggaaacgggagttaggatggcggggattttataggacgtcggtcgcgcgcgggggtagtgttgttcggcggttaggagatgtcggaggcggggagggtcggtggttagttcgttttttttcggcggggttttgtagaaggagaagtcgttgttagtgataggaagagagtcgcggtagtcgtgtatatatgtatcgtttttttcgttcgagtatatatattcggggttgttgttgtttatttatttcgttcgtcggttttttttttttgcggggttcgcgttgtagcggtggttttttgttcgttcggtttcgatcggtttttagttcggttgcgattcgtcggtcgtgttcgattcgtgtttgtcgttttcgatagttagtttgtcgttttcgtcgttgtcgttgttttttttaatttcgttttagttgttggcgattttttttcgtgcgttcgtagttttagcgttcggcgttagtttcgttttcggttcggtttcgcgcgtttcgttttcgagtttatattaattagagttcgcggtttcgttttttttcgttcgtacggttcgggttttcgagtcggcggttggtagtgggggagcgagtttaggtttggcggattttttttgttatcgttttcgtttttcgttttttagtcgcggggatgtttcgggcggtcgtgtcgcgcgttgttttcgttgcggagtgttttggttttatacgtttcgggttcgttcggttgttgggcgttttttagcgtagaggcggaggggttcggggaggtcgaagataagtttagatttttttggaggttggttgcgtttttaattcgagtgttttttagttaattttaggttttttcgagtttttagcgttttagtagagtggttggggtggggaggattcggattttagagttcgttaaagcggagaggttttgtaatttttggtttcgttagtattgtttttcgagtgggcggaaaattcgcggtattcgtttggcgtttcgggggtgaaggaggggtgaaagggtgaatcggagggacgggcgttcgtagtttgtcgttggttaatttcggtagtttggtatcgtcgttttcgggagttaggcggattcgcgagaagggaagagagttttttgagggcgtacgttggttgatggtttttagttttgagatgatagagtaaatggaggttatttaggtagattacgggtttttcggcgttcgcggagtcgggggcggggttggcggggggtggggttggcgcgggcggggggggcggggaagcgtaggtgaattatattgttttttaaaggtgttagttttgaaatgtatattttttaagtaataattatttaagttgttttagaaaaatttgatgttggtttaaattttttattgatggtaagatggaatgttagtattacgtgtgttatttttttatattaaaatatgtgagaatttgttttttaaaagttttttttagatttttttttttgtagtttaaagttttgtattcgtttattttgtttgtttaaagtttttttatagtttttttttagtttttttgtaagaaaatttttaaaaataaatatataaaatttaagtatttggtttttgtaaaacgttgaatttggtggtttatttttgtggacgttggaagtagagggaagaacgttttaaaatttatcgtttatttttaaaaaatattatttttaaaggtgatttatttaatagaaaagtaagttttattttaggttatttagatattggtgtttttattattttaagatgttttttgtagaggcgatataaaaataggtagttatttatattatgtttaagaatatattttatttgaaagtaaataggaaatttattaaggtattttttttatatttattgtgtgaaatgaaggattttatgtattttttgtttgtaaatggaatgatatattttgttttgtagtagaattattttgatttaatttaataagttgagatgaaattgttgtgatttttttagtattttttttaggtttcgttttgaataaattttaatagtgaaaattttgttagttattttttttttttggagatagttggaaagagttttatgtattattgtagtgggattttgtttattcgtaaatttaaaaataataaaatttttaaatgtatttttttatttagatatagtttttagtaatttatttttagtatatattgtattttttttacgtttttttattataaagagtgttttaagggaagaaaataaggttttttttttatatattaaataaatttagtattttatttgttttaaattgatgatatttttttatattattagtattagtatttttatttatttttatttttaattgatttttatgaaataaaagtaaaggtaataaaatagtagtatttaagtttttttaaaaataatttttttatttaataaaatttagtttagaatttttaaatataattataagataagaagttatgtaataagattaagaggtttattgtattattttttttttttttgtttagaatttttggatttttggattagaaatatttggattttttgagaatttgttggaaatttaaattgtttttattgaattaggaatgttgagggtggagtttagtaatttgtattttaataagttttttaagtgatttgatgtatgttttatggttttagaattattattttaaggtttttggaaatattgattgaaaatttttgtaataaaatatttatattaagtatttaaatattatggtttaattagtaatggttaaattgttggttagtaggtagtgatattagtaaggagttcgaaatagtagaagatgtataatttgtaacgaaaggggtgatataggggtgttatatataaggtataagaagttaaggattttttaatgttaagaaaggttgagtagttataggttgagaaagaattttttttaaagtatggtaggatatttttatttggtattattattttagttatattaatattgtgagtgttagaattagtttttattagatttgaaatttaagaatgtattttagggtttaaagttaatgtgaaatataaatggtttagatttttattttttaagtgaggtttatagattagtagttttggtattatgtaagagtttgttagaaaggtagaattttaggttttattttaggtatatttaattaaaatttgtattttaataagattattaggtgatttttatgtaagttaaattttgagaagttttattttagataggggtttttagttttttttatatattgtaaatatttgaggagtttataaaaattttaatatttggtttgtattttagatggattatattaaaatttttggggtgaaatgtaggtattagtaattttttaagttttttatattattttagtgggaagttagattttaggaattattgttttggaggagttatttaagaaaggcgttattaggaaagttttttgggtatagtagagtataaatggttggttttaaagcgggtagttgaattagagtttagttaattgttgtcgtataggaatgtgagtttaaattttttaatttttttagagaagttgaaaatatagatttttatggattattttttaattattgaatgttggtaatgaatttaattttttttagaaatataggttaggttatattcgtgtgatttttttgaaatgtgggttaggttagtgtgatgttatgatgttgtatattataaaataaagtgggaaaaaaaaattatttaagaagagtattggttttttggaatgtaagttttatgatttaaagagttaagtgttttaaatgttttgttttttaatagaattaaatattgtaggtatttaatgattgggaattggtaatgggtgagatattaatgtttgtaattttggggtaaaatattatggttttttatgtaatatttttatttttttttttttttgtttgttaattgatgtgttgggggtgggaaagtagaatgaatttttgtattatttagattaaaatttgtatttattg

SEQ ID NO: 506 - DNA, 6000 bp, Artificial Sequence
  chemically treated genomic DNA (Homo sapiens)
agagtttgatttataaattttgttttaaatgttttgggtttggtttttaatttagattaaaggtaagtattaaggtagagggaaatgatatttaaagagttttatttgtttttgatttaatttttattggtttaaaatgtggtttgatattagagggttgttttaaaggtgaaaaatgaaattttgaaaaattatatgtttgtagatgcgtagaattaaacgggtaagttatattaggttttgttaaataatagttttatttgtgttttgagagatataggtattttggtatgtatgtgtttaggaggggtatatagttagttttatttttgtttttatagtgtagatgtttttttgttttaagggataaagatttgagggagaattgtaggggggattattttattttgttaagtagtggggatgtttttattagaaatttggtagaatgtgttagagtttatatatacgtaaatttgggtttatttatatatttaaatggatgttttttttagtataatgttagttaagattagtggatatggagtaaataatttgaattattttaaaaggttttttgttttaagttgttttaagttaaaattatgaagagaggtatttattttatttttagatgaagattttggttaatttttgttgtttatttttttttttatggtttttgtttataaatgatgtttagaaaaagaagaagttttttaggttgaaagttgtttgtgtaatatttgttatttgatggtgatttgtatatatgaaatatagtatttagtttgtaatttttgaatagtttaaggattaagagatatttttttaattatatttgttgagaagtgaaataatgggttgtatttgtttttgaaatgagttttacgaaattttgaggaaagggagaatgatatatattgttttaaagaatttagaaggtaaagttagttttttagtgtgtttaggtttttgaggttttagagaaatgttgatattaaaataaaagtttttttataatattagtagtttcgtgaaaattgtatttttgatttattaattagtgagttatatagattaagtgatagtaatataattatgtatattagttggtgttaaatttggatatacgaaatatatagaaagttgatggtttttttttaaagtaggaattattgatttagttttattagtagagggtttttttttttaagttaataaagaatatgtgttttgtagattattttttaaatattaaaatttaacgggaaaaagatttagtttatatttttttaatataataggatttttttggtagatgattgtatatattgtgagaaatttgtttaaggtaaagtttttttaatttattttaagattttttatacgttgagagagtattgttttttagtggtttatttttttttgaaatagaaaatatattggtggatttaatagagtattttaattttagaaggttttgatatgaaatattatgtgaatttagataggtatgtttaggagattgatgtttttaatgtttttagttttagaaaggttatttttaaaagtagggtaagattatgtagtttaggatgtaagggtattttttgaattaattatatgtttttatgattagatggtagatttatttatagattgttatttttattgggaaagttttttaatattatattagttgtattaaaggaaagtttgtaaaattatttttattgtgggtttaatagtattttttagatattttaagtaattttgaagttagttgttgttgttggtttgtgtggattttatgtgattattggattatttttttatgtagagtatgagggtattattgaaagaatttatgtttttaaagggaatgaaatgttttgttttaatttaagtaagttaaaaatagaaaatagaaaaaattagagttttgttaggggtgtgaaattttttgtatgtggtttaaaagattaattttagttttgtttatttttttttacgttttttagtaaagggaagtgaggagtagggataatgggtagagaagggtatttgaaattattagaagattgggttttagttttagggttataattttttgtaaattattttatttttttgggttagatttcgtttttttttttatggtatgtaggaattgattgaagtgaattttaaattattttttggtgtaaagtttggtgatttttttggataattttaaagttatttatgtttatgtaattgaaaatttttttagattaaattttaattaaatagtagttagtaattttaagtttggtttattgttatttttttaaataaagggtaaatattcgtttagaaaggtatgtttttttttgtttttttattttttattttattagttggtatataaatttaatgtagagatattttttaattagtaggttatatggttatttaaatgcgagttgtaatcgattttataaaaatagtcgtagtgttgttttattttgaatcgttatatgattatggagtatagtatgtatatggtgtggggtttaatattcgttcgaggatgtttttttattatttattattgaatatttttgtaattttttttttgttcgagttgtttataagggtttttttgttatatttgtagggttgtttgtgttggtgtgtgggaggaggtgtaagaggtggatacgagcgaggcgttgtgttttgggttgttttaagaggtttaggtttttataagtgaggttttgattttattttttgttgaattagtttagttattttttgtgtttggttgtgtatagtgtttcgttttattgtcggttatttgagtttcgcgagttagttagcgcgtttagtagttagtgagattattttaggtttttttataatggtttttttattttttaggcgaaaatgagtaagttggttttgtattggttatttgttagtcgatgataattttgatttgggtttttttttttttttcgaaatttttagtttagtaaatatttgaatttgtttaagttaattatgaagttgcgatttttatttaagggagacgtgcgagcgtttgggtttttttttttttcgatatagtagcgaaatttagttggttttttaatgaggagtcggtagtgagcggcggtggttcggacgtattgtcgggcggggcgtggggcggagggacgagtcgagtcgagttaagcggagttgggttattgtgtacgttcggagggttttggcggcgttttcgtttttgcgcgtattttcggcgtcggatacgagtattgtttgtcgggaataggttggggggaggtgcgggggtttggtttatttggtggaagaatagttttggggatttttttttttttattgtcggatataggtattttaaagggaaatcgttgaaatgtataatttgtaaagtaagttgttttgaatttgtgtatttttttgttttttatttgagcggtgtttttttgtagtttgttttggagtacgtgtgtgtgcgtgcgtttttgtaagcgttgtttggggaggatagatgggagattaggggagatattttttttgttttcgagggggatagtggttgggaaagatagggtttaggttggaattttagtaagaaggtattaattataacgtgtttggttggaagttggtgttaggttagggtttggagagattatgggaaaattatttgtttttttgttttttttttgagttagtttgttatagaagatttaatagttagattggtttgtatcgacggtttttaaatgtatggattggtattttgggttgttatattcgttatagttgttcggagaatttgtttttttgtttcgggggagggtcgatattttaattaaattaaaaaagaatgtttttttgaattttagggtatatagttatttttattatttttatttgaatttgagtttaggtaaatttaggtaaatagaaaagtgggagagggtgggaagagataaggtgagtttgttttttttaatattgggaaaatgaattaaattagacgggggacgttagagaatagaatgttttgtttttggtttgttttttaatatattttatgattttaaattttatagaaagttttaagggtttttgtgttttttaaatggttaaatatgtgatatatatgtgtatatagattatagagttttattgtagttttttaaatgagttatatttattttggggaagagttttttttttttcgttattataatattgtgaatgtaaagagagattggtttataatgagaatgtatagtaggtttttataagggtgataggattatatgtagaatgattttgaagagttaaaattgatttatttatgttaagtagtgttaagaaggaatatttgtttcggagtgaggtatttgagatagagggggaaaagtaaaaaaaaaaaaaaaaaaaaaaaaaaagtgattatattattttttcgtttaagtagtattagtagcgaagatgggtttattagtgaaatattttgtaaagataaatatatttttattttgtattttgatttatagtttttttttttttggaagaagtattttttttgtttagtttttttaggtagttatattaaaatttttattaataatgttgatagataattacgtttattatttttgttaataggtatttgtatttttatttagaatttttattgttagtttataaagtttagttttaattttggaatgtttggtagaggaggatatttatatatttttttttaattgttttttttaatgtggtatatttgtgatagtgtttgaattttgggtttttagtgaattatggaggattaaaatattaggagtagttcgtattgttttttttatatatgagagatatttaaggattataaaatataatttaagtatatttttttaatgtttttgtaagatttttaaattaaggaatgattgggttatttataaatttagatgtattaagtggggagaaaagttcggagttgtagtatattagtttttgttaatttgttaatagtagagcgtattatgttgtaaggagtaataaataaggaattagaaaattcgttgttggagaatagttaaattaaatatttttttgaaaggatgagtatgtatatattgtagttttattaaatgtagttttttagtgaggttggtattatgttaaggttggtatggaagagaattgatgaagtaggagtggtttggtgatatttttttgatttgattggttggggcgtgtgatgtaataggttttagtgtagttttttataggttttaaaatgaattttaagatattattataaagaaagtcggattttttttttataattgagtttagttaaggaaatttttgtataaatgtataatattgtttggaatatggaagatttggatttagaatatgttaagatagatataaattgtggtatagatttgatgttttatatagaaatggatttattaggtaatattgtagtattattgtagagagttagttaatttcgtggttttttaatttttcgaaagttattgtaaaagattttttttggatttttgtttttattaatttgttttattgataaaaattagtttgtttatggtttaaaaattaaatagattgtttgattgtttgtggaagtaagtagtttaggttgtgtgtggtaaatgtttatttttatttgaatggatatgaattgaattttagttttttattggtgttttttgttaatcgagatttttttttgggtgagttatgttgtgggatattgtttttgtaattaaaatgatgtattttttgtgttgtttttttttgttgttagtggatgagaatagtgtagtattttgtagtgataatatttggtattttagaaagtatgtaaaatgtagtagtgattataatttagttttttaaatgttgagattttgtttgtttttt

SEQ ID NO: 507 - DNA, 6000 bp, Artificial Sequence
  chemically treated genomic DNA (Homo sapiens)
agagagtaagtaaagttttaatatttagagaattgagttgtaattattgttatattttatatgttttttaaagtattaagtgttattattgtaaagtgttatattgtttttatttattggtaatagagaaaagtagtataaaagatgtattattttaattatagggataatattttataatataatttatttagggaaggatttcgattaataaaagatattagtgaaaaattggagtttaatttatatttatttaagtaagaataagtatttattatatatagtttgagttgtttgtttttatagatagttaaataatttgtttaatttttaagttatgagtaaattaatttttattaatgaaataaattaataaaaatagaaatttaaaaaggattttttatagtagttttcgaaaaattaaaaagttacgaaattaattaattttttataataatattgtagtattatttggtgggtttatttttatataaaatattaagtttgtgttataatttatatttgttttggtatattttaaatttaggttttttatattttaaatagtattgtatatttgtgtaagagtttttttggttgagtttagttataagaaaagagttcggttttttttgtaatggtgttttggaatttattttaaaatttataaggggttgtattgaaatttattatattatacgttttagttaattaagttagaaaaatgttattagattatttttgttttattagtttttttttatattagttttaatataatgttaattttattaagaagttatatttaatagaattgtaatatatatatgtttatttttttaaaaaggtgtttaatttgattgttttttagtagcgagttttttaattttttgtttattattttttgtagtatggtacgttttgttgttggtaggttgataaaagttgatatgttgtagtttcgagtttttttttttatttagtgtatttgggtttatagatagtttagttattttttggtttaaaaattttataaaggtattaaaagggtatatttaagttatgttttatagtttttagatattttttatgtataagagaagtagtacggattatttttggtattttagttttttataatttattgaaaatttagaatttaaatattgttataaatgtattatattagaaaggatagttaaaagaaaatgtatagatgtttttttttattaaatattttaaagttaaaattagattttatagattaataatgaaaattttgaataggaatgtagatgtttattagtagaaataataaacgtaattgtttgttaatattattaatgagaattttaatgtgattgtttaaaaaaattgggtaaagaaaatgttttttttaaaaagaaagaggttatagattagaatgtagagtggaggtatatttatttttgtaaaatattttattgatgaatttattttcgttattaatattgtttgaacgggaagatgatgtaattattttttttttttttttttttttttttttgtttttttttttttattttaaatgttttatttcgggataaatatttttttttagtattatttaatataaataaattaattttggttttttaaagttattttgtatataattttgttatttttataggagtttattgtatatttttattgtgaattaatttttttttatatttataatattatgatggcggggggggaggggtttttttttaaggtaaatgtggtttatttaaaaaattatagtggggttttgtgatttatgtatatatgtatgttatatatttgattatttaaaaaatatagaaatttttgagattttttgtaaaatttgggattataaaatatattaaaaagtagattaaaggtaaggtattttgttttttgacgtttttcgtttagtttaatttatttttttagtattgggaaaagtaggtttattttgtttttttttatttttttttatttttttatttgtttaagtttatttgaatttaaatttaaataaaaatggtaaaagtggttgtatgttttaagatttagaaaaatatttttttttagtttaattaaaatgtcgattttttttcgaagtaaggagataagtttttcgagtagttgtggcgggtgtaatagtttagagtgttagtttatgtatttgggaatcgtcggtgtaaattagtttggttgttggattttttgtggtaaattaatttagggagaaggtagggagataggtgatttttttatggtttttttaagttttggtttggtattaatttttaattaagtacgttgtaattagtatttttttattgaaattttaatttaaattttattttttttagttattgtttttttcgaggatagggggagtgttttttttaattttttatttgttttttttaggtagcgtttataggggcgtacgtatatatacgtattttaagataaattatagaaaggtatcgtttagataaggaatagagaagtgtataaatttaaggtaatttattttgtaggttatgtattttaacggtttttttttgaaatgtttgtattcgataatgaaaaaaaaaaaatttttaaagttgtttttttattaagtgggttaagttttcgtatttttttttagtttgttttcggtaggtagtgttcgtgttcggcgtcgagagtgcgcgtaggagcgggggcgtcgttaggatttttcgggcgtgtatagtggtttagtttcgtttggttcggttcggttcgttttttcgttttacgtttcgttcggtagtgcgttcgggttatcgtcgtttattgtcggttttttattgagaagttaattggatttcgttattgtatcggggaggaaaggagtttaggcgttcgtacgttttttttagataaagatcgtagttttatgattaatttgggtaggtttaaatatttgttgagttagggatttcgggagggggaggggagtttaagttaaagttgttatcggttgataagtggttaatgtaagattaatttgtttattttcgtttgggaaatgagaaggttattgtgaggggatttaaaatagttttattggttgttgagcgcgttggttggttcgcggggtttaagtagtcgatagtgaagcgaggtattatgtatagttaaatataggaagtggttgagttagtttagtaaaaaatagaattaaagttttatttgtaaaggtttgaattttttggaataatttagaatatagcgtttcgttcgtgtttattttttgtatttttttttatatattagtatagatagttttgtaggtgtaataggaaagtttttgtgagtaattcgggtagggaggagattataaaaatgtttaatagtaagtagtaggagggtattttcggacgaatattaaattttatattatatgtatattatattttatgattatgtgacgatttagaataaaataatattgcggttatttttatgaggtcgattgtaattcgtatttaaatggttatatgatttgttaattaaaaggtgtttttgtattaggtttatgtgttagttaatggggtaaaggatagaagggtagagaagggtatatttttttaagcggatgtttgttttttatttgagaaagtggtaatggattagatttgggattattgattattatttaattaaaatttgatttaagaaaatttttagttgtatgagtatagatagttttaaggttatttagggaaattattaaattttatattagaaagtaatttagagtttattttaattaatttttgtatgttatagaggggaaaacgaaatttgatttagggaggtgaagtggtttatagaagattatagttttaagattagaatttaattttttgatggttttaaatgtttttttttatttattgtttttgttttttatttttttttgttagagaacgtaaaaaaaaatggataaaattgaagttaattttttaagttatatgtaaaaaattttatatttttaataaaattttggttttttttgttttttatttttagtttgtttaaattaaaataaaatattttattttttttgaagatataggtttttttaataatatttttatattttgtatgggaaagtgatttagtggttatataaagtttatataggttaatagtagtaattagttttagggttatttgaaatatttggaaagtgttgttaaatttataatgaaagtgattttataaatttttttttagtgtaattgatataatattgaaaaatttttttaatggaaataatagtttataagtgaatttgttatttgattatagggatatatggttagtttagagaatatttttgtattttgagttgtataattttgttttatttttaaaaatagtttttttaaagttagaaatattggaaatattagttttttaagtatatttgtttggatttatatgatgttttatgttaaaattttttaagattaaaatgttttgttaagtttattagtatattttttgttttagaagaaaataagttattggaaagtagtatttttttaacgtatagaaagttttgaaatagattggaaaaattttgttttaaataaattttttataatatgtataattatttattaaagaggttttattatattaggaaagtgtgagttgaatttttttttcgttgaattttagtgtttaaaaagtgatttgtaagatatatgttttttattagtttaaaaaagggagttttttgttggtagaattgaattagtaatttttgttttgggagaaaattattaattttttgtatatttcgtatgtttaaatttgatattaattaatgtatataattgtattattgttatttgatttatatgatttattaattagtaaattaaaagtatagtttttacgaagttgttagtgttgtaggaaaatttttattttaatgttagtatttttttgggattttaaaggtttagatatattggaaaattaattttattttttggattttttaaaataatatgtattattttttttttttttaaagtttcgtaaaatttattttagaggtaaatatagtttattgttttattttttagtagatatagttaggaaaatgttttttgatttttaaattgtttaaaagttataaattgaatattatattttatatgtataagttattattaagtggtaaatgttgtataagtagtttttaatttagaaaattttttttttttttggatattatttatgaataaagattatgaaaaaaagaatagataataaaaattaattaaaatttttatttaagggtaaaatgaatatttttttttataattttaatttaagataatttagaatagagggttttttagggtaatttaaattatttgttttatatttattggttttaattgatattatgttaaggaaaatatttatttaagtatataaataagtttaggtttacgtatgtataaattttgatatattttattaggtttttgataaaggtatttttattgtttagtagaataaagtagttttttttgtaatttttttttagatttttgttttttgagataaagagatatttgtattgtgaaaataaaagtaaaattgattatatattttttttaaatatatatatattaaaatatttgtgttttttaggatataaataaaattattgtttgataaaatttagtgtggtttgttcgtttagttttacgtatttataaatatgtaattttttaaagttttattttttatttttgaagtaattttttaatgttagattatattttaaattaataaaaattaaattagagataagtaaaattttttgaatgttatttttttttattttagtgtttgtttttagtttgggttgagaattaagtttagagtatttaaaataagatttatgaattaggtttt

SEQ ID NO: 508 - DNA, 6197 bp, Artificial Sequence
  chemically treated genomic DNA (Homo sapiens)
ttgggagtttaaaggtaggaggtagggatgtgatttttataggtttaagaggagttagattattttagtgtggttggaagtttttatgttatattttattttttttgtattttaatgtagtttatttggggaattggagtaggatttaggtttaaatttatatttttagttaatttaaattttgattttattatttttaggttatataggttatttttttgaattttagtttttgtatttgtaaaatggaatttttttttttttttttttttttttttttttttttttttttgagatagagttttattttgttgttaggttggagtgtagtagtgtgattttggtttattgtaatttttgttttttaggtttaagtaatttttttgttttaattttttgaatagttaggattataggtatttattattatatttggttaatttttgtatttttagtatagatagggttttattattttggttaggttggtattgaatttttgattttgtgatttattttttttggttttttaaagtgttgggattataggtgtgaattattgtgtttagtttgtagaatggaattttaatattaatttgtttaagtatatgtttatgttattttaaaagataatttttgtaggttaggtgtagtgatttatgtttgtaattttagtattttgggaggttgagggatgtggattattggagtttaaaagtttaagattagtttgagtaaaatagggagatttttatttttattgaaaattgttttaaaaaaattagttaggtatgatggtgtatgtttgtagttttagttatttagaaggttgaggtgggaggattatttgagttagtgaggttaaggttgtaattagttatgatggtgttattgtattttagtttgggtgatagagttagattttgttttaaaaaaataatgaaaaatttaaaaagatgatttttttgataattatgggttgttttggggatttaatgagatggttttatatatagttggggatagggttagtgtttgaaaaataggtggtaattatataaaggattttgatattaggggttgttttgagtttgttagagttatgtagtggtagttaatgttattgttgttattatttggttttaaaggaattattttaataatttttaatatgtttttattaattttttgaaaatattatttaaatgaaaatatatagttaaaaagagttaatgttttgtagatatttttttttatttgttaaggtttttggatattagtttgagaagttgggttttagggtgttttgtttttaaagtagaatatggtttgttttttttatttttggttgttatttgaatttagttagtttttttttatataggtttttttttatttatttgtgttttttttttttggggataaagttttggatttttattatagtttaggttttgagttttgttattttgtttttttttttttatttatttttttggttttagttatatgggtttgttgttttattagtatatttagatattgttttttttgtggtttttatttggttgtattttgtttagtttatttttttgggtttttatattataggggttttttagtagtttttttaagttttttttttatttagtttagttagatttttgtttttttttttagttatattaagtatttataggttaatgtaatttttttgttatttttgattgtatttagaattatatgtggtatatagaagtgatttaattaatatttggagatagatggaatatataaatgattaagaatagttaaaggttggtttttgaggttgtttagtaattaggtttttagggtagtggggagggggtgttttttatttttattttttttttttgggttttttttgggaggggttaaggttatggtattgggggtggagagaagtagttatattttatattttaagtaggtatggaatggagttatttttggattattgaggtttattttgtgttagttttgtttaggagaagagaaagtagaaaagaaattatgatgataatagtgataattttagttatagtaggtagggtaagaagatgaggttgtttttaaaaggtagttttgttgatagagtagggtttaattattatgtttattattgatttttagtaaatttaataatttttttatgtttgtttttttttttgtataatggggatgattgggatagtgagttgttaggttgtggtgaggatgagtgagagtagatattttaagttttgtagtagtgtttagtattgagaggtgaattatttatgagaatgattttaatattttatgtggttttttgggttttagttttttatttatgagatgggagtgttaatattgtttattttttaggttgttgtgtaggtttgtagagttaatatgtagtgtttggttgggtaggagtatagtggtgggagtgatttatatttttgtttggagtttttttattagttaataggttttattatttttttttaaggattaataatgagtttgtgtttattgttttgtagagttttttttgtgtttttaggtgtttttagttttgtttggtaattattaggagtagtattagtttaaatttattttgttgtttttttaggaggtttgtgttttttaatgtagtagttttgtgtattttttttattgttttatttagtaggaaggtttttgtttatagttgagtaaaatgtattttagggagaagaaataaggttttagagttttatagttattgagaggggtgttaagagtagggtttttatttatgttagttatttttgggattaggttatttagtagttttagttgggtaagtgtatattaaaaatttattagattatgaagaatttgaagttaggttggagaagagaattggggagtggtaattgttttagtttatttggaaagggtttataaagtggtaaattgaggaagatttgggtttttggttttatttttagaaataatatttgtgaatgagtttttttagtaggatggttgggttgaagaaatttttgttgggatttttgatatgtagtttttttttggttgatttggtttgttgttttttgtttggtatagttagagtatttgggttttgttgtgggtgttgagttggtagtgggttttgttttaagggggttaggttgagtttttatttagtgttttttttatatttatttttttttttttggttttgtttttaggttgttttttttagttgggttttttgttgtttggttggttgtttagaagagtttgttatggaattattttattgtgtggtttggaggtttgtggttgagggttttttgttgagagttttgggaagttgaagagaggtttggggaggggtgattttgggttttttaggggtttggagtttaagtttgaaagatatttttttttattttaatttattttgggggttttttggagattttagtggtttgttttgaggggttttgttttttttaggaagatattttggaatatattttaaaaaaaaaaaaaaaagttagagtgtttgtttttgtattaagttttaggggtgagtttatgggtgggattagaagttatatttattaggggttattgagttgtggtgggggaatttttggaagtttagatttatagtttgtttttaatattttttggttgggggatttagtataagttatagaggttttttaggttttagtttttattatttgtaaagtgggaattagagaagattttttttgggtttaatgggtttttatttagatttttttatggtttttttatagtattttagtttttatttatatgttatttttttagggaggttttttttgattatttagttatagtggagaaatatgtttatatttttaatttggtttttatttattttgtttttgtaatattaattatatttgagtttaattagagatttgggtgttgggtgttagttataagttttggtttttttaattttagaggagtattgggaatggtgtaggtttataggtttatggtagtgtggatgtagggttagtgggtgttgtttgtattaggtgtgattgttgttttgtgttgttatttagtattagtttggttggttgggttggggaggaatgggtagagaaattagtttaatgagtttttttttttttttttttaaaagtaatagttatgggttttggagaatatggtgtgaaaattataggagggaggtaatttttaggtttttgttggttgtaaggtagtgatgttattggaggggaagtgggaggtttgtgaaatgttttgttttgtttagttaaatttatttatgtttttaggtaggagtttgtgattggtttttgggttatttgttaatattttgaatttgattaggttgtttttgttgaaattttaaatttttttatagatagtttataaggtttttagtgaaagggttttgtttgttttgtagttttaggatttattttttttttgtttttttgttttgttaagttatataggtttttgtgaggtttgtttttgtattttattaagttttgttttttttttagatttttgtattgtggttttttttatttggagggttgttttttttttttttattttatatgattgttttattttgttaaattgggattagtttagaggttttttttatagttgtatgtatttaaagaagtgtttagtttgttatttgatttgaatttgttgtttagtttttttttttttaattggttttttgtttattaatttgttttgggttggttttgtttagttttataaggatagggattttggtaagtatattgttgtatttttagtattgatgtaatgttggtatatatgaggtgtttagtaaatggtggtggatgagtgaaattttttttttggttttataatatttttaggatttatttttattttttatttaggtttataggttagtgtagtatagtttttgttaatttttgtaggtatttttgttgttttttttgtttaggtttagtttttttgttatttttagagttgtgagttgtggtgggttgggaattaggggtagtggtatgtatttatggttttagttatttaggagattgaggtaggaggattatttgagtttaggagtttaagattagtttgagtaatatagtgagatttttgtttttataaaaaatttaaaaattagttaggtatggtggtatgtatttgtagttttagttatttaagaggatgaggtggaaggattattaaagtttaggaggttaagtttgtagtgagttgtgattatattattgtattttagtttgggtgatagagggaggttttgttttaaaagaaaaaaaaaaataagtatagagtttgatttttgaaaagattttagtgtgtttattttggaggtgtttagggttgtaaagttattgtgtggaagaggagtgggtttgggagttgtttttgttagttttgatttgattgtatgttttttttgatttttgtttttgtatttgtaaaattgagatgttaattttagttttgatttttttttagtgttttttgatatggttttgtgaattggtaaaggtttttaaagttttggtagaaatattaagaattataattgttaagatagattaatagtttattatgtgttgggtattgtttttagtgaggagatatttttggtaggtttattgtatgttagaatagttatgaatgttttttataaattaatttatttagtttttataataattttattaggtgggaattattattatttttatggtattgatgatgaaatgagtttataagggttggggagtttgtttaaggttatatagttatggagtggtatggttggatttgaattttgtgtttttatttgtttttatatatttttttatagaggttggaaattagaatattgaagttttggattttagttgggttaggttggggagttggattttggaatgtttgaggggattaaaagtagggggtgggggaggttggatgtttttgttttataatataattatgattgttaattaagatttatatagtattaggtattattttaggagttttttgtggattaatttatttaatttttataatagtttaaggtggat

SEQ ID NO: 509 - DNA, 6197 bp, Artificial Sequence
  chemically treated genomic DNA (Homo sapiens)
gtttattttgggttgttgtgaggattaaatgaattaatttatgagaagtttttagaatggtgtttggtattgtgtaagttttggttggtagttatgattatgttatggaatggaggtatttagttttttttattttttatttttggtttttttgagtattttgggatttagttttttagtttggtttagttaggatttagaattttaatgttttggtttttagtttttgtaaagaggtgtatggaagtgagtgagagtatagggtttaaatttagttgtgttattttatggttgtgtgattttgagtaggttttttaatttttgtgagtttattttattattggtgttatggggatgatgataatttttatttgataggattattgtgaaggttgagtggattaatttgtgggaagtatttataattgttttggtatataataagtttattggaaatgtttttttattaagaatagtgtttgatatatggtgagttgttggtttgttttagtaattgtaatttttagtatttttgttgggattttgaaggtttttgttagtttatagaattgtgttagagagtattaggaggagattagggttgaaattagtattttagttttatagatgtagaaatagaggttgggggagatatgtaattaagttagaattgataagggtagtttttgggtttattttttttttatgtagtggttttgtagttttgagtgtttttaaggtagatatattggagtttttttagaggttaggttttgtgtttgttttttttttttttttgagatagggtttttttttgttatttaggttggagtgtagtggtgtgattatagtttattgtaggtttgattttttaggttttagtgatttttttattttatttttttgagtagttgggattataggtgtatgttattatgtttagttaatttttaaattttttgtggaaatgggagttttgttatgttgtttaggttagttttgaatttttgggtttaagtgatttttttgttttagttttttgagtagttgggattgtaggtgtatgttattgtttttggtttttagtttattatagtttatagttttgggagtggtaggaaggttgggtttgggtagggggagtagtagaagtgtttgtaggggttggtaggggttgtgttgtattggtttgtgggtttgggtgagaggtgaggatggattttaagggtattgtggagttgaggaaaaggttttatttatttgttattatttattgaatattttgtatgtgttagtgttgtattagtattgggaatatagtagtgtatttgttaaagtttttatttttgtggggttaagtaagattaatttgaaataggttaataagtaaggagttggttagagggggaggagttaggtagtgaatttaaattaggtgatagattgggtatttttttagatgtatgtggttgtggggagggtttttgagttgattttagtttggtaaggtgaggtagttatgtgggatgggaggagaaggaatagttttttaggtggagggaattatagtgtaaaggtttgaagggaggatagagtttggtgaggtgtagggataagttttatggaggtttgtgtggtttggtagagtgagggagtagggaggagatgagttttggggttgtggggtaggtagggtttttttattgggagttttgtggattgtttgtgaaggagtttggaattttagtaggaatagtttggttagatttagggtgttagtaggtgatttaggagttggttataggtttttgtttgggggtgtgggtagatttgattgagtggagtagggtgttttataggttttttattttttttttagtagtattattgttttatagttagtaaaggtttgagggttgttttttttttgtggtttttatattgtgttttttagagtttgtggttgttatttttagggaaagaggaggggaggtttattgggttgatttttttgtttatttttttttaatttaattagttggattaatattgaatagtaatgtagggtagtagttatatttgatatagatagtatttgttgattttgtgtttatgttgttgtgggtttgtaggtttgtgttatttttagtgtttttttggaattggaaagattagggtttgtgattggtgtttagtatttaggtttttggttgggtttaggtgtggttgatattatgaaggtaaaataaatgagggttaggttgagagtgtgggtatgtttttttattatagttgggtgattagggaggatttttttgaggaggtgatgtgtgggtagggattggagtgttgtgagggagttatgggaggatttgggtgaagatttattagatttaggaggaattttttttgatttttgttttataagtggtgagaattgaagtttggagagtttttgtagtttgtgttgagttttttaattaggaagtgttggggataggttatgaatttgggtttttagagatttttttattatagtttagtagtttttggtgagtgtgatttttgattttatttatgggtttatttttaaggtttggtgtgggagtaggtgttttggtttttttttttttttttgaggtgtgttttagggtatttttttagaaggagtagaattttttagaataaattattagggtttttagaaggtttttgggatgggttgggatggaaaggagtgttttttagatttgagttttaagtttttggaggatttagggttatttttttttgggtttttttttagttttttagagtttttagtggaaggtttttaattataggtttttgggttgtatggtggggtggttttatggtaggtttttttggatagttagttaagtagtgagaggtttagttgggggagatagtttgggagtaggattaggagggagggagtgagtgtgggaggggtgttgggtgggagtttagtttggtttttttggggtaggatttattgttaatttggtatttatagtagggtttaggtgttttgattgtgttgagtgagggatagtaagttgggttggttaagaggagattgtatgttagaggttttagtaggagtttttttagtttagttgttttgttggagaagtttgtttgtagatgttgtttttaagggtgaggttagaaatttaagttttttttggtttgttattttgtgggttttttttgaatgggttggggtagttgttgttttttggtttttttttttagtttggttttaagttttttatggtttggtgggtttttggtgtatatttatttagttggggttgttgagtgatttggttttgggggtagttgatgtgggtgagaattttgtttttggtattttttttggtggttgtggagttttggggttttattttttttttttaaggtgtattttgtttagttgtaaatgggaatttttttgttgagtggggtggtggggaggatgtatggagttgttgtgttggaaagtataggttttttgaggaggtggtgggatgaatttgggttgatgttatttttggtgattgttagataggattgagggtatttgagagtatagaaggggttttgtagggtagtgggtataggtttgttgttggtttttgggagagagtggtagggtttgttagttgatgggagggttttagataggaatgtgaattatttttattattgtatttttgtttaattagatgttgtatattagttttataaatttgtatagtagtttgggaggtgggtagtgttagtatttttattttgtagataggaaattgaggtttaggaagttatatagaatattggggttatttttgtgagtagtttgttttttagtgttgggtattgttgtagagtttaaggtgtttgtttttatttatttttattatagtttggtagtttgttgttttgattgtttttgttgtataggggaggaaatgggtatagagaggttattggatttgttggaagttagtaataggtatgatggttgaattttgttttgttggtgaagttgttttttgaagatagttttatttttttgttttgtttgttatgattggagttgttattgttgttattatgattttttttttgttttttttttttttagatagagttggtataaagtaggttttagtaatttagaaatgattttattttatgtttgtttgggatgtggggtgtggttgtttttttttatttttaatattatgattttggttttttttaaggggggtttagggggaagagatgaggatgggaggtattttttttttattgttttaggggtttgattgttgaatagttttaggagttagtttttggttgtttttggttatttgtgtgttttatttgtttttaaatattgattgaattatttttatgtgttatgtgtagttttggatgtgattggaggtggtagagaggttgtattggtttgtgagtgtttggtgtggttgaaggagggaatagagatttagttggattgggtgggagaggggtttgggaaggttgttgaggagtttttgtgatgtgagagtttgaggaagtgggttggatggggtgtagttaggtaaaggttgtaaggaaggtgatatttggatgtgttggtggaatagtaggtttatgtagttggagttgggggagtgggtgagggggagagagtagggtggtagggtttagggtttgggttatgatggggatttagggttttatttttaaagagaagggatataggtgggtggggagggatttgtgtgggagagagttggttggatttaggtggtagttagggatggagaaagtagattatattttgttttggagatagggtgttttagagtttagttttttaaattggtgtttgaaggttttggtgggtgggaggaggtgtttgtagggtattgattttttttagttgtgtgtttttatttagatgatatttttaaaaagttagtaggggtatgttggaaattattgggatgatttttttagaattaagtagtgatagtagtaatattagttgttattgtatggttttgataggtttaggatggtttttgatgttagagttttttatgtaattgttatttattttttaagtattggttttgtttttagttgtgtgtgaagttattttattgggtttttaggataatttatggttattagaaaaattatttttttaaattttttattatttttttgagatagggtttggttttgttatttaggttggaatgtagtggtattattatggttgattgtagttttgattttattggtttaagtggtttttttattttagttttttgagtagttgggattataggtatgtattattatatttggttaatttttttaaaataatttttagtagagatgggagtttttttattttgtttaggttgattttgaatttttgggttttagtgatttatattttttagttttttaaagtgttgggattataggtgtgaattattgtatttggtttgtaaaaattattttttgagataatataaatatgtgtttgggtagattggtgttaagattttattttataggttgggtatggtggtttatatttgtaattttagtattttgggaggttgaggagggtggattatgaggttaggagtttagtattagtttggttaagatggtgaaattttgtttgtattaaaaatataaaaattagttaggtgtggtggtgggtgtttataattttagttatttgggaggttgagataggagaattgtttgaatttgggaagtagaggttgtagtgagttaagattgtattattgtattttagtttggtgatagagtgagattttgttttaaaaaaaaaaaaaaaaaaaaaaaaaaaaaaaaaaaaaaagattttattttatagatgtggaagttgaggtttagagaagtgatttgtgtagtttggaagtggtagagttaggatttgagttgattagaggtgtgagtttgggtttgagttttgttttaattttttaggtaagttgtgttggggtgtgggagagatggggtatagtatgggagtttttagttgtattgggatgatttggttttttttgggtttgtgagagttatatttttgttttttgtttttaagtttttgg

SEQ ID NO: 510 - DNA, 6201 bp, Artificial Sequence
  chemically treated genomic DNA (Homo sapiens)
gtttagaggaggaggtagggatgttgggaagtaataattttgattttattttgttggttttatagttttttattgttttaggagtttatttgtattttaatttttgtattttggatttgtggttttagtttagatttatattattaagtgtatttatttagtttttgttattttggatttaggtgtgtaggtgttggtttaggtatttagttatttatagggtgatgttgtttattaggggtgatattttttggttgatgttttttatatatatgattttattgaatttaaagaaggttataatttttttttagtttattttgtttttgaagagtttttttattattgtggtaaagtgtttttgtgtggtgaagggtgttaggtgtagttggttggatattttggtgaagttgtggtggtagtggtgggagaagttgttgttggtttggtggagggttaggtggattataggtggtattgggttgagtgtaggttttgtggtggtgttgggggtagttggggtttgtagtggtgaggttttggtgattgggttttgggatgtggttggatggggtgtgtgtttgggttgggaggagaagatgtttggtgtgggggtggtttttgggggtgtggtgtttatattttttgtattttatttgtagtttttttgtgatagtttataatggatgtattttattattattttttggttattgtattttgtttttttagtgtgtgttattttttttagaggaaaagtaatgggggttaatggtattttttgttttagtttttattttatggtttttagagaaagaagaggagttataatttagttattttattggatgtgttttgtatttttggatgagggggtgtttttaattatgtggaatatttgattttggtgttttttttttggtatgagatgtaggaaatttttattttaattttttttggatttttattttatgaggtatgttattattagtaagtattgttaatattagtttattttttttgtgatgttgaaaggttaaagaaaaaataaattaataagtaaaaaattaggtgtgtttttttgtatatattgagtgaaagtagggtatatatattataagtaatatggttaaaaagaatgtattaagttgtttggaaattaaatttatttgaatgtattttaagtaaaaaattttaaaggtttttattgaaagttatattaaattaattttttgtgtagagaatttatttgtattttttaagtatagtatgattttttgttaagttttttttttgtaaaattaaaataaatgtataaggtaatgattttattaatttttagtattttttagttatagttgatttgaaattttttaatgaattaggagttgtggggagagggagtaaaaattaggaggatttttagattgatttttagatttttgttttatagaaatgttaatttgtaggaattttaattggagattttaagagtttgagaaaaaaaaaaggtagtggtggtggtagatgaattataatttttagtttggtatttgtagaagttttgtgatgtttttttttttttggtaatttatatgtgtgtatatatgtgtgggtataggtatgaatttttatttatgggattgttttatgtttttttaggagagagataggggagaggggatgatgaaggagttggggatggaggtaggaatttttttttgattaaattttgaatagtaaatgtattttttgaaaagttgttggataaatgaaggtaggatgtgtttggtttgttggtgttgagtgttagaagtttgtgttgtgtgtggtgtggtgaggggtggggagaaggaggtggtgggggagggttttattttttttttttttttttaaaaaggatgattgttatgaagtttttttttttggatttttttttttgttgtattttattggtgtattttgtttttgggttgtgtatttttttttttttttttggttttgtgtggtggtgttggttatggttgttttttggagtttttgttgtgtagtttgttttgagtgttgatggttgttggtagggagggtttggagttttggtatttttgttggtagtggtggtggtggtagtgtggtggggttatggagagtggtgggtgggagtgtggtgggtgggtgggtaggtggtgtggaggggtgggtgtgggaggaagggggtgggagtggggttgtggtgtttgtttttttattttattttttgtatagtttgattggttttttgtgtgtaatgttatatggtttatttaaaaaaagaagaaagaaagagtttttttttgagttatttgattgttttttttgttttgttttttggtttgggttaaaggtgttgtggtaggtttgggagtggtgtgttttgttgggggtatatggtgtgtggggttgtggttggggagggtgtgtttgggttggttatttgtttgttttgttgtgtttgtggggtttggttagtgggtggtgtgggtggtataggttttttgtgtggttgtggtgtggtgggtgtgtgtggggttttttgtttaggtttgtggtaggttgtgtgtggatttggtggttgttggggtttgtgatggggtgggggtttttggggaattgtatgtggttgggttgggtggatgatggagtgtggaggggggtggttggtgggagggtgtgttatgaaaataagggttggaaaagtgttgggaattgtttggattttttttggttgtgtgagtgtgtgtggagtgtgtgtgtgtgtgtgtgtgtgtgtgtgtgttttgtttggattttttttagttgtgtatgtgggagtgtgtgtgttgtttggattttttttagttgtgtatgagagtgtgtatatgtgtttatatatatatatgttgtgttattggtgtttggttgttgggggaagatttaggttaatgttgttttttattgtttttagtagtgggattttagtgttgttttgttgtgaagataggtgattttgtatgttttaagtaatgtttagggatgttttgagtgtggtgtttatttttaagtagttttttaggtgtttgtgtattatatatgtatgtgtatttttgtttgtgtttatttgaatatttagtttgtggtttaggttatgtagaatttagtgttttagggaaggggtttattaagggttttatgatagtttaagttaatgttttttttttgtttttaatattttttatattggtttagtgttatatgatgaggatttttatatagtaatttttaggtttattgttttaatgttggggtgggtgggtttttaaaggtttttatttttgttttgtagttaattttagttggttgtatttttttaaatgaggtatatagatatatatatatatatttatatttgtagatgtgtgtatgtgtaagtagatagttttaaattaattagtatgaatagtttttagtaaaaaaggataagaggataaataagttgtatgtgtgtatttttatttttaagagtttttgataaagtattaagaaaagaaaaaggttttttagaagtatagtggtttatttaatagggtttgagtgtaaatatatagggatattggattattggggttaagaaagatgataaatgagtattataatgtgtataaatatgttatgattttttttttttttttgagatagagttttgttttgttgtattttggaggttggtgtgtagtggtgtgattttagtttattgtaatttttgttttttaggtttaagtaattttgttttagttttttgagtagttgggattatatgtgtatgttattatgttttgttaatttttgtatttttagtagagatggggttttgttatattggttaggttggttttgaatttttgattttgttatttgtttgttttagttttttaaagtgttgggattatagatatgagttattgtgttttgtttgatatttttattttgttttatttttattttaaaattaaaatattttttaaaaagttagaaaagtatattaaattatgatttttttaatttttatttagttggttttttttttttttttttaagagatggtttttgttatgttgtttaggttggatttgaatttttgggtttgaaggatttttttattttagttttatgaatagttgggattatatgtattgttattttttttgggtgtttttattttatttttttatttattgtattttattagtttaataagttaattttttttatataggaatgggggtttgggtataaattttttatttaggtaagaggggatgaaaggagatttttttttttgtttttttgatggttgggatagagttttttttatgtgtgtgggaggtgttttggtttggatagatattgggtatagattgatttagaataaatgtttttatataaatttatattaattgtataatagtatggtttagaaattttgaaagtgtattttaaagttttaaaattatttaagaggaattgaaaggttttaagtttttaatatttagtatatgagtgaggaaatgataggataaatttgtaaaagaaattgtatttttgtaaagggggtagttagaaggaaatggattttttatttttagagaaagaaaagttgattgatttttgtttttttttgtttttatagagttttattttatggatttttttagattgattttttatgtggtattttggttataattagttttgagataggtttgtattgtagtttttggttaggggttatattttttttgggaatgttttagatatttttttaaatgaaagagtgaaattatttttgtgtttagattttatgtttattagattttattttaaagtataagggtaagtatttttaggaagtatgtgatattgattatttgtttttgggtaatgttgaggtgggggagggaatattagtttgaggtaggagtaattggatttgaattttagatttatgtttgagattttttaataattttataaatatatgtatagtggattttttattttttaagatgttttttatttgtaagagttaatggatgatttttttggtagttttatttggttggattttataagtagtgtggtattaggaagagaaaaaaaataagatgtagggaatggagattgtattaagagtttgaatggtttgtgttttttttttgtttttattttttaggttattaaataaaaagtttttgattgttagtttttgttatttgttggttgttttatagtgttattttttttatttatttaagaaagtttttttatttattattaatataaatattttttaagtttatgaaatttaaaaggtatattattttaatatgaatatattaatgtttaatataggtatgtattggttaggtgtggttgtttatgtttgtaattttagtattttgggaggttgtggtgggtgtattgtttgaggttaagagtttgagattagtttgtataatatgataaaattttatttttataaaaaatataaaaattagtggggtatggtggtgtgtgtttgtagttttatttattttgaaggttgagataggatgattatttgagtttaggaggtggaggttgtagtgagttgtgattatattattgtattgtagtttgggtgatagattgatattttgttttaaaaaaaaaaagaaaagaaaagaaaaaaaaaattatgtgtgtgtattaaatttttttagttagtaaattttttattgaaaatgtgggtagaatgagattattaattgaggatattgataattaataggttagatggaagagtaaattatggttttaatttgaaatggaaattaatttataaataaaatgagttgattagagagaataaaaataagtagtttatatagtttgtataaaagaaaaatgaggttgagtgtagtggtttatggttgtaattttagtattttgggaggtagaggtgggtagattatttgaggttaggaatttaagattaggttgattaatatggtggaattttgtttttattaaaaatataaaaattagttaggtgtggtggtggggatttgtagttttagttatttaggaggttgaaataggagaattgtttgaatttgggaggtagagattgtagtgagttaagat

SEQ ID NO: 511 - DNA, 6201 bp, Artificial Sequence
  chemically treated genomic DNA (Homo sapiens)
attttggtttattgtaatttttgttttttgggtttaagtaatttttttgttttagttttttgagtagttgggattataggtttttgttattatgtttggttaatttttgtatttttagtagagatggggttttattatattggttagtttggttttgaatttttgattttaggtgatttgtttatttttgttttttaaagtgttgggattatagttgtgagttattgtgtttggttttattttttttttatgtaaattatatggattatttgtttttattttttttagttagtttattttatttatggattaatttttattttaggttggggttatggtttatttttttatttgatttattagttattaatatttttagttaatagttttattttatttatatttttaataaaaagtttattagttgggaagatttgatatatatatatgattttttttttttttttttttttttttttttttgagatagggtattagtttgttatttaggttgtagtgtagtggtgtgattatagtttattatagtttttattttttgggtttaagtgattgttttattttagtttttagagtagatgggattataggtatatattattatgttttgttaatttttgtattttttgtggagatagagttttgttatgttgtgtaggttggttttaaatttttggttttaagtaatatatttattgtagttttttaaagtgttgagattataggtatgagtaattatatttggttgatatatatttatattaaatattagtatgtttatgttagaataatgtattttttgaattttataaatttggagaatatttatattgatgatggatgaaagaatttttttggatggatgaagagagtaatgttgtgaaataattagtaggtggtgaaaattggtaattaaaagttttttgtttggtggtttggggaatgaagatggaaagaaaatataggttatttagatttttgatataatttttattttttgtattttgttttttttttttttttggtgttatgttatttgtagaatttaattaggtaaagttgttaaaagggttatttattggtttttataagtagaaaatattttggaaagtgaaaagtttattgtgtatatgtttgtaaggttgttggaaggttttaggtatagatttaggatttaaatttagttatttttgttttaggttggtgtttttttttttattttagtattgtttaaagatgagtagttaatgttatatattttttgggaatatttgtttttatgttttaaaatggaatttaataaatatggaatttgaatgtaggaatggttttatttttttatttgaaagagtatttagaatatttttagggaaaatataatttttagttaaagattgtaatatagatttgttttaagattgattatagttaagatgttatataaggaattagtttgggaaaatttatagagtgaggttttgtgggagtaaaggaagatgaaaattagttagtttttttttttttggaagtaggggatttgtttttttttggttgttttttttgtagaagtatagttttttttgtaggtttgttttattatttttttatttatatgttgagtattaggagtttgaagttttttaattttttttaggtaattttggggttttaaaatatgtttttaagatttttaaattatattgttgtgtaattggtatgaatttatgtgagaatatttattttaggttaatttatatttagtgtttatttagattaaaatattttttatgtgtataaaagggattttgttttaattattagaagggtaagaaggaggatttttttttatttttttttgtttggataagaaatttgtatttaggtttttatttttatgtgagagaagttggtttgttgggttgatgggatataataaatgaagaaataaaataaaaatatttaagagagatggtagtgtgtatagttttagttatttatgaggttgaggtgggagaattttttgagtttagaagtttgagtttagtttgggtaatatagtaaaagttattttttaaaaaaaaaaaaaaaaggttaattaagtaaaaattaaaaaaattataatttggtgtgtttttttggttttttaaagaatgttttgattttagagtaggaatgagataaaataaagatgttaggtagggtatagtggtttatgtttgtaattttagtattttgggaggttgaggtaggtggataatgaggttaggagtttgagattagtttggttagtatggtgaaattttgtttttattaaaaatataaaaattagtagagtgtagtggtgtgtatgtgtaattttagttatttaggaggttgaggtagaattgtttgagtttgggaggtagaggttgtagtgagttgagattgtattattgtatattagtttttaagatataatagagtaagattttgttttaaaaaaaaaaaaaaagttatagtatatttgtatatattgtagtatttatttgttattttttttgattttaataatttagtgtttttatatatttgtatttgagttttattaagtaagttgttgtgtttttagaagatttttttttttttttggtgttttgttaaagatttttggagataaaaatatatatgtgtaatttgtttgtttttttgtttttttttgttaggggttatttatgttgattaatttaaaattgtttgtttgtgtgtatatatgtttgtgagtgtgaatgtgtatgtgtgtatttatgtattttatttgagaaagtgtggttaattaggattggttatgaggtaaaggtggagatttttaggagtttatttattttagtgttaggatggtgggtttgaaagttattatatggaagtttttattgtgtagtattaaattagtgtaaaaggtgttagggatagagggaaaatattgatttaaattgttgtaaagtttttgataaattttttttttggagtgttgagttttgtatggtttgggttatggattaggtgtttaggtggatatgggtggggatgtgtgtgtgtgtgtagtgtgtggatatttaggaagttatttgaaagtaaatattatgtttggggtgtttttagatattgtttaaaatgtgtagagttatttgtttttatagtagggtagtgttgaggttttattgttgggggtggtggggggtggtattggtttgggtttttttttggtggttgagtgttggtaatataatgtgtgtgtgtgtaggtgtgtgtatatatttttatatatggttagaaagggtttaggtgatatatatatttttatatatatggttagaaaaggtttaggtgagatatatatatatatatatatatatatatatattttatatatatttatatggttagaaagggtttaggtggtttttggtgtttttttagtttttgtttttatggtgtatttttttgttagttgtttttttttgtattttgttgtttgtttggtttggttgtgtgtggttttttgggagtttttattttgttgtggattttagtgattattaagtttgtatgtggtttgttgtaggtttgagtagaaggttttgtgtatatttattgtgttgtggttgtgtgggaggtttgtgttgtttgtgttatttattggttgggttttgtgggtgtagtggagtgggtgggtggttggtttggatgtgttttttttggttgtggttttgtgtgttatgtgtttttggtgggatgtgttatttttgggtttgttgtggtgtttttaatttgggttagggagtggggtggagggggtggttgggtggtttagaggagggtttttttttttttttttttttgaatgaattgtgtgatgttatgtataggaaattggttgggttgtgtagagaatgaagtaagaggataggtattatagttttgtttttgtttttttttttttgtgtttgtttttttgtgttgtttgtttgtttgtttgttgtgtttttgtttgttgttttttgtggttttgttgtgttgttgttgttgttgttgttagtgaaggtgttggggttttgggttttttttgttggtggttgttagtgtttggagtgggttgtgtggtgggagttttgggaggtggttgtagttagtgttgttgtgtaggattaggaggaggagaaagggtgtgtagtttggaggtggggtgtgttggtggggtgtagtggaagagggggtttaggggggagaattttgtagtagttattttttttaggaaaagagggaaaaaataaaatttttttttattatttttttttttttattttttgttgtattatatatagtgtgggtttttagtgtttggtattggtgggttaggtgtgttttgtttttatttatttagtagttttttggaaaatgtatttgttgtttggagtttaattagaagaggatttttgtttttgtttttggtttttttattgtttttttttttttgttttttttttggggaggtgtgaagtggttttgtggatagagatttatgtttgtgtttgtgtgtgtgtgtgtgtgtgtaaattgttgagaaggggaaaatattataggatttttgtgaatattggattgaaaattgtaatttatttgttgttgttgttgtttttttttttttttgagtttttgagatttttggttgggatttttgtggattgatatttttgtgaagtagaagtttgggaattgatttggaaatttttttaatttttattttttttttttgtgatttttgatttattgggaagttttaaattagttataattggagagtgttgaagattgatgggattgttgttttatgtatttgttttggttttataaaaaggaaatttgatagaggattatgttgtatttaaaaaatataagtaagttttttgtataggaaattggtttaatgtaatttttaatggaaatttttgagattttttatttaaagtgtatttgagtaaatttaatttttaggtagtttaatatattttttttagttgtgttatttgtagtgtgtatgttttgtttttatttagtgtgtatagggaaatgtatttgattttttatttattagtttgttttttttttaattttttagtattatagaggaagtagattgatattaataatatttattaataataatgtgttttatgaaataaagatttgaaaggaattggaataaaaattttttgtattttatgttaagggggaaatattagaattaagtgttttgtgtgattgaagatatttttttgtttaagaatgtaaagtatatttaataaaatagttggattataattttttttttttttttgggggttgtggggtgggagttggggtgagaggtgttgttggtttttgttgttttttttttgggaaggatggtgtatgttgggagaatagggtatgataattgggagatagtgatgaagtatatttattataagttgttgtagaggggttatgagtgggatgtgggagatgtgggtgttgtgtttttgggggttgtttttgtattgggtattttttttttttagtttgggtatatgttttatttagttgtattttgggatttggttgttaggattttgttgttgtagattttggttgtttttggtgttgttgtggggtttgtgtttagtttggtgttatttgtggtttatttgattttttgttaggttggtgatgattttttttgttgttattgttgtgattttgttgagatgtttagttagttgtatttgatgttttttattgtgtggggatgttttgttatggtggtggaggagttttttagggatggggtgaattgggggaggattgtggttttttttgagtttggtggggttatgtgtgtggagagtgttaattgggagatgttgtttttggtggataatattgttttgtggatgattgagtatttgaattggtatttgtatatttggatttaggataatggaggttgggtaggtgtatttggtgatgtgagtttgggttgaggttataggtttgagatgtgggggttggagtgtgggtgggtttttggggtaatgggaggttgtggagttggtgaaataaaattagagttgttgttttttggtgtttttatttttttttttggat

SEQ ID NO: 512 - DNA, 6213 bp, Artificial Sequence
  chemically treated genomic DNA (Homo sapiens)
ttgggatttattatttagttatatttattatgttatgaaatatattttaaaaaaaataattaaatttattttttttattttaattgaggttttatattttgattattatttttttattttttttattttttagttttagtaattattattttattttttattgttaagaatgtaattgttttatattttatagataagtgagaatatgtgatatttgtttttttgtgtttggtttattttatttagtataatgttttttaattttaaaattttaatttttttaagtataaaataagaaggttagtttaattaattttaaaatttttttttgtggtaggttgaataatgtttttttatttttaatgtttatgttttaatttttaaaaatttttaatatattaatttatgtggtaaaagaggttttgtagatgtgatttaattaatggttttgagggagattatttagaatttttagggtgggtttaatataattttaagtgtttttattagagggttatagttagagagaagatataagaatggaagtataggttatagagaaaatatagagattatgagttaaggaatttgatggttattagaagttggaaaagataaggaaatagattgttttttagagtttttaaaaggaatgaaattttgtggatttatttttgatttttgatttttagaattgtaaaataataattttgtgtttgttttagttaatatatttgtgataatttgtaatagtagtagtaggaaattaaaatattttttaggtttatgatttgagagtttattaaataagagatggttatttttttggtttttaaattattttggaaataaagttatttttagagaggaattttaaaatattgtttgtagttatagtaattttaaaatttgagtgttgtatggtggaagtagataatttattttaggataattgttatttgttatattagtttgaggatggtggtgttaaagaggagttatttatttttaggtatattttatattaaatataaattgtataatttgtttaaattaaggaattatattaaattatattatggttattaaattttgttttgagaaagtgaaattgatttagtttttaaagagataaagagaaagtataagtaaattaaattgtagttataaaaagaaagataaaatgttgtagtatatttattgttttgtgtatttaatgaagttttttgttttggttataaaattagttttaaaggttttttttatattttatagtatgaaaaatttaaaaagtaatttatatgtaaatatttaaattatgatagaaatttaaagtaaaaagaaaatgaattaattgaattaaaatgtgtaggatgtttaaatttatttgataatatatttatttgataatatattaatatgaatttagtattttaaaatgttatataaataaatgtttttatattaaatattaatgtagttaggattttaagttaatattatttttttttttttatatgttttttttttgtttttattaaaaattgttaaaattatttattttttttttttttttttgtttttaaataaataaggttttttttaagatattgtaggattataaagttaaatttttgggtttaagttgttggtaaaattttagagatgttaagttatttatgtattaattatttttaaatttttttttaatttttttataaaataggagtagggagaggagaaatatttttgtttaaaaatgaggaattgaaaatttttattataaataaattatattaagtaagttaaagatagtaaaagagtaaaaatgttagtagatatttttaaaatggtaattatatattatttttggaatgattatatgaatgtggtttattattttttaagtttttatagtaaatatatatttatttgttttatttagttaaaaataaatataatatgtagttgtttttgaataattttttttttttttttttttttttttttttttttgataaagttttattttgttatttaggttggagtgaagtggttttattttgttgtttattataattttagttttttgggtttaagtgatttttttgttttaattttttgagtagttgggattataggtgtttgttattatttttggttattttttgtatttttagtagaggtgaggttttatttgttggttaggttggttttgaatttttgattttaggtgattttttttgttttgattttttaaagtgaagggattataaggtgtgaggtattgtgtttggttgtttttgaataattttgattaaaatttatatttgatatttattttaatatatattatagatttttattgataattttttttagtaagaaagataagttttatttaggtatttgtgaattggaggttaagtagttttagtatattttatatttttttaagattttttttttattttaaatgtttgtaaattttgtatttgataaagagtatatttttatttaatataaatatgtttttttttttagatttttttagtatttgagagatttgtatgtgtgtggttttttattttttttttttggttttttaagtttttagggtgttgttaggaggaggtttgtgattataaattttttttgaaaattttttaggaagttttttttttttttggagaattgaagtgttatttgattttaatttttttgtaaattttgttttttagagttgtttgttattttttgtttttgttgtagattttttatttatttggattggtttttgattgtaattatttggtgtgttgggtagtgtttttgtttttagtagtgtttgtattttttttatttgattttgggttgtggttgtggttagttagttagttgaaggttttatgttgttttttgttgttggttttatgttgttttttgttgtttgttgtttgttttttttttttttgtagttgttgagtgtatgtggtttgttttattttttggtgattagttagttttttttttttttttttttggtgttggtggaagagttttttttgattttgttttttaaattttttggagggattgtggtatttttttaggtaaggggatgttgtgagtgagtgtttggaggaggtgttattaattttgagtatttagtgaatgtggtatttttgaagttgttttaggttgggttttttttgggggtattagttggaagtagtttttgttagagttagtgttggtaaggaaggaggattgggtttttttttatttgttttttatattgttttttggtttttttgtttttagttgtgtttttttgtttgttagtaaaggtgtgtttgagtgtgtttattttgttaaaaagaaatttgtttttgttttgttttttttttttgtgatataatttttttaattgttaaattgaattggggtgtttggtgttatagggaaagtatggtttttttttttaattataagaaaaagtaaaattatttttttttagttgtgagagttttattgagaattgaaattatttgtatgattagaaagtgtttttttatttttttaatttttgatttttaggagtgtggggtttattaagttagaaattttagtttaaaggattttttttggagagttggattgtttttttttttttttttttttttttttttgtgtgtaaaatggttgtttggggtaagggttttttagatgtgtatattgtttggtataagagtagattttgaaaagatgaggtttatttaatatggatgggggagaattttgtttgtaggtagataggaaaatggggagggagttattggaaggatggattttatttttaaagttataatttttagattagaaaaagtgtttagtgttttagaagtagagttgtatagtgatttaaagattagttttaaatattgttttgttttttttatattttttatattttttttttttattgaaaatattttgtattttttgtaattataaagggggaagggaatatgagtgttttttgttttataggggttgttgtgagtttaaatgatgtattaatatatataagttttaagaatagtgttatatattttaagttaatatttgttagtttttgaattatttgttttgaggattggtttgtaattttgttttgaggtatagaaagaaaatgttttggagtaggatgtggtggtttatatttgtaattttagtattttgggaagttgaggtgggtagattatttgaggttaggagtttgaggttagtttggttaaaatggtgatattttgtttttattaaaaatataaaaattagttggttatggtggtgtatgtgtgtaattttagttatttaggaggttgaggtaggagaattgtttgaatttgggaggtagaggttgtagtaagttgagattgtgttattattttttagtttgggtgatagaatgagattttgatttaaaaaaaaaaaaaaaaatgttttggatagaattattattattatataaaaggaaagtttggatgtggtggtttatgtttataattttagtattttgggaggttgagataggtggattatttgaggttaggagtttgagataagtttgattaatatggtgaaattttgtttttattaaaaaatataaaattagtggggtttggtggtgtatgtttgtaattttagttatttggaggttgatgtaggagaattgtttgaatttaggagaaggtggaggttgtagtgagttgagattgtgttattgtattttagtttgggagataagagtgaaatttggttttaagaaaaaaagaaagaaagaaagaaagaaagattaagaagaatttattttttgaaaagattatgggtattttttattatttttatttataaagaaaagttaaatagtattaaagagtataataagtgtaaggaggtaaaagttttaattttttttgtgattattattttttaagtttattaaaaatatgtattatgttttaaaaaatggattgtttagattttgttgatgttttaagtatatgtttaatttgtttattggataatttagttttgtttaaaagttatattttaatttttggttgatttaaattttgtagatttagtatattttgtatttttagtgtttgtttgattttaaaatatgtagtttttaaaatgaagttaatgaaaataatttgggatgttaagtatgttattaaaatttataatgtattattgtattatttatattttttttggggtattttttaattagttgtgtagtaatgatagggaaaatttaaattattgataaataaaattattttagtttagtttaagatattttatgatggaggaggaagaaagtggttgttaggatgggagggagggaatatatttttattattaatataatggttttttttttttgtttgtttgttttgtgtgtttttttgagatggagttttgttttgttgtttaggttggagtgaaatggtattgtatgattttttttggtttattgtaatttttgttttttgggtttgagtaatttttttgttttagttttttgagtagttgggattataggtatatgttgttatatttagttaatttttgtattattagtagagatggggttttattatgttggttaggtttgttttgaatttttgattttaggtgatttatttattttagttttttaaagtgttgggattataggtatgagttattgtgtttggtttatagtggtttttaatgggggtgggagagtgggaagagtaggtttttttaagagtttgttgaaataaatattttttttttaaaaaagaaagtaggtaatgattttttttaaaaaagatgtgtttatttgtatatgtatttttagataaaatttttagtgaatttagggatttttttgaaattttattatggatttttatattaagaatttttttagtttttgtgaaaaatatatatagttattggtgaagaagatgggagatgtaattatataaaaataatatttggatgtattataaataggtgtaaaagttgattgttttggaaatattaagaataagttttagatatgtatattttatattttgtagtagagttttggaaggattatggtatttttgggtggggttattttgttttagaaattgaagtttattattt

SEQ ID NO: 513 - DNA, 6213 bp, Artificial Sequence
  chemically treated genomic DNA (Homo sapiens)
ggataatggattttaatttttagagtaaaatggttttatttaaggatgttataatttttttagagttttattgtaagatatgagatatatatatttaaaatttgtttttggtatttttaaagtagttaatttttatatttgtttataatgtatttaaatgttgtttttatatggttgtattttttattttttttattaatagttatatatattttttataagagttgaaagagtttttgatgtaggaatttatggtagagttttagagaaatttttgaatttattgaaagttttatttagaaatatatgtgtaagtgaatatattttttttaaaaaaaattattatttatttttttttttgagaagaaggtatttattttaatagatttttgaaggagtttattttttttatttttttatttttattaagaattattgtaggttgggtatgatggtttatgtttgtaattttagtattttgggaggttaaggtgggtggattatttgaggttaggagtttgagataagtttagttaatatagtgaaattttgtttttattaataatataaaaattagttgggtatggtagtatgtgtttgtaattttagttatttgggaggttgaggtaggagaattgtttgaatttgggaggtggaggttgtagtgaattgagagagattgtgtggtgttattttattttagtttgggtaatagagtgaaattttattttaaaaaaatatataaaataaataaataaaaagaaagaattattgtattagtgatggaaatgtgtttttttttttttattttggtaattatttttttttttttttattataaaatattttaaattaaattaaaataattttatttattgatagtttgaattttttttattattgttatatagttaattgagaggtattttgaggaaaatataaatggtatagtaatgtattgtagattttaataatatatttgatattttaaattgtttttattggttttattttaaaaattatatgttttaaaattaagtagatattaaaagtataagatatattgggtttataaggtttaagttaattagggattgaaatataatttttaaatagagttggattatttagtaggtagattaagtatgtgtttaaggtattagtaaagtttgagtaatttattttttaaaatgtagtatatgtttttgataagtttaaaaagtagtagttataggaaaaattagaatttttatttttttgtgtttgttatattttttagtgttgtttaatttttttttgtaagtgagggtggtggagggtgtttataatttttttagggagtaagttttttttggttttttttttttttttttttttttttttttttgagattaagttttgtttttgttttttaggttggagtgtaatggtgtgattttggtttattgtaatttttgtttttttttgggtttaagtgatttttttatattagtttttgagtagttgggattataggtatgtgttattaagttttgttaattttgtattttttagtagagatagggttttgttatgttggttaggtttgttttgaatttttggttttaggtgatttgtttgttttggttttttagaatgttgggattatagatgtgagttattgtatttggattttttttttatgtaatagtgataattttatttaaagtatttttttttttttttttgagttggagttttattttgttatttaggttggagggtggtggtgtgattttggtttattgtaatttttgttttttgggtttaagtgatttttttgttttagttttttgagtagttggaattatatatgtgtgttattatggttagttaatttttgtatttttagtagagatggggtgttattattttggttaagttggttttgaatttttgattttaggtgatttgtttgttttggttttttaaagtgttgggattataggtgtgagttattgtgttttgttttaaagtattttttttttatgttttaaaataagattgtaagttagtttttaaagtggataatttaagagttaataggtattagtttaggatgtgtggtattgtttttaaggtttatatgtattaatatattatttaaatttataataatttttataaagtagggggtatttatatttttttttttttttataattatgaaaaatgtaaggtatttttagtaggaaagagaaatgtgagaagtgtgaaggagataggatagtatttgaagttggtttttggattattgtgtaattttgtttttagaatattgagtattttttttggtttaggaattatgattttgagaatggagtttgtttttttaatgattttttttttatttttttatttgtttataggtagaatttttttttgtttgtattaaataaattttatttttttagagtttgtttttatattaggtaatgtatatgtttgagaaatttttgttttagatagttgttttatatgtaggaggggaaggggaggggaaggagagagtagtttgattttttaaaaggaattttttgaattagggtttttgatttagtgaattttgtgtttttgaaaattaagggttgagggggtagggggatattttttagttgtataggtgattttgatttttggtggggtttttataattaggaaagaatagttttgtttttttttatgattaaaagaagaagttatattttttttatgatattaaatattttgatttaatttggtagttaggaaggttgtattgtggaggaaggaaatggggtgggggtggatttttttttaatagagtgaatgtatttaaatatgtttttgttggtaggtgggggagtgtggttgggagtagggaggttggagggtggtgtggggggtaggtggggaggagtttagttttttttttttgttaatgttggttttggtgagggttgtttttggttggtgtttttgggggagatttaatttggggtgattttaggggtgttatatttgttaagtgtttggagttaatagtattttttttgagtatttgtttatggtgtttttttgtttggaaagatattgtggtttttttagaggatttgagggatagggttggagggggtttttttgttagtattggaggaagaaagaggaggggttggttggttattagagggtggggtggattgtgtgtgtttggtggttgtggagagggggagagtaggtagtgggtggtggggagtagtatggagttggtggtggggagtagtatggagtttttggttgattggttggttatggttgtggtttggggttgggtagaggaggtgtgggtgttgttggaggtgggggtgttgtttaatgtattgaatagttatggttggaggttgatttaggtgggtagagggtttgtagtgggagtaggggatggtgggtgattttggaggatgaagtttgtaggggaattggaattaggtagtgttttgattttttggaaaaaggggaggttttttggggagtttttagaaggggtttgtaattatagatttttttttggtgatgttttgggggtttgggaagttaaggaagaggaatgaggagttatgtgtgtatagattttttgaatgttgagaagatttgaaggggggaatatatttgtattagatggaagtatgttttttattagatataaaatttatgaatgtttgggataaaaagggagttttaaagaaatgtaagatgtgttgggattatttagtttttaatttatagatatttggatggagtttattttttttattaggagggattattagtggaaatttgtggtgtatgttggaataaatattgaatataaattttgattgaaattatttagaagtggttgggtgtggtgttttatgttttgtaatttttttattttgggagattaaggtggggggaattatttgaggttgggagtttgagattagtttggttaataggtgaaattttgtttttattaaaaatataaaaagtagttgggggtggtggtaggtgtttgtaattttagttatttgggaggttgaggtaggagaattgtttgaatttgggaggttgaggttgtagtgaatagtgagatggagttattttattttagtttgggtgatagagtgagattttgttgaaagaaagaaagagagaaagagagagagaaaaattatttagaagtaattatatattgtgtttatttttaattgagtagggtaaataaatatatgtttgttgtaggaatttaggaaataatgagttatatttatgtgattattttagaggtaatatgtagttattattttgggaatatttgttaatatttttgtttttttattatttttagtttatttgatatagtttatttgtgataagagtttttaattttttatttttgaatagaggtgttttttttttttttatttttgttttgtgagggagttaggggaggatttaaaagtaattaatatatgggtaatttagtatttttaaaattttgttaatagtttgaatttgggagtttggttttgtagttttataatattttagaagagattttatttgtttaaaaataaaaaggaaaaagaaaagtggatagttttgataatttttaatggagatgggagaagaatatgtagaaaaggggaaatgatgttggtttagaattttaattatattggtgtttaatataggaatatttatttatataatattttaaagtattaaatttatattagtatattattaaatggatatattattaaatgggtttaagtattttatatattttaatttaattgatttattttttttttgttttggatttttattatgatttaaatatttatatatgggttattttttagattttttatattatgaaatataagaaaaatttttaaggttagttttatgattaagatgaaggattttattgaatatataaaataataaatatattgtaatattttgtttttttttttgtagttgtaatttggtttgtttatattttttttttgtttttttgaaaattgagttagttttatttttttaggataggatttaataattataatataatttagtataattttttgatttaggtaaattatgtaatttgtgtttagtatgaaatgtatttaaaaataagtaatttttttttaatattattatttttaaattaatataataaataatagttattttaaaataaattgtttatttttattatgtagtatttaaattttaaggttgttatgattgtagatagtattttaaaatttttttttggaaatggttttgtttttaagatgatttaggaattaaagaggtgattattttttgtttaatgaatttttaaattataaatttgggaagtgttttagttttttattgttgttgttataaattattataaatgtgttagttaaaataaatataaaattattattttatagttttagagattagaagttaaaaatgggtttataaggttttattttttttggaaattttaaggggtaatttgtttttttgttttttttagtttttagtgattattaaattttttggtttatggtttttgtattttttttgtggtttgtgtttttatttttgtattttttttttgattgtgattttttaataaaaatatttggggttatgttgggtttattttgaaaattttggataattttttttaagattattaattaaattatatttgtaaagttttttttgttatataagttaatgtattaaaagtttttgaggattaggatatagatattgggggtgggggggtattatttagtttattataggaaggaattttagggttaattaaattagtttttttattttatatttgaagaaattgaagttttggaattggagagtattatgttaaatgaaataagttaaatatagaaagataaatattatatgtttttatttatttgtgaaatataaaataattatatttttagtagtaaagagtagaatggtggttattagagttggggggtgggaggaatggggagatggtaattaagatataaagttttagttaagatgggaggaataagtttgattgttttttttgagatgtgttttatagtatgatgaatatagttaaatagtaaattttaa

SEQ ID NO: 514 - DNA, 6193 bp, Artificial Sequence
  chemically treated genomic DNA (Homo sapiens)
taaataaaaataatatatttagtggtggaagggaaaatatatattaatatatgtaaatttaataaatattaagatgtaaagagagaatttatagtaatagaaagggtgaatgtataagatagatgataaatagtatttttatttaaaaattaaagggatgaaagtttatgaatattatatatttgaatttattttgaggaggaaatatgattttttattaaataaatgtaaattttaaaaattagttaatgtaaatttattgtgtttaggttagaataaaaaatgtataaattttttataaagtttatgttttgataaatattttaatgtaattttttaattaagatatatttttagtgattaaatgaaaatatatatataaagtagtaagtgttttgatttttaataaaattttattttttatgtatatatgattaaaataaataaaagtagttgagtttaagagtaaaaaaaaggaatattgatataattggagttattttattataatagaatagttatagtatttttaagtgatttgtagttatattaatagatatttatttagatatattgtgaagaaaaaaataatatttttttttaaaaagtttttttttatatatatatatatgagaattttaaattaaaaagaaaatattgtattgatagatgtgtttatagtaaatatttgtaagaaagagaattgatgtttttttgaaaatatatttaatattttttttattatttaatttttattaatatttttttttttaaatgaaaaataattttatgattttggagatataatgatgtattttaaatatgtatgaaagttatatgtatttttatagaatgaaaagtaagattgagttatttgtaaaaaagaaatgggaattgaatttgtttattgtttatttattaaggtatataagagtattattttaatgttattatatattttttttaatattaaggtaatattgataattttttattatataaggaagatgaattttagaattatttttttggttagtaaaggttttataattgttatataaagggattttggttatatttagatatatttaaataaaatgtataattgaaaatgagataaagttttttagaatttttaaaaaatattttttttaatgttgaatttttttttaagtaaaagaaaaaagaggtttttttttgttataattaagaaatattttaaagatttatataatagtattttttgttttatatttttattttgtttatatagagtagtaaataaggtgtattttttttgtttaagaaattagtattttaaaaatatgttatttttttttgaattttaagtgtgtttaataatgtgagaagtagattgtttttttttgtttttttaatttgttttatttaaaagtaatttatttaatattttgttgttttttggtagtttagtttatttatttgtatttaattttttatttggattaaaataaatttttttaaattgttattgattgttaattgtgagaggggagatgtgtaatatgtatttagttgggaatatatagttatatatatatataggtataaatatatatagttttatttatattttagatagtaatttgtttttataatagtattgtattaaaattagttgaattttttttgttaggtgtggtagggtgggggtgggggaggatgaaaaatgaagttttttggggtatttatagtttttaatggattattttagtatgtgtgttgtaattatattagggatgtatttgagagtttttttttgtgtggtttttttatttggattattttgtgttttgaataagtgaggtttgtttttgtgtttttagaattttaagtatagagttatatatggaataataatggtatgttaatttttgtgttttaaatgggtttatttgtgggtttgataatttgtttagggaaatgagaagagatgaagtgagggtgtgagttagtgttgtttgagatgaggaagaggatagttgtagaattaatttggattatattttttgtagaaattttgaaaagggttttttggtatagtttaatttggagttgtatagttaatattaaattgttgtggatttggagtggggttttttagtggtagaggttgaattagatagtttttagtaggttgttttgtagaaattttttttggttaagtttgtatgttggttgttaatgtttttgaatgggttaatgtgtataattaatttattgagggaaaatatgaagggatttgaagtggggagggagataaaaagagatgtatttaagaggttgtttggaatgttaagtttgtgttggtgtgattttggaggtggttggagtgtgggatttggtatgtgtgaagaattttggagtaattgggagggtgtaaatggttagtataaatgttttatatgtgttatttgaaggttattttgaaagatttgataattgtaatttgttatttattaggtaaaggaggtggtggtggtggtggtggtggagtgggaaaattatagttagttgtttttttggtgaggttagaaggatattttttgggggtttaaagtgttttttattgttatttttgggggttttattattttaagttattttttatgttttagttattatttttggatggttttggaaatttttttggttttttaaaaggtattttttggttatgttaagatattggttttttttagattttttttgttttatttttatttttaggaaattttagtgttagaaattttgagttttattgtattgtaggtgttgttattagttttgtaagttgtggtgggttagttttgttgtgttgttttttggggttaattagttttttgtttgtttaggtatttggggtttgagttttttagtaagtagtggttgtgtatttattgttgttgttgtttttgttttgggtggatttagtgatttgtaggtttggtagtttggttgggtagtaaatagataagtttgaaggattttggttaatagtaagttgaattataggaagaattttttttggagttaaatatggtaattgatgggaaggttgggtttttggtttaagtgtgttaagtttttttttttttttttaagaggttaggtaggtgagtaagtgttttttaagttaatggggagagggttttgggaagttggtggaagaggtttagaattttgggttttggattgaggtgtgtttgtttgttgtattttggttgtttgggttgggtgtgagttgtgtttgatgttataaggtttgggtgattgggggtgtagtggttgttagtagtatatataggtgtaaagtttgattttttgagtgttgttttttattgttttttgggtttggtttgggagaggtttagttagtattgttttaggattgtggttttggtggtgtgggttttgtttttggggatttgatagggatagaagagttttttttgattggggatttgggttttttatgttttgaataataggtgttattagaagggattttgtttaggtttttaaataaaatgtttgggaaagaaaagtagggggttaaggagagaaaagagggatttagagtgattttttatgataaataaagtaaatgtatatatatagggtaagttttaaatggaaagaggggtgattgaaagtttagggaagaggttttggttaagtggtttttttatgttttttgggatgggtgaagagggtaggggagttatttgaggtagttttgttggtggttgtaggtttggtgattggagtgttagaaggaatttatttgattgagaattgttgggttggatggtttttgttgttatgagaaggtttatttagatttaaagttttgttgttggttttattttttggaagttttagattttgtgttgataattatatgtttaaatggtatattttttttttgggtatgtggaggagattttttagttgggtgtgtgtgggggtgtgaggggggtgggtgtggtgtgtgtggtgtggtgatttttagggtgggtgattgagtttgtgtttgtgggtttagggttggggtttgaggagggggtgagtgtgagtgtgtgtgtgtgtgtgtgggagtgtgtttggtgtgtgtgtttggtgttttgggttggattgtgtagttatttttttgtgtgagtttttgtttgtttgttttttttttatttttttttttttttattggttggttaataataaaaaaggaaggggggtgaaaggtttttaaaaaaagttgattgtaaagaggtggtaggtttttggtttttttttgtagttgggttatgttttgttttttttttagtttttttgtatttttagtttaaattgggaggggagtggggtggggggagttttttgtttttttttggattttgtttttttttttttttttagttttttttatatttgtttggtggttgtggtaattaaagttttgagtgttatttttagtgttttgtggtttttagttgtagtttatagagaaattaataagattttagaaaaaaaaaaaaaaaaggtgtggggggtggtgggaataaaataattttttatgtaattaggttggttttgtttagttgtgtaaattttgtttatgttttgatttaattagttatgttttttttttttttttttaaagggaaattttattggtttagttattttttaaaattttgggtttttggagttgggaaaatatttgttagggaaagggagttttttggtgggggtaggggaagttggatttaaagggtttattgaagttatgtattgaagtatttgttttttttttttggtagaggtttgggatagttggtttgttgagtggatggattattggagggttgtttatggaaattttttttttttttaaataagaaagttagtattttttttgttgttttatggtgtttatttatagataagattttttttagaaataaaagttaatgttgtttttagtaaaaagtttttgtttgtagtattttgttatttatggtttataattagaaagtattttaaaagtgtgtatagtaagtaattggtagtttttgaggattaggtagtggtaggggtataattattgttttgttttttgtttttagttatgttatttttttgattatttttatatttttaaattgattaatattgagttaaattaaatttttatatttataaaggtatattttttgatttttagattttatgttttttttttatttttggagtttatttttattaagtagattttagtttaaagttattgatttgattttaaagggttagaaattgtttttagtttgaaagaatttaaggaggttatattagaatataattaattttaaatgattttgtttattttatagtagatttagttttaggttttttttttgtttttattttgtatatttatggtttttaatttggaggttattgttagttatgaaagtttttgattttttttgaatttaaaatattttgggattgggttattttaatgtatatattttttgttttttatagttttgaaattgtattttggtaagggttagaatttgttgggggtagttattggtttgttatttgtataggtattttatgtatgaattattttttttttttggtttttttagaagtagtaaatatataaataaaaagtattaggggagtttaaaaattaaattattttgttttttatttgagattttgatttttattttttatttttttatttatagttttattttttaagaatttttatggagttgagaatagataggaggtatagatgtttgaagtttgaagtttttttttttttagatttatagtaaataataggttttatgaagatgtttaataagttgagtgtgtggttttattagaagtagtttagggtagagaggaattaagtttagagtagatgatggagatttgattagaatggtattgattgtagtaaaattgtgtatattgttttttgggattatttttgtttttttttttttttttttttttaattattttttttttttgttttttttttttttatttaatttttttttattttttttgttttaaatttttttgaaatttttaggtattttttttttataaaagttattttttttta

SEQ ID NO: 515 - DNA, 6193 bp, Artificial Sequence
  chemically treated genomic DNA (Homo sapiens)
tgaaaagaagtagtttttatggaagagaggtgtttgagaattttaaaaggatttaagataaggggaatgagaagagattgaatgaaagaagagaaaatagagagaaagagtaattaaaaaaaagaaaagaaaagaaaataaagataattttaaagagtagtgtgtatagttttgttgtaattagtattattttggttaagtttttgttatttgttttaggtttagtttttttttgttttaggttgtttttggtaaaattgtatgtttagtttgttgggtgtttttatggagtttgttatttgttgtgggtttaagaaagggaaagttttaggttttaggtatttgtattttttatttgtttttagttttatggaaatttttaagggatggggttatagataagagagtgggaaatggagattaaggttttaaatgaaaggtagggtggtttgatttttaagtttttttgatattttttatttatatatttgttgtttttagaaaaattaaaaaaggaaagtgatttatatatagaatgtttgtataaatagtaaattaataattatttttagtagattttggtttttgttagggtgtggttttagagttgtaaaaggtaagggatatgtatattgaaatgatttagttttagaatattttagatttagaaaaggttagagatttttgtaattagtaatgatttttagattagggattatgaatgtgtagagtgaggataaggaaggggtttaaagttgggtttattgtagaataaatagaattatttaaggttaattatgttttgatgtggtttttttaaatttttttaggttggggataatttttagttttttaagattaaattagtggttttggattagaatttgtttaataagaatgaattttaaaggtgaaaaaaaaatataaaatttaaaaattaaaggatatgtttttataaatgtgaaagtttagtttggtttaatgttggttagtttagaaatgtgggagtaattggagagatggtataattgggggtgggaggtggggtggtgattatatttttattattatttaatttttaggggttattagttatttgttgtatatatttttaaagtattttttaattgtggattatgagtggtagagtattgtgggtggaggttttttgttgaaagtaatattgatttttatttttagggaaagttttgtttgtagatgagtattgtggggtaatggagaaaatgttgatttttttgtttaaaaaaaaaaaaaatttttgtaagtggttttttaatggtttgtttatttagtaggttagttgttttaggtttttgttagggagggaagatgagtgttttagtgtatggttttggtgagttttttaaatttagttttttttgtttttattaagaggttttttttttttgataggtgtttttttaattttggaggtttaggattttggggagtggttgagttaataagatttttttttggaagggggggggaagggtgtggttagttgggttagagtatgggtggggtttgtgtggttgagtagagttggtttggttgtgtggagggttgttttatttttattgttttttgtattttttttttttttttttttggagttttattaatttttttgtgggttgtagttggagattgtggagtgttggaaatgatgtttggagttttaattattgtagttgttggataagtgtgaggaaagttgagaggaaaaagaaggatgggatttggggagaagtgagaagttttttttgttttgttttttttttgatttggattggaggtgtaaggaaattgaagaaggagtagaatatagtttggttgtggggagaggttggaaatttattgtttttttgtaattaattttttttggaaattttttgttttttttttttttttattgttgattaattagtgagagagagagaaagtgaggagggagtgagtaagtgaaggtttatgtggggaaatagttgtatagtttggtttagagtgttaagtgtatatattgagtatatttttatatgtgtatatatgtgtttatatttgttttttttttgggttttggttttggatttgtgggtgtggatttggttgtttgttttgggagttgttatattgtgtgtgttgtgtttgttttttttgtatttttatgtgtgtttggttgggggattttttttgtgtgtttgaaagggggatatgttatttggatatgtaattgttagtatgggatttgagatttttaaaaaatgaagttggtgataggattttgggtttgggtgagtttttttgtggtggtggggattgtttagtttagtgatttttagttaggtgggttttttttggtattttggttgttgaatttgtagttgttggtggggttgttttgagtggtttttttgttttttttatttattttgggaggtgtggagggattgtttgattggggttttttttttgggtttttggttatttttttttttatttgaaatttattttgtatgtgtgtgtttgttttatttattgtgaaaaattattttgagttttttttttttttttttaattttttgttttttttttttgagtgttttgtttgggagtttaagtgggattttttttggtggtgtttgttgtttgggatatgggagatttaaatttttagttagaggagatttttttgtttttgttgggtttttgagggtagaatttgtattgttggggttgtggttttggggtggtgttggttgggttttttttgagttgagtttgaagggtggtggagagtggtgtttagaaaattgggttttgtatttgtgtgtgttgttggtgattgttgtgtttttagttgtttgagttttgtggtgttagatgtaatttgtgtttagtttgggtagttggagtgtagtaggtgggtgtgttttggtttggggtttggagttttgggttttttttgttggttttttggagttttttttttattgatttgaggggtgtttatttgtttgtttgattttttaaaaaaaaaaaaaaaggtttggtatatttgagttagaagtttggtttttttgttggttgttgtgtttggttttgggaagagttttttttgtagtttaatttgttattggttggagttttttaaatttgtttgtttattgtttggttaggttgttgagtttgtgggttattggatttatttgaggtgaaagtggtagtggtgatgggtgtgtggttattgtttgttggagagtttgagttttaggtatttgggtaggtaaagggttaattgattttgagaggtagtgtggtggggttggtttgttatggtttgtaggattaatgatagtatttgtagtgtaatggagtttaaagtttttgatattagagttttttggggatgaaagtgggatgggagaggtttgaggaggattggtgttttgatgtggttaaggggtgttttttggagagttagagagatttttgaaattatttagggatggtgattggagtgtgggaagtagtttgaggtgataaagtttttgggagtggtgatagggagtgttttaggtttttggagggtgtttttttgattttattaagaaaatggttagttgtagtttttttgttttgttgttgttgttgttgttgttttttttgtttagtaaataataagttataattattgagttttttaaaatgatttttgaatggtatatgtgaggtgtttgtgttggttgtttgtatttttttaattattttgaaattttttatgtatattaggttttgtgttttagttatttttggaattatattaatatggatttgatattttaagtggttttttagatatatttttttttatttttttttttattttgagtttttttatatttttttttaatgggttgattatgtatattgatttatttaaaggtattggtgattgatatgtaggtttagttgagaggaatttttatgaggtgatttattgggggttgtttggtttagtttttgttattgggggattttgttttgagtttgtagtaatttggtattaattgtgtggttttgagttgagttatgttgaaaagttttttttagaatttttgtaaggaatgtaatttaaattagttttgtagttgtttttttttttgttttaggtgatattagtttgtgtttttgttttgtttttttttgtttttttgggtgaattgttagatttataagtgagtttatttagagtgtgaggattagtgtgttattgttgttttgtgtgtgattttgtatttgaaattttgggggtataaaggtgagttttatttgtttaaaatataaagtgatttagatgaaagggttgtataaagaaaagtttttgggtgtatttttggtataattgtaatatgtatattaaggtgatttattggaaattgtaaatgttttgggggattttgttttttatttttttttatttttattttgttgtatttggtagggaaagtttagttggttttaatgtagtgttattataaaaataagttattgtttggggtatgagtgaggttgtgtgtgtttgtgtttatgtatgtgtgtggttgtgtgtttttaattaaatatatattgtgtgtttttttttttgtggttagtagttagtagtagtttggaggagtttgttttggtttaaatgagaaattaagtgtggataagtaaattaagttgttagagggtgataagatgttgagtgaattgtttttagatgaaataaattaaggaaatgagggaagataatttgttttttgtattattagatatgtttggagtttaggggaaagtggtatatttttgaaatgttaattttttaagtagaaggaatgtattttatttattgttttatgtgaatagaataaaaatatagggtgggggatgttgttgtatagatttttaagatattttttaattgtaatagaagagaatttttttttttttttgtttggaaaaaaatttagtattagagaggatgttttttagaaattttaaaggattttgttttatttttaattatgtattttatttagatatatttagatatagttaaagtttttttatatggtaattataaagtttttgttaattaaaggaatggttttaaaatttgttttttttgtataatggaaaattattaatattgttttggtattgaagaaaatgtatagtagtattgaggtggtatttttatatattttagtagataaatgatgaataagtttagtttttattttttttttgtaggtaatttagttttgttttttattttataaaagtatatatagtttttgtatatatttaagatatattattatatttttaaaattatggggttattttttatttgagaagaaaaatgttaataaaagttaagtggtgaaaaaggtgttaaatatatttttaagaaagtattaatttttttttttataagtgtttattgtaagtatatttattggtataatgttttttttttaatttgaaatttttatatatatatatataaaagggggttttttagaagaaggtgttatttttttttttataatatgtttaaataaatatttgttagtataattgtaaattgtttggaaatattataattgttttgttgtgatgaaatgattttagttatattagtattttttttttttgtttttaaatttaattgtttttatttattttaattatgtatgtatagaaagtgaaattttgttgaaaattaaggtatttattgttttatatatatatttttatttagttattggaaatgtgttttaattaagaaattatattagaatatttattagagtatgaattttgtggaagatttatgtattttttattttaatttgaatatagtaagtttgtattggttgatttttagagtttgtatttatttgatggaaaattgtattttttttttaaagtggatttaaatatgtagtatttatgagtttttatttttttggtttttaaatagaagtattatttattatttgttttatgtatttattttttttgttattatagattttttttttatattttagtatttattgagtttatatgtgttaatatatatttttttttttgttattaagtatattgtttttgtttg

SEQ ID NO: 516 - DNA, 6207 bp, Artificial Sequence
  chemically treated genomic DNA (Homo sapiens)
gtttgtttagtttttttaaagatttaaagaatattatttatttgttttttaagtatttaaaaagtataattgtttatatttattttggttggatgaggatatgtatttatttatttatttaagagatatttattgttagatttggtggtttatgtttgtaattttggtattttgggaggtagaggtgggaggattatttgaggttaggagtttaaggttagtttgggtaatatagtgagattttatttttataaaaaataaaaaattagttgggtatggtggtatgtgtttgtggttttagttatttgggaggttgaggtaggggtattgagtttaggagtttaaggttgtagtgagttataattatattattgtattttagtttgggtaatagagtgagattttgttttaaaaaaaagaaagaaaaagaaaaagaaaaggggtatttattgaatatttattatgttttaggtattgtgttagattttaagtgaatattagtatatgaataagataaaggtgaaaagttattaaataagtttaagttgattttggtatatgtatttttttgatttttggttttgtgttttgattataattttttattattagattagatttttttaaataaataattatttttgtatgttggggatgggttgtgtgtggtagtatttatgtaggtggtatagatagtagttttttatttaatgttgtaataatattaggttaaataatgtgtattgattttaaaagtgtggggttaggttttttttaagtgttatagggagagtgtaaagtaggaaaagtttattggatgaggaaatattgtagagggaaagtgaatttttttttaatttgggttaaaatttagatgtggaattttatttttttttttatttttggatttttagataggaggaatttagtatatagataattatgaattatatatattttggttttatatgtttagatttgtttagagtatgaaatttttgttttgttggaaggtagtgttgtgtttatggaggtatataagtatttgttttaaagttattttgatttgtagatttgtaaatggtaaaaataattttatatgtttgttttgatttgtttttatttttaggttattttgtgtgagttttattttttagaatgtgattttgtagttttgaaatggatattatgagtagattgagatgtgagaatatgttagaatgattataggtttggatgttagtggggtaggagagggagtttgagattgtattggtttatattgtggtttttggttgagtatttggtttgtttggatgatgttttggttttatttaatttttattattttattatttagaggatagaggatttgagttttatttttgtattgtagttattttttttgggatttgtttttaagtttttttttgtgttgtttggtattttttttttattttttttaaattatttattgttattttgtaagtttgattgatttgttggtttttttatgagattggaatttttttgagggttgggataggtttattttttttattatagtgagtattagtttttagtttagttaatagttttgttaaataaataattgaataaaattatttgttaaataatggtttgttttttttagaggatggatttagtttgttttttttagaggatggatttagtaagtttttaattttggttataatggtgttagaaggaaagagttaagttatttggaggaaataggtttatttaaagatttttttttttttttttttttttaattggtaaaggtaggataagtgtatttgagataaattttggatataaaattttgatatattttttaggtattggttgagatgttttggatttgaaagggaagtaaattaaattattttaggtttttttttttttttttttggagatagaattttgttttgttgtttaggttggagtgtggtggtatgattttggtttataggaatttttgttttttgggtttaagtaatttttttgttttagttttttgagtagttgggattataggtgtgtgttattatatttggttgttttgtatttttagtagggatagagttttattatgatggttaagttggttttgaatttttggttttaagtgatttatttgttttgggtttttaaagtgtaggaattataggagtgagttattgtatttagttaggttttttgttaagtggtttgagatttagttgtgaatggtagttatggttagatttaggaatttaaagtttgatttattttgtttgaagttaatattaataataagagagatgtatttggttttataattttttttttttttgtttttttttttttttttgtaattaaggatagaattagaagtattgaaggttgtagaattgttttaggatttagagtagttttaaggaatttgtgtttatgtattatgtgtgtttttttgtttttttttttttttatgagtgagaaaaaaaagtgtttaaatttttattaatataaattaatgatatataatgatgaaattttgtttttatttttgtttgtgatagggaatgtaaaaatagtaagtggtttagttttatgaatttttgttttttgttttttttgtttttgttgggttggatttttaagaatggaggttagtgtatagttttgtgtgggttgtttagtttttggatttggtggatgatgttaggtgatgggagtggttgtggttgggttggggaggttgtggtttaggggagttgggagggagggtggttttgttaggttgatggtgtgtttggttgtgtggtgttgtttggagatggttttggtggtgttgtgttgttgtaaatagttgtttttttgttattatttatagtaggattttttggtttttgggtgtggtggttggaggtaggtttgtggtttggttttttgtgtgttttgaattatttgtttgttggttttattttgttttgtttttttttaggtgtttattgtgggttttgatttttgggtttgaagagtggagaagggaagattggggttgtgtggggatatgtgtttttgtgttttggaggtggttagtgtgttggggttgagttttggtagtgtgattttggttgttttatgtagtagggtaggagattggggggtgtggtatattttggagtattttgtttttttaaagttttgtgttttaggatgtggagttgtttttggggttttagtagttgaggtattttgtttaggtgtagttggatattgtttttttagtttttgttttttattttttaagtttgtgttggaaaattatttgttgtgggtttttgtaagtatagttttttggtgggattgaattagtttttagtgtagatttgagttttttgtaggaagtatattttgttttgttattttgaattgattattttgtttatataattatattttgtattttttatttttggggtttagtttagaattgggtagatattttttttaaatgtttttgtatgtaggttttgtatagtgtttatttgttggtgttttagggatttgatagtttttttaatatttttatatatggttgagaaaaataaataaataaatgtgttgttttttttaaaaaaataaataaataaagtatttagtattgtaaagtaggttattgtatttttttattttggattttttattttttgtttttaaatgtaggaatagtgttagtattgtttgagtttgagggttggaggttaggggatgaaggtttgtttttatgttttgtattgaattagggttagaattggggatgggggtaggggtgtatttttttgggagttgaggtttaagtttttggggttttgtatttgatgttgttttttttatttttgagttttagaattgtttttagtttttgtataagggtaaaaaggtgttttttgttttattttttttgattttgggaataagggtttgtattgaattaggtgtgaatgtttttttttattttgtgttgtttttgtttttttttttttagttgtggtttttgtttttttttgtattgtatttttggtgttggttgtagtttgtgagtagtttttgttaatttttttttttttatataggatgtttatattaggatatttgtgttagtaggtttttatggtttttttttgtagttttggggggagttatttttgaaattttttattttggggggtttatgagatttttgagataggaattgtgaaatgtttatgagattaggatatgtgttaaggtgggggtagggagttgtgagtgttggggatgtagttgggtggttgtagaagtgtttaggtttgtgtgttatttttttggtgttattgtggttgagtttgtgatgtttatatttatttataaaatgtttgttataaaagtagtggttgtggtgttttgtattttaattgtatttgtagtgagtatttgagaagttaagattgagttggtggttgtggtgtagtgaatgagtagtgattgtgtttttatttagttttgttttatagtgtttatttgtttttgttttttggttttttgtttggttttgtttaattgttatgatgatgtttttgggttttaatgtagattatgaggtgttatttttttgttgtagtagtgtgtttttggttggggatagttttttttattattatttatttgtagattttttttttagtatgggtttgtttgttaatgtgtaggtaaggttggttttttgttgttgtggggttgggggtttggggttgtggaggaggagatattgggtgggatgttttagtagatgagtagggggtttttttgtgtttggagggaggttgttgtggttggagtggtgttggtttgggggtttgggatttgttttgagtgtatgtatgtttgttatagtaagaattggttttttttttgggaggtaggtttgttttgagtaatttttggtttgtattttaggatggatttttgatattagttggagtagatgtgttttaagtataaatttgttaattagagtttggtttttttggggaggtggtagaaagtggtaatttttttttttttggtagtttggagtatggaggagggatgagggaggagggtgtagtgggtgggtgtgtaaggtagttttattgataaaaagtgagtttattttggagattttggagtggtgtttgtgttagtgtagatgttagggatatttataataaatttttttttaagtaagtgatgttgaagggataatgggaatgtagtggtaggatggaagagataggtattgtgttgtggaatgtttgggaggaaaagggggagattttttatttaggatgagggatatttaagatgaaatgtttgtggtaggattgtttttttttattgttgtatgtggtattgggaatttgttttatttgtgtttggaatttgtttgtttatgttggttttttttttttgttttgttttaggatttttgtatggatttggttgtttttagtgttaattttatttttatggttattgttattttgattagtttggatttgtagtggttggtgtagtttgtttttgttttttttgtggttttattgtagattagagttttttatttttttggagtttttgttttttttgttggggtttattttagggttggtgttgtgaagattatgataggaggttgagtgtagagtattggtaggaggggtaaggtggaataggtgaggaattttagtgtattttttttgggaatgtgggggttgggtgggaagtagttttggagatgtaggagtttagtatagaggatgaagttattgatggggttggttgtatatttgtaattgggagttttggttttaagtttattttattttaatttagattttgagttttattttaagaagtatttttatagttttttttttaagttttttattgtatgtttttagattgggtttttttttgtttttttgttgaggattttattttaaatgtaagttatatttagtttgtaattgtaggttagaaatggttttatagtggggtgttaggaagtagggaagttgtaggagttagttttattggggtgggtgaatggaggtgatggtagatatttttattgaatgttggtttttttttgtgattattttagttatttttaga

SEQ ID NO: 517 - DNA, 6207 bp, Artificial Sequence
  chemically treated genomic DNA (Homo sapiens)
tttggagataattagaataattataaaaaaagattgatatttagtaaaagtgtttgttattatttttatttatttattttagtagaattggtttttgtagtttttttgttttttggtattttattgtgaaattatttttgatttgtagttgtagattaggtgtgatttgtatttaaaataagatttttagtaagagaataaagaagagtttagtttgaaagtatgtggtaagaaatttagggaagaaattatgagagtattttttagggtgagatttagagtttgagttgggatggaatgggtttggagttagggtttttagttatggatgtgtagttagttttattagtggttttattttttgtattgggtttttgtatttttggggttgttttttatttagtttttatatttttaggaagagtatgttagagttttttatttgttttattttgttttttttgttaatgttttgtgtttggttttttgttatggtttttataatgttagttttggagtaagttttagtggagggggtggggattttgaaagggtgaggggttttggtttgtgatggggttatggaggagatgagggtgggttgtattagttattgtaggtttggattggttgagatggtagtgattgtgggaatgaagttggtattggagatggttaggtttgtgtagaagttttagaataaaatagaaggggaaagttgatgtgagtgagtaggttttggatataggtggggtgagtttttagtgttgtatgtagtagtgaagagaaatgattttgttatggatattttattttaaatgttttttattttggatgaaaggttttttttttttttttttaggtattttgtagtgtagtgtttgttttttttattttgttgttgtgtttttgttatttttttagtattatttgtttgaaagggggtttgttataaatatttttgatgtttgtgttgatgtaggtgttgttttggagtttttagaatgaatttgttttttattaatgaaattgttttatatatttgtttgttgtattttttttttttattttttttttgtgttttaggttgttgggggaggggggattgttgttttttgttatttttttggagaagttaggttttagttagtgagtttgtgtttgggatatgtttgttttagttaatgttagagatttgttttggagtgtagattagaggttgtttagaatgaatttgttttttgaagggggaattaatttttattatggtaagtgtgtgtgtgtttagagtaagttttgagtttttgagttggtattgttttggttatggtagtttttttttaggtataagggagttttttatttatttattggagtgttttgtttggtgtttttttttttgtgattttaagtttttggttttgtggtgatgggaagttagttttatttgtgtgttgataggtgagtttatgttggagaaggagtttgtgggtgagtggtagtaagagaggttatttttggttggggatgtgttgttgtagtgggaggatgatgttttgtagtttgtgttgaagtttgagaatattattgtggtggttaggtaaagttgggtgaggggttgaggggtggagataggtgggtgttgtggagtagagttgggtaggagtatggttattgtttgtttgttgtgttgtggttgttggtttagttttggttttttagatgtttgttgtagatgtggttggagtatgaggtgttgtagttattgtttttataataagtgttttatgaatgagtgtaaatgttatgggtttaattatggtggtgttagaggggtggtgtgtgggtttgggtgtttttgtggttgtttggttgtgtttttagtgtttgtagttttttgtttttgttttggtgtgtgttttaattttgtgagtattttgtagtttttgttttagaggttttgtgggttttttaagatgaggggttttggggatggttttttttagggttatagggaaaggttgtggaaatttgttgatgtagatgttttaatatggatattttgtgtaaggggggagggattgatgggaattgtttgtgggttgtagttaatattgagggtgtagtgtggggggaggtgggggttgtggttgggggaggggaggtgggaatggtgtagaatgagagagaatatttgtatttggtttaatgtggatttttgtttttgaggttgggggggatggggtagagagtgtttttttatttttgtatggaaattgaagatagttttgaggtttagagataggagaaatggtattgagtataggattttgaggatttaagttttggtttttgaaggaatgtgtttttatttttatttttaattttagttttaatttagtgtaaagtgtggaagtagatttttattttttaatttttagtttttgggtttgagtaatattagtattgtttttgtgtttggaagtagaaagtggaggatttaaaataagagaatatgataatttattttatgatattgggtattttatttatttatttttttaaagaagatagtgtatttatttatttattttttttggttatgtgtgggaatattaaggaaattgttaaatttttgagatattagtagataaatattgtgtaaaatttatgtgtgaagatatttgaagggggtgtttgtttggttttgagttgggttttaggggtagggagtgtgaggtgtggttatgtgggtagggtggttagtttgggatgataaggtggggtgtgttttttgtggggaatttaaatttgtgttgagggttggtttggttttgttaggaagttgtgtttatgggagtttgtagtgggtgattttttagtgtggatttggagggtggaggatgggggttggaaggatagtgtttagttgtgtttgggtggaatattttgattgttgggattttaggagtggttttatgttttggaatatggggttttggggaggtaaggtgttttagagtgtgttatgttttttaattttttgttttgttgtgtaggatagttggggttatgttgttggggtttagttttagtgtgttggttatttttagggtgtgaagatgtatgtttttgtatagttttggtttttttttttttattttttgggtttgggggttggggtttgtggtgggtatttggagaggggtgaggtaggatgaggttggtgggtggatagtttggggtgtgtggggagttggattgtagatttgtttttagttgttgtgtttgggagttaggagattttgttatagatagtaatagggaagtggttgtttatagtaatatagtgttgttagggttgtttttaggtaatgttgtgtggttgggtgtgttgttggtttggtgaggttatttttttttttagtttttttgggttgtggtttttttggtttggttgtggttgtttttgttgtttgatattatttgttgggtttgggggttgagtggtttgtgtgaggttgtgtgttaatttttatttttagagatttaatttggtaggagtggggagggtaggaggtggggatttgtggaattgggttatttgttatttttgtattttttgttataggtagaggtgaaaatagaattttattattgtatgttattggtttatgttggtgggaatttaggtgttttttttttttatttataaaaagggagggaaatggaaaaatatatataatatgtaaatatagattttttggagttgttttgaattttaaagtaattttgtggtttttggtatttttaattttatttttgattatagaaagaaagagggggatgggagggaaaggggttatgaagttaaatatattttttttattattaatattagttttagataaaataggttaagttttgaatttttgagtttggttatgattgttatttataattagattttaggttatttaataggaaatttgattgggtgtggtggtttatttttgtaatttttgtattttgggagtttgaggtgggtggattatttgaggttaggagtttgagattagtttggttattatggtgaaattttgtttttgttaaaaatataaaatagttgggtgtggtggtgtatgtttgtagttttagttatttaggaggttgaggtaggagaattgtttgaatttgggaggtagaggtttttgtgagttgagattgtgttattgtattttagtttgggtaatagagtaagattttgtttttaaaagaaaagaaaagaaaatttagaatgatttgatttattttttttttaggtttaaagtattttggttaatatttaaaagatgtgttaagattttatatttaggatttattttaaatatatttattttgtttttgttaattaaaaaaaaaaaaaagaagaagggtttttgagtgagtttattttttttagatagtttaattttttttttttggtattattatgattagagttggagatttattaaatttattttttggaaaggataaattaagtttattttttggaaaggataaattattatttaataaataattttgtttaattatttatttaataaaattattgattgggttggaggttggtgtttattgtaatgaagagggtaggtttgttttgatttttagagagattttagttttataggaagattaataagttaattgagtttatagggtagtagtaagtggtttgaaagaggtaagaaaggggtgttaggtaatatagaagaaggtttggaaataggttttagaggaggtgattgtaatatagagatggggtttagattttttgttttttggataatggaatgataaagattgagtaaggttagagtattatttaggtaaattaagtgtttaattagaagttatagtataggttaatataattttagatttttttttttgttttattaatatttgaatttgtgattattttaatatatttttatattttaatttgtttatggtatttattttaggattgtaaaattatattttaaaaagtggagtttatataaggtagtttaaaaatgaagataaattagaataaatatgtgaaattatttttgttatttgtagatttgtaggttagggtgattttgagataggtgtttgtgtgtttttgtgagtatggtgttgttttttaatagggtagggattttatgttttggataagtttgagtatataaaattaaaatgtgtgtagtttatgattatttatgtgttgagttttttttatttggggatttaaaagtgaaaaggagggtagaattttatatttgaattttaatttaaattgaaaaaaaatttattttttttttatagtgtttttttatttgatagattttttttattttgtattttttttgtggtatttgaaggagatttgattttatatttttgaagttagtgtatattgtttagtttggtgttattgtaatattaagtgaaaggttgttgtttgtattgtttatgtaaatgttgttgtatatagtttatttttagtatgtagaagtagttgtttatttggggaagtttggtttagtggtgaagggttgtggttaaagtatgggattagaagttaggaagatgtatatattgaaattaatttagatttgtttggtaattttttgtttttgttttgtttatgtgttgatatttatttaggatttagtatagtgtttgaaatatagtaggtgtttaataaatatttttttttttttttttttttttttttttttttgagatagggttttattttgttatttaggttggagtgtagtggtgtgattatagtttattgtagttttgaatttttaggtttaatgtttttattttagttttttaagtagttaggattataggtatatattattatgtttagttaattttttattttttgtagagatggggttttgttatgttgtttaggttagttttaagtttttggttttaagtgatttttttatttttgttttttaaagtgttgagattataggtgtgagttattaggtttggtaataaatattttttgaatggatgaatgaatgtatgtttttatttagttaaggtgaatgtagatggttgtgttttttgggtatttagaaagtaaatagataatgttttttaaatttttggaaaggttgaataggt

SEQ ID NO: 518 - DNA, 6147 bp, Artificial Sequence
  chemically treated genomic DNA (Homo sapiens)
aggttgaggtaggagaattatttgaattaggaagtagagattgtagtgagttgagatggtgttagtgtattttagtttgggtagtagagtgatagtttgtttaaaaaaaaaaaaaggtagtaaagtgataggaggatagattagaagggttattttttagatagtgtaaggaagaaagaagaagaagaagaggaggaggaggaggaagaggaagaagatggagaagagggtattttagaagaaataatggagatatattttttaaaattgaagaaagatgattaattttagattgaagggttaagaggttaaattagagagatagtttggtaagttaggaagagtattaaagttagataattagagtgaaattaaagaaaatttaaggtgataaaaatttaaaaagtttttttgtgattttagtttattggtgaaaatttaaaaaaaaaaaaaaaaaaaaaaggatagtttgggtaatatggtgaaattttatttttataaaaaatataaaaattagttgggtgtggtggtatatgtttgtagttttagttatttgagaggttaagtaaggtaggaggattatttggggttaagagttttagattagttgtggtaatatatatgttgtgggaagttaggtattttgaatggagggattggttgaagttatggtagaagaatataaattgtgaagattttatggatatttattatttttttaattaatatttttgtgattttttatgtttgtttttaattttttaattttgttatttttgtaaattgaggatgtatgttgttttaggattttgtgatgattgtgttaattgtataaattgtttgtagaggataattgttgtgtgtttgagtaatgtgaaatttgggtattttaagaataggataatagtaatttttagggaataagggagataattttaaagtttggttgtttgtgggttgggtaggatagagttatattttttttattattgtaaataggtaagagaaatattgttgaattttttttttagtaaggaatattaataattaatagttttgagaaaagaatgtatttttagggttgggttattgaaatggtttttttgagagtgtttgtttttatttagaagtagaaagggatgaaatatgttttagttttttgtagtatttttagatttgataggattaggaaattttagtttggtaaattttagttagattggttttttgtttttgaattttgatagtgtgtgtatagtgggatttggaagtttattagtgattttagttttgttgtgattttttgttttgtgattttttgttgtttttgaagtatgtgatttttgtgatttatattttgtttgtgtatttttttttttttgaaaattgttaataaaaatttgttggttttatggtttagggggtattatggaatttgtggatatgtgatgttttttttggatatttggttttaaaatgttttttttttgtattttttttttttattttttaggttagttgatatttagggaaaataggaaaggatttatgtgaaatattgggggttgaattttttttgataataagttttttaaaaaagatttttaaatgaaatttttttgttttttaatttttatttttgttttgggggtatatgtgaaggtttgttatataagtaaatttgtgtttttggtgtttgttgtatagaatattttattatttaggtattatgttgagtatttaatagtttttttttttgtttttttttttttttttattttgtattttggagttaattatagtgtttgttgtttttttgtttgtgttataagtttttattatttagtttttatttataagtgagaatatttagtatttggatttttgtttttgtattagtttgttaaggataatagtttttagttttatttatgtttttataaaagatatgatttagttttttttaatggttgtattaaatgaagttttaaagatataatataaatattaattttttttttattataaaaattttttgttgaatttgattatatttaaattaatgagttttgttttatgaaagattttttggataaatttgatagttgatggaataggagaagttgtttgttatgtttaaagttaataagagattaatatttagaataaatggagatttgtaaattaatagaaagtaggtagtaaagttaaagaaaatagtttaaggtatagttattaaaaggaatgtgattatgttttttgtagggatatgggtggagttggaagttgttagttttagtaaatttatataggaatagaaaattagtgagattgtatggttttatttataagtgggagttgaataatgagaatatatggttatatggtggtgattaatatatattggtgtttgttgagtggggtgttggggagggagagtattaggaagaatagttaagggatattgggtttaatatttgggtgatgggatgatttgtatagtaaattattatggtgtatatatttatgtaataaatttgtatattttttatatgtattttagaattttaaataaaagttggatggttaggtgtggtggtttatgtttgtaattttagtattttgggaagttgaggtgtgtagattatttaaggttaggagtttgagattagtttggttaatatggtgaaattttgtttttattaaaaatataaaaattagttagatgtggtatgtatttataattttatttatttgggaggttgaagtagaattgtttgaatttgagaggtggaggttgtagtgagttgttgagattgtgttattgtattttagtttgggttatagtgtgagattatgttataaaataaaataaaataatataaaataaaataaaataaaataaaataaaataaaataaaataaaataaaataaaataaaaaaataaaataaaataaaataaaataaagtaatttttttttttttaagtggtttttattttttttttttgttttgtgaagtgggtgtgtaagttttgggattgtagtggttttagggaatttttttttgtgatgttttggtgtgttagtttgttgtgtatattttgttgtggttttttttttgttgtttgtttattttttaggttttgttggggatttgggaaagagggaaaggtttttttggttagttgtgtggtgattttggggattttagggtgtttttttgtggttgatgtttggggtgtagtggttgttggggttggggttggtgggagtttgtgggattttttagaagagtggttggtgttgtgatttagtattggggtggagtggggtgggattatttttataaggtttggaggttgtgaggtttttgttggagttttgttgttgtagtttttgttattagtgagtatgtgtggtttgtgtttttggggatggggtttagagtttttagtatggggttaatttgtagtattaggtttgggtttttggtagggttttttgtttattttgagatttgggatgggggtttaggggatttaggatgtttttagtgttgttagtggtttttagggggtttggagtgttttggggagggatgggattttgggggtggggagggggggtagattgtgtttattgtgttttggtatttttttttgggttttagtaaatttttttttgtttgttgtagtgttgttttatattgtggtttattttttagtttgaggtaggagtatgtgtttggtagggaagggaggtaggggttggggttgtagtttatagttttttgtttatttggagagatttgaatttttttatttttttgttgtgtggtttttattttgggttttttttttgttttttgttttttttgttatgtttgttttttgttttagtgttgtgtgaaatttttggaggaatttgtttttttgttttttttttgtatttttgatttttttttgggttgttgtgaggtggagttggtttggtttttatattttgtatttttttttttttgtaggttgttgtgtggttttgtgtatgttgttggtagattagggttagagttggaaggaggaggtggtgattgtggagatgtggtaggagggtttatttaaagttttttgtgtaagtgattatgtttgggtaaggggagggggtgttgggttttagggggttgtgattaggattgggggatgtttaagtttagtgtttttttttgagttatgttttttttaatagttatatgggtagttttttaagttttaggatggagattttattttgtattagtttaatattattttgtgttatttgggttgtatttttggtgagttttgaatttttaagtttagggtaggtatgggtaagtttttgtttttggagtttttttgtttaaattagttgttttgtagttttttggagtggaggaaattgagatttattgaggttatgtagtttgtttaaggttaagtttgggtgtttgtaatttttgttttgtgttaggttgttttttaggtgttaggtgagttttgagtatttgttgtgtggtagttttttatttttttatgtatattttttttttttttttttaggttggggtttatagatagttttttggttggtttatttttagtgattgtgtgttgattaggtgtttagttatgtggtttgtttttttttatttaattttagggttttatgggaaggattagtaggaggtagttttggtggatatggtgaatgatggtgtggaggatttttgttgtaaatatattttttttatttatattaattatgtgagtatttgtattagggttgggtattgggggttgaataaagaaaggggttttttgtgtttttattttttttattttttaggtggtttgggttgatttttttttgggttagggtgtaggggttgggttagttttgggttaggggtttaggggtttgggataagatataatttgtatttttattgtttgggatattaattagttaagtaatgggttatgggggtgagtgtaaggatagagatttttagtaattggtggtttttgattttttggggtggtgagggttttttggagtagttagaggtggaggaggatttgttgttagtttttggatggaggtgttggtatttttagttgaggaaaatatgtagatatagagtatatttggggatttgggattagtttagtagaggtagtgtgtgtgtgtgtgtgtgtgtatgtgtgtgtgtgtgtgtgtgtatgtttgtatttgtgttgggtgggtaaggagatagagatgggtgggtagtaggtttaggttttgaaggttttgaatttattggtttggagttttttaagggtaatgggggttattgagaagtttgaatagggttgtgtttgaatgtgaggtttagaaggattttttagagaagttagttttaaagtttttgtaattatttggtgagagaatttagtaaggatggataggtagaatggaatagagatgagttggtagttgaagtggataggatttggtattagtttggttgtggggagtaagtagaggagaatttgggattttggtgtttggtttggggtagatgggggtgttttaggggttgggagggatgagagtaggatgatatatggtggtgtttggtaggaggtgggtaaggatgattatgtgaaggtattgtttgggtaattgaagttttttgagattttgttgttttagaattagggaggtaagatttttattgtgggagattaggtgagtatttggttttatgttgttttttttttgttattttttgtttttagatggatataggtgtgagttatttgtttagtaaagtagagtagatttaggggatgggtttaggttttttgtttttaatttttttagtttgtttttgttggttgagtttttggtttttttgttttgtagattttttttgttgattataatttgttggatttgttgttgatttatgaggttttagtttttggttgtttggatgtgttttttttgtttttagtatatgtggggtgttttagtgtttggtttaagtttaaggtttttttggttttttttgagtatgtgaatttttttattaatggtaatgggaaatagtgagggttg

SEQ ID NO: 519 - DNA, 6147 bp, Artificial Sequence
  chemically treated genomic DNA (Homo sapiens)
taatttttattgttttttgttgttattgatggggaggtttatgtatttaggggaggttaggaaggttttgagtttgggttgggtattgaggtgttttatatatgttgagagtagggggaatgtatttaggtagttaggggttaggattttatggattagtagtaagtttagtaggttgtagttagtgaaggagatttgtagggtaggggggttagggatttagttagtgggagtaggttggaggaattgggggtagagggtttaagtttattttttaggtttgttttgttttgttaaataaatggtttatatttgtgtttatttggaagtagagggtggtgaggaaggaatagtatggggttagatgtttatttggttttttataatgaaggttttgtttttttggttttgggatagtagggttttaaaaggttttagttgtttgggtagtgtttttatatagttatttttgtttgttttttgttagatattattatgtattattttatttttattttttttagtttttgagatatttttgtttgttttaggttagatattagagttttagatttttttttgtttgttttttataattaggttagtattaaattttgtttattttagttgttaatttatttttattttattttgtttgtttatttttgttgggtttttttattagatgattgtaaaagttttagagttggtttttttggaggatttttttagattttatatttagatatagttttgtttagattttttaatggtttttattgtttttaggagattttaaattagtgggtttaaggtttttgggatttgggtttattgtttgtttatttttatttttttatttatttgatataaatgtaagtgtatatatatatatgtatatatatgtatatgtatgtgtatatatgttgtttttgttgaattggttttaggtttttaaatgtgttttgtgtttgtatattttttttagttaaaagtgttagtatttttatttagaaattggtgataaatttttttttatttttggttattttaggaagtttttgttattttaggagattagaaattattagttgttggaggtttttgtttttgtatttgtttttatgatttgttatttggttggttgatgttttaggtaataagggtgtaggttgtgttttgttttaggtttttgggtttttggtttagagttgatttagtttttgtattttgatttaagaaggggttagtttaagttatttgaggggtaaggggggtgagggtataagaagtttttttttttgtttagtttttagtgtttaattttggtgtagatgtttatatagttggtgtagatgagggagatgtatttgtagtggaggttttttatgttgttatttattatgtttattagggttgttttttgttggttttttttatagagttttggggttgggtggaggggagtaggttgtgtgattgggtgtttgattaatatatagttattggggatgggttaattagggggttgtttgtgagttttagtttgggaggaggggaagaggatgtgtgtggaaggatgagagattgttatatagtaggtgtttagagtttatttgatatttgggaggtagtttggtatagggtaaggattgtaggtatttaggtttgattttgggtaaattatgtaattttagtgggttttagttttttttattttagagggttgtggggtagttgatttaaataaaagggttttgggggtagaggtttgtttatgtttgttttggatttggaggtttaagatttattaagggtgtggtttaggtgatgtaggatggtattggattggtatagggtgaggtttttgttttggaatttggggagttgtttgtatagttgttgggggaggtatggtttagggaggggtattgagtttgggtgttttttgattttagttatagttttttaaggtttagtattttttttttttgtttgggtatggttatttatgtaggaggttttgagtgagtttttttgttatgtttttatggttattattttttttttttagttttggttttgatttgttagtagtatgtgtagggttgtgtagtggtttgtggggagggagaagtatgagatgtggggattgggttgattttgttttgtagtaatttggggaggggttaggagtgtagggagggaatagggaaataggtttttttgaagattttatataatattggggtggggagtaggtatggtgggagaggtggggaataggaaggaggtttggggtaaaagttatatgatggagggataagggggtttggatttttttgggtgggtgaggggttgtgggttgtagttttagtttttgttttttttttttgttagatatatgtttttattttgaattgggaaatagattatggtgtagggtggtattgtagtgaataaagaaaagtttgttggagtttgggggaggatgttaaggtgtggtgagtgtagtttgttttttttttttgtttttggggttttatttttttttgaggtgttttgggttttttgaaagttgttaatggtattggggatgttttgggttttttaggtttttgttttgggttttgaggtgggtgaggagttttgttgggagtttgggtttgatgttgtgggttggttttatgttgggagttttgagttttatttttggggatgtgggttgtgtgtatttattggtggtgaagattgtggtggtgaaattttagtgaaggttttgtggtttttgagttttataagggtggttttgttttgttttgttttagtgttgagttatggtgttggttgtttttttggagggttttgtggatttttgttggttttagttttggtggttgttgtattttgggtgttggttgtagaggggtgttttggagtttttggagttgttgtgtagttggttggggaagttttttttttttttttaggtttttagtggggtttagggagtaaatagatagtaggaagaggattgtagtgaagtgtgtgtagtgaattggtgtgttgggatattgtggggggaaattttttaagattgttgtgattttggagtttgtatatttgttttatagggtaggggagaggggtggaggttgtttagaggaaaggaaattgttttattttattttattttattttatttttttattttattttattttattttattttattttattttattttattttattttattttgtgttattttattttattttatgatgtagttttatgttgtggtttaggttggagtgtagtggtgtgattttggtggtttattgtaatttttgttttttgggtttaagtaattttgttttagttttttgagtaggtggaattataggtgtgtgttatatttggttgatttttgtatttttagtagagatggggttttattatgttggttgggttggttttgaatttttgattttaggtgatttgtatgttttggttttttaaagtgttgggattataggtgtgagttattatgtttggttgtttaatttttatttgaagttttggggtatatgtagaggatgtgtaggtttgttatataggtgtgtgtgttatgatggtttgttgtatagattattttattatttaggtattaagtttagtattttttagttattttttttggtattttttttttttagtattttgtttaataggtattagtgtgtgttgattgttgttatgtgattatgtgtttttattgtttagtttttatttataagtgagattatgtggttttgttggttttttgtttttgtgtgagtttgttgaggttaatggtttttagttttatttatgtttttgtaaaggatatgattatgttttttttagtggttgtgttttaggttattttttttggttttgttgtttattttttgttgatttgtagatttttatttattttagatattgattttttgttggttttagatatgatagatagttttttttattttattaattgttaagtttgtttaaggagttttttatgaaataaaatttgttaatttaagtgtaattaaatttagtaagggatttttgtggtggggaagaggttggtgtttatgttgtatttttaaaattttatttaatgtagttattaaaaagaattagattatgttttttgtgggaatatggatggagttagaggttattatttttagtaaattaatgtaggaatagaaatttaaatattggatgtttttatttgtaagtgggagttaaatgatgagaatttataatataaataaggaaataatagatattgtggttgattttagggtgtaggatgggaggaaggagaggagtagaaaagagaattattgggtatttggtataatatttgggtgatgaaatattttgtataataaatattgaagatatgagtttatttatgtaataaatttttatatgtatttttaaaatagaaataaaagttaaaaaataaagaaattttatttaaaagttttttttaagagatttattattgggggaaatttagtttttaatattttatgtgggtttttttttattttttttaagtgttggttggtttgagaaataaagggaaagagtataaaagagagatattttaaagttgggtgtttaggggagatattatatgtttgtaggttttgtgatgttttttgagttgtaaaattagtgagtttttattagtaatttttaaagaggagggagtgtatgaatagggtgtgggttatagagattatatattttaagggtgataaaagattatagggtagaaggttatggtgaaattagaattattaatgaatttttaggttttattgtgtatgtattgttagggtttaagagtagagaattggtttgattagaatttgttaggttggaattttttaattttattaagtttgggggtgttgtaggagattagggtgtgttttatttttttttatttttgaataaaggtaggtatttttagggaggttattttagtggtttggttttgggaatgtattttttttttagggttgttaattattaatattttttattggggaaagaatttagtgatattttttttatttgtttgtggtaataagagaagtatggttttgttttgtttagtttataggtagttagattttaaggttattttttttgttttttgaaaattgttgttattttgtttttaagatgtttagattttatattgtttaaatatataataattgttttttataaataatttgtgtagttaatgtagttattatagggttttaaggtgatatatatttttagtttatgaagatgataggattaagagattaaagataggtataggaaattataagagtattgattggggaagtgataaatgtttatgaaatttttataatttatgtttttttgttatggttttagttagtttttttgtttggggtgtttgattttttataatatgtatgttgttgtagttggtttggaatttttggttttaagtgatttttttgttttatttagttttttgaatagttgggattataggtatgtgttattatatttagttaatttttgtattttttgtagagatggggttttattatgttgtttaggttgtttttttttttttttttttttttttaaatttttattaatggattgaggttataaggaagttttttaaatttttgttattttgggttttttttaattttattttaattgtttagttttggtgttttttttggtttgttaagttgtttttttggtttggttttttggttttttggtttgaggttggttatttttttttagttttgagaaatgtatttttattgttttttttgagatgtttttttttttgtttttttttttttttttttttttttttttttttttttttttttttttttttgtattatttggaaaatggtttttttaatttatttttttattattttattgtttttttttttttttagataggttgttattttattgtttaggttggagtgtattggtattattttagtttattgtaatttttgttttttggtttaagtgatttttttgttttagttt

SEQ ID NO: 520 - DNA, 6237 bp, Artificial Sequence
  chemically treated genomic DNA (Homo sapiens)
gtgtttggttttggtagtttggttttgggtgttttttatttttaggtgttgttttttattttaggttgtttttttggttgttgtggggttgtggtttgggtgttatagtaatgggagttaggttttatttgaatatgtaaatatttataagttgttgggggtttgggttttgtgtggttgagttatgttttttagtaatggttgttagggtggggttatgtggattggtatgtgtgtgggtgtttttgttgtgggtgattttaggggaaggtgatgtgttattaatttgagttgggtgggtgtaggtgtgttaggtgttagttttttgtggttttgtgtttgggttgttgtgatgtatgtgttgtgtttttttgtgattttggtgttttttatgtggggtgggtaaaggtggtttttgttggaggtttgtgtttattttttttaggtggaagggttgtttttggggttgaggtttgttgttttgatttttggttggaagtgaggttgatggtaaaaggaagtattgggggaagtgtttttgaggattaggaaatatatattggatgttggagtgtatttgagtgtttggtttgtgggatatgttgttgtttgttgtttagttgttgttttttatttgtgtttatgtgtgtttgttttgagttgagttttgattgtgattgtgtggtggatggatggtaggtgggatttttgggattgtatgtgggtggagttttgggttagtagtgattggtgtaggagggtgaggtgggtgttggattgggtagaggtagggtttgtttgattgtaaaatgttttttttgttttgagatgaagtagtgttttgttgtttagtgtagtggtgtgattttggtttattgtaatatttgttttttgggttttagtgatttttttgttttagttttttgagtagttgggattataggtgtgtgttattgtagttgattaattttttgtgtttttagtagagatagggttttattatgttggttaggttggttttgaatttttgattttaagtaatttatttgtttaggttttttgaagtgttgggattataggtgtgagttattgtgtttggttttttttgttttttaatgaggatgtatttttgatttttttgtaattttaaaaaatgttaaaaatatgtttttttgggtttgaaagagttaggatgtgtgtttatgtgtttggggtgagttttgggtattttgtttttttgtggtaatttgtgggtatggtttaattggattatgttgagtttttgtagtgttggaattttaagtttggggggattgggtgggtagggttgtttgttatgtaggtttgagaaagaggagagtggtggagggggtgtttttatgtttggttttagggtatatggttgtgtttgttgtttggaattttattggggttgtaagtgtttttggggtgggttgtggtgggagtaggggagttggggtgtgtggtggtaggtggggtgtgtggttgttttatttgtgtggaagggtagttgggtaattggattttgtggttatttgggggtttttagttttgagtattttgttttggttttggtggattttagtttttttttagtttgtagttttgggatttttgtggtgggtggtgttgtgttgttggtgtagggagggtttttggtgtattggtattgttgagttgggtttttttgttggtttgtttttgggagagtttggggttttgtttggagatgttgttttgggtttttagatattggttttttggttttttttgagtaattttgagtttggttttggtttttagttaagtttaattttgagaggttgtggttttattggttttgttttttgtgttgtttttggaagttttgtttgattgtggtttttgatagatgggttgtttagttaattggggtggggtggggtttgatggtgtgtagttaatggtaggttgtgtttggtagatggatgggtgtggggtggggtgtgtgtaggtttgtttgagtttttgttgtttgtgttttgtgtttgtaatttgagttgtatttgttgtggatggagtttatgtgtggggtgaattgtgtgtttttgtttttgttttgttttggttttggttttggttttggttttgggggtagttgtgtttgtgaatggtgagtgtgggtagggattggttgggttgtgtgttttttttgtttttaggtggtagtaatatgtgtggtgtgggttgggggtgtggggttggtgggtgtaagtggtggtggtggtggtggtggtgggtgggtggggttgggtggggtttgtgggtataggtgagtgggtgttgggggttgtggtgggtgggggtttttttttttttggggtttgtgggaatttgggttttatttgtggttttgtgttgggtatggtttttatgttggtgtatttgggagttttgggtttggtgtttttatatttgggggtgtttgggaggaggtggttgtggttatggtatgtttgggtatttttgatttagtattataggttgtggattaggttgggggttttagttttagtgttttttttttttttgggttttttgtgttgttttttggtttttttttgttgtttagtttttgttttttaggagtttttttgttttttttagttttttgtggttgaaagatgtttttggttttttgttgggggtgtggggtgttgtttgggtttgttttttttttggtggtgtttagtatgtagtaggtgtttagtaaatatttgttggaggtattagtgttgtggggtttgtaggttggtattagtttgtttgggtatgttgtggtgtgttttgttgtggttagatttgttttggaggatggtaattttagtttttgggtgtttttttttagtttttttgttgatttagtagtttttaatttgggtgtgtggttgagagtgtttagttgttagttttgtttttgagggttgggtttttttttttattattgggttattaagagtaagtgggggtgaggtgatagtttttttgtatgttgggttgtagttgtataggtaggtatgttgtagtttttgttgtttggtgttggggtttagggattgttgtgggtttgttttttagatggttttgttagtagttgttttgtggggtttggggttgggtttgggtttggttgagtagggttttttttggtaggtggggtaggagattttgtaggaggattttgggttgtaggtttttgaggagtgatgatggaatataagttggtggtggtgggtgttggtggtgtgggtaagagtgtgttgattatttagttgatttagaattattttgtggatgaatatgattttattatagaggtgagtttggtgttgttgtttaggtgttagtagttgttgtgggtgagtttaggatatagttaggatagggttggttgtagtttttggttttttgtatggtgttgtggttttgttttttgttttttttagaggaggggagttttttgttttagtattttaggagaggagggggtatgaggggtatgagaggtattagggagaggttggttgtgtgaattttttttatggaaggttttgagggggtttttgagttttgtttttttgtaggatttttattggaagtaggtggttattgatggggagatgtgtttgttggatattttggatattgttggttaggaggagtatagtgttatgtgggattagtatatgtgtattggggagggttttttgtgtgtgtttgttattaataatattaagttttttgaggatatttattagtataggtgaattttgtgaggttggtttgggagtttatgttgtataggtggggttaggttggttgtgtttaggtaggggttttttgttttttttgtgtatgttttggatgttgttgtgtttgtagtttttgtagttagtttttgttttttattttttagggagtagattaaatgggtgaaggatttggatgatgtgtttatggtgttggtggggaataagtgtgatttggttgtatgtattgtggaattttggtaggtttaggattttgtttgaagttatggtattttttatattgagattttggttaagatttggtaggtgaggtagttttttattttatagttagttagggatttgttttgttttgttttagttagggagtagtatttattgatttttttttttgatatagggtagttgttttggttttagttttagttttgggattttttgggattttttgggatttatgtgatttagtggttttttgtgttgtaagttttttgggatggtagggtagtgagggaggtgagggttggggtttgggtttatgttttgtagttttgggttgatatagttttggggaaggtggaggtttttggggagagttgttttgagttaggttggagtggtgattttggggtttggttttttttgtttttagagtgttttatgggtatttgttggttttgagttttagtggggttattggggatatgggttgtagttgagttgagagttgggtgtagggtggttaaattttggttagatttggagtttaggagggttttgggttattttgatttttgaggggttgttgtagtatgatgtgggtggttttgggtattttgagatggttagagtttagttttttgtgtgtgtggtgggtttggggaagtggttggtggagttgggagttttgggttaggtaaggtttgattttatagtagggagttttttatttaggtaggtggttataggttggttttttttgattttatttttttttttttagggagtggaggatgttttttatatgttggtgtgtgagatttggtagtataagttgtggaagttgaatttttttgatgagagtggttttggttgtatgagttgtaagtgtgtgtttttttgatgtaggtgagggggatttttagggtggttgttatgtttattggatgattttggttttttgtttttgttggttttttggtttgtggttagtagttttttttgtgttttgtttagtataagtttaggatatggaggtgttggatgtaggaaggaggtgtagatggaaggaggaggaaggaaggatggaagtaaggaaggaaggaagggttgttggagtttagttattttgggattgtgggttgaggtgattgtagatttttttagggaggttgtgtatagattgttttgaatattttaaatgttattggaattttagtttttagttttttttttaggtttttgtgggtttttgttgggtatagatgggattatagtaaattattggatggttttgattttggtttttggttgagggtgggatatggtgtgtgtgtggtttggtatgaggtatgttggaattttaggtttgtttagttttgggttttttatagtttttgggagggggaggttgggagaggttggttaggggtttgggttgtggtgttttttttttttgtttgttttagtgtttatggtttttggtagagagttttggataagtaggtagattataaggatagagagtttattgtgtttttattaattaggagggtgttttggttttttagagggaggtggttttaggggttggggatttgtgttggtggttttggtttttgttgggagtttttttggtggtgagaggtattattttttttgatttgtttttagtgtgaaatgtatttgttaagaatggtagatatagggattttgttttttgggtttttatatgtttagttttttttggttttgtggtttgaagtggtttgtggattttggaagtagggttttagtattgattggttttaggtttttgttttattggtggttgggtagtggttagtagggtgtgggagtttggttatttttgttttttggagtggatgaggttggtagttggtttgtttgtttttgttttatttttttttgtttttgtttttattttatttttgttttatgtttgttttatggttggttgtttttggagtttggtagtgttattggtttagttttgttgggtatatataggttttgttatttattttgttttaaggggtttgttttgttttgggttaagttttaggtttggttatagttatagatagtttagttttttgtgtggttattttggtttttgttgggggtttatagtgtttttggtgtttttttttttttagggtttggg

SEQ ID NO: 521 - DNA, 6237 bp, Artificial Sequence
  chemically treated genomic DNA (Homo sapiens)
tttgggttttgggaggggaggggtattaggggtgttgtgggtttttagtagaagttaggatgattatataggggattgagttgtttgtggttgtggttagatttagaatttggtttaaggtagggtaagttttttggagtagagtgggtggtagagtttgtgtatatttagtaaggttgagttagtgatattattaggttttaagagtaattagttatgaggtaggtgtggggtaagggtagggtgagggtaggggtgggggagagtggggtaggagtagatggattagttgttaattttgtttattttaggaggtagggatggttaggtttttatgttttattggttgttatttgattattaatgaggtagaggtttgaggttagttggtgttggagttttatttttaaggtttatagattgttttaggttatagagttgaagaaaattgggtatgtgaaggtttaggaggtggggtttttatgtttgttatttttggtaggtgtattttatgttgggagtaagttaggaaaggtgatgttttttattgttaagaaggtttttagtagagattagagttattggtatagatttttaatttttgaaattatttttttttggaggattaggatgtttttttagttggtagaagtatagtaagttttttgtttttatgatttgtttgtttgtttagagttttttgttagaagttgtggatattggggtaggtgggaggagagagtattatagtttagatttttgattggttttttttaattttttttttttaaaggttatggagagtttagggttggataggtttgaggttttgatatattttatgttaggttatatgtgtattgtgttttatttttagttgaaaattaagattaagattatttaataatttattgtgattttatttgtgtttgataagggtttatagaggtttgggaggggagttaagggttggggttttggtggtatttgggatgtttaagatagtttgtgtatagtttttttgggagggtttgtagttattttggtttatggttttggggtgattgggttttagtagtttttttttttttttttgtttttgtttttttttttttttttttttgtttgtattttttttttgtatttggtatttttatgttttgagtttgtgttgggtggggtataagggaggttgttgattgtaggttaggagattggtaggggtggggagttggggttatttggtgggtgtggtggttgttttgggagttttttttatttgtgttaggagagtatatatttgtagtttatgtagttggggttatttttattaggagggtttagtttttgtagtttgtgttgttggattttatgtattaatgtgtagaaggtattttttattttttgggaaaggagggatgggattaggagggattggtttgtggttgtttgtttgggtgaggggttttttgttgtgggattaagttttgtttggtttgaagtttttgattttattagttatttttttaggtttattatatatatgggaagttggattttggttattttgaagtgtttagggttatttgtattatgttatagtagttttttaaaggttagggtggtttggggtttttttgaattttaggtttggttagggtttgattattttgtatttagtttttgatttagttatggtttgtgtttttagtagttttattaagatttagaattaataggtgtttgtgggatattttggggataagaggggttgggttttagggttattgttttggtttggtttagggtagttttttttaaggatttttgttttttttggagttgtgttggtttaggattgtagggtgtgagtttagattttggtttttgttttttttattgttttgttgttttgggagatttatagtgtgaggggttgttgggttatatgggttttggggggttttagagggttttggagttggagttagagttagagtggttgttttgtgttaagggagagggttagtgagtgttgttttttggttggggtggggtggggtgggtttttggttagttgtggggtggagagttgttttatttgttgggttttggttgaggttttgatgtaggggatgttgtagttttgggtgaggttttgagtttgttgagattttatagtgtgtgtagttaggttatatttgttttttattagtattatgggtatgttatttgagttttttatttgtttgatttgttttttgagaggtggaaagtgagagttggttatgggggttgtaggtgtagtggtatttaggatatgtgtagagaggataggaggtttttgtttggatgtagttggtttggttttatttgtgtggtgtgggtttttgggttagttttatggggtttatttgtattggtggatgtttttaaaagatttggtgttgttgatggtaaatatatataggaagttttttttggtgtgtatgtattggttttgtatggtgttgtattttttttggttggtggtatttaggatgtttaataggtatgtttttttattaatgattatttgtttttggtaggaattttgtaggaggatagggtttagggatttttttaggattttttgtggggggagtttatatagttagtttttttttggtattttttatgttttttatgttttttttttttttggggtgttgagatgagggattttttttttttagaggaagtaggagatagggttatagtattatgtaggggattaggggttgtagttagttttattttggttgtgttttgggtttgtttgtagtagttgttggtatttggatggtggtgttaggtttatttttatagtggggttgtatttgtttataaaatggttttggattagttggatggttagtgtatttttgtttatattgttggtgtttattattattagtttatattttgttattgttttttaggggtttgtggtttggggtttttttatagggttttttgttttatttgttaaggagggttttgtttagttaggtttaggtttagttttaggttttatagggtagttgttggtagggttatttgaagggtaaatttatagtggtttttgggttttaatgttaggtagtaaggattgtagtgtgtttatttgtgtagttgtaatttagtgtgtgggagggttgttgttttgtttttatttgtttttaatgatttagtgatgggaaaagggatttagtttttaaaggtagggttgatagttgagtgtttttaattatgtatttaaattagaagttgttgggttggtagaaaggttaaagggaggtgtttgagggttgaggttattgttttttagaataggtttggttatggtggagtgtgttatggtgtgtttgggtaggttagtgttagtttgtaggttttgtggtgttggtgtttttgataagtatttgttgagtgtttattgtgtattaggtgttgttgaggggagggtagatttgggtagtgttttgtatttttggtggggaattgggggtattttttagttatagaaagttggagaagatagaggagtttttgggaagtagggattgagtgataggaaggggttgagaagtggtgtgggagatttggagagggaaaaggtattggggttgaggtttttggtttggtttgtgatttgtgatgttgaattgggggtgtttgggtgtgttgtggttgtggttgtttttttttagatgtttttgggtgtgagggtgttgggtttgaggtttttgggtatgttggtgtggggattgtgtttagtgtgaggttatgggtggggtttggatttttgtaggttttagggaggaaggggtttttgtttgttgtagtttttgatgtttgtttatttgtgtttgtgggttttgtttggttttatttatttgttgttgttgttgttgttgttgtttatgtttgttggttttgtgtttttggtttgtgttgtgtgtattgttgttgtttgggggtgaggagggtgtgtggtttggttgatttttgtttgtatttattgtttataggtgtgattgtttttggggttagggttggggttgaggttggggtggggtgggggtgggggtgtgtggtttgttttgtgtatgggttttgtttgtggtgggtgtggtttgggttgtgggtgtagggtatgggtggtggagatttgggtgggtttgtgtatgttttgttttgtgtttgtttgtttgttaggtgtggtttattattggttgtgtgttattgggttttgttttattttggttggttgagtggtttgtttgttaggagttgtggttgggtggggtttttgggagtaatgtgggaggtggagttagtagggttgtggttttttggggttgggtttggttggagattggagttgagtttggggttgtttgaggaaggttagggagttggtgtttgggggtttggggtggtatttttgagtagggttttgggtttttttgggaataggttggtgagagaatttgatttagtggtgttggtgtattagaggttttttttgtgttggtagtgtggtgttgtttattgtggaggttttggggttatgggttggggaaaggttgggatttgttgggattaaggtgggatgtttggagttgggggtttttgggtggttgtggggtttggttgtttggttgtttttttgtgtaggtggagtggttgtgtattttatttattattatgtattttagtttttttatttttattgtaatttattttgaggatgtttgtagttttggtggggttttgggtggtgggtgtagttgtgtgttttggggttaggtgtgagaatgttttttttattattttttttttttttgggtttgtgtggtaggtgattttgtttgtttagtttttttaaatttgaggttttaatgttgtagaagtttagtgtggtttagttaaattgtatttataagttgttataggggagtgaagtgtttagggtttattttaagtatatagatgtatattttagtttttttaaatttaaaaagatatgtttttaatattttttaaaattgtaaaggaattagaaatatatttttattaaaaaataaaaagggttgggtgtggtggtttatgtttataattttagtattttgggaggtttaagtgggtggattatttgaggttaggagtttaagattagtttggttaatatgatgaaattttgtttttattaaaaatataaaaaattagttggttgtagtggtgtgtgtttgtagttttagttatttgggaggttgaggtaggagaattgttggaatttgggaggtggatgttgtggtgagttgaaattgtgttattgtattgggtaatagagtgttattttgttttaaaataaaaaaggtgttttatagttaggtaaattttgtttttgtttagtttagtgtttgttttgtttttttgtgttggttgttgttgatttggggttttatttatgtgtggttttgggggttttgtttgttgtttgtttattgtgtggttgtagttagagtttggtttggggtggatatgtatgaatgtgagtgagaagtggtgattggatggtgggtggtagtgtgttttgtgggttgggtatttgggtgtgttttggtgtttggtgtgtgttttttggtttttgggggtgttttttttggtgtttttttttgttgttggttttatttttaattgaaggttaggatggtaggttttggttttaggggtgatttttttatttgggaaaggtgggtgtgagtttttagtagagattgtttttatttgttttgtgtgggaagtgttaggattgtgaggaaatgtgatatgtgtattgtgatggtttaggtatggagttgtaggaagttggtatttgatgtgtttgtgtttatttaatttgagttggtggtgtgttatttttttttgggattgtttgtagtaggggtgtttatgtatgtgttagtttatgtggttttgttttagtgattgttgttaaggggtgtggtttagttgtatggaatttgagtttttggtgatttataaatatttgtgtatttaaatgaggtttggtttttgttgttatggtgtttaggttgtaattttgtggtggttggaagaatagtttggagtaggagatagtgtttggaggtggagggtgtttagggttgagttgttagggttggatat

SEQ ID NO: 522 - DNA, 6237 bp, Artificial Sequence; identical to SEQ ID NO: 520
  chemically treated genomic DNA (Homo sapiens)

SEQ ID NO: 523 - DNA, 6237 bp, Artificial Sequence; identical to SEQ ID NO: 521
  chemically treated genomic DNA (Homo sapiens)

SEQ ID NO: 524 - DNA, 6110 bp, Artificial Sequence
  chemically treated genomic DNA (Homo sapiens)
aataaaataaaaaagaaaaatatagtttgtttatggtaaagttttggtaagtaagtattaatatgttaattaaatttttttaagagtaatatttgaaaaataatgttatggttgggtgtggtggtttatgtttgtaattttagtattttgggaggttgagaagggtggattatgaggttaggagattgagattattttggttaatatggtgaaattttgtttttattaaaaatataaaaaaattagttgggtgtggtggtaggtgtttgtagttttagtgatttgggaggttgaggtaggagaatggtatgaatttgggtggtggaatttgtagtaagtggagattttgttattgtattttagtttgtgtgattgagtgagattgtgttttaaaaaaaaaaaagaaaaaagaaaaataatatgattattttattatttaagatggagttttattaagtttttagttatagtttatagtgaaaataatatgaatatgtattggaggttaggaagttaattttgaggatattaatattttattttttttgttttgttatgattatttatttttatttttttgataaatgttttagaggtatgtgtgtttttttttttatttatgatatatttaagtattggtttttagaaattttattgataattgatggttttttatttttttttttttgtagttttatttgtggttaaataataataatattaatttgagtagtatttgttattgttagtgtaaatattttgttgagattgtttgtataattagtgtatttgttttttgatggttatttttgaatttaaattgttgaattagtaagaagagataagttaagttgtagtttttaggaaaagaagattttttataagtttttgtgttataggagagtagatatgtaatgttttggaagaagtgtattgattagttataaatatttatatatagaaattttgtttgtttttattaatttgaaagataaagtgtaaagtttgattaaattgtttttttaaaattttaatgtatgaatgaatatttattatagtatattagttaagattgatattatatatgtatggttagagagagaggaatatatatatatatatgtatatatatatgtatatgtatatatatatatatatagagagagagagagagagagagatggagttttattttgttgtttaggttgagatatatatatatatatatatatattgttatatatatgtgttatatatattgttatatatatgtgttatatatattgttatatatatgtgttatatatattgttatatatatgtgttatatatatgttatatatatgtgttatatatatgttatatatatgtgttatatatatgttatatatatgtgttatatatgtgttatatatatgtgttatatatgtgttatatatatgtgttgtatatgtgttatatatatgtgttgtatatgtgttatatatatgtgttatatatatgtgttatatgtatgtgttatatatatgtgttatatgtatgtgttatatatatgtgttatatgtatgtgttatatatgtgttatatatatgtgttatatatgtgttatatatatgtgttatatatatgtgttatatatgtgttatatatatgtgttatatatatgtgttatatatgtgttatatatatgtgttatatatatgtgttatatatatgtgttatatatatgtgttatatatatgtgttatatatatgtgttatatatatgtgttatatatatgtgttatatatatgtgttatatatatgtgttatatatatgtgttatatatatgtgttatatatatgtgttatatatatgtgttatatatatgtgttatatatatgttatatatatgttatatatatgttagagagagagagagagagagagatggagttttattttgttgtttaggttggagtgtattggtgtagtttttgtttattgtaatttttgttttttgggtttaaatgatttttttgttttagtttattgagtagttgttattataggtgtgtgttattatatttggttaatttttgtatttttagtagagatggggttttattatgttggttaggttggttttgaatttttgattttgtgatttgtttgttttagttttttaaagtgttgggattataggtgttagttattgtgtttagtttatatatttttattttattaaatagaatagtagaataaaattagatatggtagttgaaaaggatgattttttgattattttaaatagagatttttaaattttaaaaattttagaaattaggaatttataattttattatataaatgtgtgttgttaaaatatttaagagtaatagtatgttttgtattaatagggataatatataagaaaaatagagatagttatataaaattatatattttttgatattttttgatagaaattttaaaagtagaggtgaaagatatatggattttggagttattgaagttgtgaaattttagtaaaaattatgttaaatgtgattttaaattaaatttgagaaatatttattgagaatttgttttatgtatagtattgtgttaggttttatagggagagtaagttatttaggattgtattttaaaatttgggtatattggtgtaaagggaggtgaatagtaggtgtaggtgagtgttagaggatttgatttaagttgggatttttttgtaggtaaaatggtgggtagtgagaagttttaggaagggggtgtttttgaatatgtgtgttgaggagggtgttttaggattttgagggagtagtttagttggattgaggttgtgttgtttttgggtttattatttttagatttggatttttgattttggagttatggtttaggatgtgaaaagattttatattggtattatgtttttttttaggtgggttgttagttttgggtgtgggttgtgttggaggttgaggtgggagtgatatggtgtggaggggtaagaaatgttggtattagatgtgttaagaaggagattttatgagtaattttttttttgggttattgtgttgttgtttattagtttttgggagggtgttaggataaaaggaatttttttttttttttagtatttaggtttaaggttgggtgtgggagttggtgtgttgttttttaggtaggtattgaagttatggtagttatgtaaataggtattagttgttaaagtttggttataggtaaggggggggtaataggtttttggtgttgtggggttttgtattttataatttttgtggttagtttgtgtggttattggtggtagttagtgggttgtgaaagtgagtttagtgtttttgatagtagtttatgtgttggggtggggtttgagtttgttgttttaaaaggtttgtgtggttggttttgtttttttggtgttgtgattggatttggtgggggtagtgttgatttgataggtgtagagagggtggggttgtgtatgtgaggttgggggttttgttgttgttttttgggttggggtatgagtggttgtggagtgtgggtggttgggtgtgaggggttgatgggtttgtgtgtgtgttgtttgttgaggttttttgggaaggaggagagtgtttgatgttgatttgtaggtgtagtttggtagttggtggtgtgttgagggtggaggtggtgtgtgtgtgtgtgtgtgtgtgtgtgtgtgtgtgtgtgtgtgtgtgtgtgtggagtttgggtgttaagggtgagttgttagtttttgggtgtgagtttttgttgttttttatattttttttttttttaggttttttttttatattttttttgtgtttttatggttgtggattgagtgagaatttttttaagtaggtgtggggggtgtgtggggtggtatgagataaaaggggtatgggggtaagtttgttatggttttttggagtttggggggtttgagtgggatttgtggtggtggtggtggaggtggtaagaaaagtttgagtgtttgtaatgttgtggtggagaggaggaatttgattattgtgtgtaggtatggtagtgtagggtgaggggaattagttttttgttggggttgagagttttgggtttttgtgtgggtttttgggggttttgggtatgatgggttgttgtttagtgtttttgtttatgttgtgttagttaaatttgtgagtgtgtagttttttggataggggtttgggtttggatattgttgtagttttggattttgtgttagttttagtgttgaaggtattggagggtagagtttggggtggggttggaggaggatttgttttgaatgtgtaatttagtgttagagtgaaagaggagggtaaggaagaagagtttttttatttaatgtttatttagttgttagtgagttttggataaagtggtagttattgtgattgtttattgtgttgtttttaaattagagtgtattttgttgttttggtttgtttatattatttttagttattttattttatatgttagttgagtgtttattatatgttagttattgtgtatgtgagtgtgtgtgtattatttattttttagttatagtgttagtgttggttttgtagttgttattaagagtgggattgtggaggatatttagtttttatgttaatgatttattttaaggtttgtttttttttaatgttttataattgtaaatgtagtattttttttagaaaaatatagaaataataaaagaataattattattgggttgggtgtggtggtttatatttgtaattttagtattttgggaggttgaggtgggtggattatgaggttggagtttgagattagtttggttaatatagtgaaattttgtttttattaaaaatataaaaaattagttgggtgtggtggtgggtttttgtaattttagttatttgggagggtgaggtaggagaattgattgaatttgggaggtggttgtaatgagttgagataatgttattgtattttagttgggattatagggggagattttgttaaaaaaaaaaaaaaagaattatttatagtaagtttagtatttagagataattggtttttaatatgttgatatattttttttaagttttatatttgagtattaagaaaaattgaaattttaagtattaattttttaggaatttttttgagttattaagttgttttaaaattatttttttttattagatttttaattattatttagtgatattttttttaagaattagatgatgatgaaattttttttttttttgtaatttttttgtatttttttgttattttttttgtgtaaaaatgtgtttagtattttaagtggaatatagataattattttaggatttaaatgtaataatttatagtgattttttaaaaaatatttgaattattataaatgtttatttagtaagaagattttttttattgattgtatttgtataatgtaattattatagtattttgagttgtaaatggtaaagtaatatggtatttgtttaatttgttgtttgtgttgtttaggatgtaattttttgagataaataggttgttaggtgttttaaaatataggtaaatatttttaaagtaggtaaatggaattataagtaaggttgatttttttaattataatatatagatattaaaaattgttttaaaaataagggtagttttaatatatatagtgttttttggggggtaatatatttaataaaagttttattagtttttgttaaattttataagggtagtgattttatttgttttttgtttagttttttttttttttttttttaaatttttagtatagtatttaatatttaaaaaatatttattgaatgaataattttagtgatgggtattgttttttttgtttttttatttttgttttggttggttttaggttatgtaatgattatgtgtgtttttattagagatagttgaaaagaaaaggatttgtattttaattttatttaaattaaattttaaattatttttaagaaattttaggaatgttatattgatttttggggatagttttttgtattagttgtatttttatga

SEQ ID NO: 525 - DNA, 6110 bp, Artificial Sequence
  chemically treated genomic DNA (Homo sapiens)
ttatgaaaatataattaatatagagagttgtttttagaaattagtgtgatgtttttaaaattttttaaagataatttaaaatttagtttaaataaggttgaaatataaatttttttttttttaattgtttttgataagggtatatatgattattatatgatttaaagttagttaagataaaaatggagaagtaaaaggaatagtatttattattgaaattatttatttaataaatattttttgagtgttagatgttatattgagaatttgaaagaaaaaaaaaaaaagattaagtaaaaagtagatagaattattgtttttgtgaagtttaataaaagttgatagagtttttattaaatatgttattttttaagaagtattgtatatgttgaaattatttttatttttaaagtaatttttgatgtttgtatattatggttaagaaaattagttttgtttatggttttatttatttattttaaagatatttatttatattttaaaatatttaatagtttatttgttttaaaaagttatattttagatagtataaatggtaaattaaatggatattatattattttattatttataatttaaagtgttgtaataattatattatataaatatagttaatgaagaaggtttttttgttagataaatatttgtaataatttaagtattttttaaaaagttattgtgagttattgtatttaagttttggaataattatttgtattttatttaagatgttagatatatttttatataagaaaaataatggaaaaatatagagaaattgtaaaggaagaaaaagttttattattatttgatttttaagaggaatattattaggtgatgattaggagtttgatggaggaaagtaattttaaaataatttaatggtttagagaagtttttaagaaattgatgtttagggttttaattttttttaatatttagatataagatttaaagaaaatatattagtatgttaaaaattagttatttttgaatattaggtttattataaatagttttttttttttttttttgatgaagtttttttttgtggttttggttggagtgtaatgatgttattttagtttattgtaattgttttttaggtttaattgatttttttgttttatttttttgagtagttgggattataggagtttgttattatgtttggttaattttttgtatttttagtagagatgaggttttattatgttggttaggttggttttgaattttgattttgtgatttgtttgttttagttttttaaagtgttaggattataggtgtaagttattgtgtttggtttaatagtaattatttttttattgtttttatatttttttgaaggaaatattatatttatagttataaagtattaaggaaaggtaggttttaaaataaattattgatataaagattaggtattttttatagttttatttttaataataattgtagaattagtattagtattgtagttgaaaagtggatagtatatatatgtttatatatataatggttggtatgtagtaggtatttaattaatgtgtgaaatgaaatggttgaagataatgtaaataagttaaaataatgaaatgtattttgatttgggggtaatatagtaaataattatagtaattattattttatttaaagtttgttgatagttgaatgggtattaaatgaaagagttttttttttttgttttttttttttattttgatgttagattgtatatttaaaataaatttttttttagttttgttttaagttttattttttagtatttttagtattggaattgatataaagtttagggttgtgatggtgtttagatttgggtttttgtttaaggagttgtgtgtttatagatttggttggtgtaatataggtgggggtattgggtggtagtttattatgtttgggatttttaaggatttgtgtggaagtttagagtttttagttttggtgggaggttggttttttttgttttgtgttgttgtatttgtatatggtgattaggttttttttttttattgtagtattgtgggtgtttaggttttttttgttgtttttgttgttattgttgtggattttgtttaggttttttaggttttgggaggttatggtgggtttatttttgtgttttttttgttttgtgttattttgtatgttttttatatttgtttaagggggtttttgtttggtttgtaattgtgggggtgtgggaaggatgtaggaaaggagtttggagggaggaagggtgtggaagatagtagggatttgtatttggggattgatggtttgtttttggtatttgagttttatatatatatatatatatatatatatatatatatatatatgtatgtatgtattatttttgtttttggtgtgttgttgattgttgggttgtgtttgtgggttggtgttaggtgttttttttttttttgagggattttagtagatggtgtgtgtgtgagtttgttggttttttatgtttaattatttatattttgtagttatttgtgttttagtttgggaggtagtggtaaggtttttggttttgtgtgtgtagttttattttttttgtgtttattaaattaatgttatttttgttggatttaattgtggtattagaggggtggggttggttgtgtggattttttaaagtagtgggtttaagttttgttttgatgtgtgggttgttgttaaggatgttgggtttgtttttgtagtttgttagttgttgttagtagttatataggttagttgtggggattgtgggatgtggggttttatagtgttaggggtttattgttttttttttgtttgtagttaagttttaatggttgatatttatttgtgtggttgttgtagttttagtgtttgtttagaaagtagtgtgttggtttttatatttgattttgggtttaagtattaagaagggaggagggttttttttgttttgatgtttttttaggggttaataaatagtaatataatggtttgaggggggaattgtttgtagaattttttttttggtgtgtttagtgttgatattttttgtttttttatattatgttgtttttattttagtttttagtgtagtttgtatttgggattgatggtttgtttaaggaggagtgtggtgttagtgtagagtttttttgtgttttgggttgtgattttggaattgggagtttgggtttgggaatagtaagtttaggaatgatgtggttttggtttagttgggttgtttttttagagttttggaatgttttttttgatgtgtgtgtttggaagtgttttttttttagagttttttattatttattgttttatttgtaggagggttttagtttgggttaggttttttgatatttatttatgtttgttgtttatttttttttgtattaatatgtttagattttagagtgtaattttaaatgatttattttttttatgggatttagtatagtgttgtatatagaataggtttttaataaatgttttttgaatttaatttgaagttatatttgatataatttttattgaaattttatggttttagtggttttaaaatttatgtattttttatttttatttttgaagtttttgttaaagaatgttagagaatatatagttttgtgtggttatttttattttttttatatattatttttgttaatgtagggtatattgttatttttgaatgttttaataatgtatgtttgtgtaataaagttgtaaatttttaatttttgaggtttttaaagtttaaaaatttttatttaaaatagttaaaaaattattttttttagttattatgtttaattttattttattattttgtttagtagaataaaaatatatgggttgggtgtggtggttgatgtttgtaattttagtattttgggaggttgaggtgggtggattatgaggttaggagtttgagattagtttgattaatatagtgaaattttatttttattaaaaatataaaaattagttgggtgtggtggtatgtgtttgtagtggtagttatttggtaggttgaggtaggagaattgtttgaatttgggaggtggaggttgtagtgagtggagattgtgttagtgtattttagtttgggtgatagagtgagattttatttttttttttttttttttttttgatatatatatgatatatatatgatatatatatgatatatatatatgatatatatatatgatatatatatatgatatatatatatgatatatatatatgatatatatatatgatatatatatatgatatatatatatgatatatatatatgatatatatatatgatatatatatatgatatatatatatgatatatatatatgatatatatatatgatatatatatatgatatatatatgatatatatatatgatatatatatatgatatatatatgatatatatatatgatatatatatatgatatatatatgatatatatatatgatatatatatgatatatatatatgatatatatatatgatatatatatatgatatatatatatgatatatatatatgatatatatatatgatatatatatatgatatatatatgatatatatatatgatatatatatgatatatatatatgatatatatatgatatatatatatgatatatatatgatatatatatatgatatatatatgatatatatatatgatatatatatgatatatatatatgatatatatatgatatatatatatgataatatatatgatatatatatatgataatatatatgatatatatatatgataatatatatgatatatatatatgataatatatatatatatatatatatgttttagtttgggtgatagaatgagattttatttttttttttttttttttttttatatatatatatatgtatatatatatatatatgtatatatatatatatatatttttttttttttagttatatgtatatagtgttagttttaattaatgtgttatgataaatatttatttatatattaaaattttaagaaaataatttagttagattttatattttattttttaagttaataaaagtaggtgaaatttttatatatggatgtttgtgattagttagtgtattttttttagaatattatgtgtttgtttttttgtgatatggaggtttataaagagttttttttttttaggagttataatttaatttgtttttttttgttagtttaatagtttggatttagaagtagttattaggaaatagatgtattggttatgtaggtagttttagtaaaatatttgtgttggtaatgataaatattatttaaattgatgttgttattatttaattatagataaaattgtagaaagaaaagagtggaaaattattagttattaataaaatttttaaaaattgatgtttgggtgtgttgtgagtgagggagagaatatatatgtttttgaagtatttattaagaagataaaagtgagtggttatgatagaatgagaaaagtgagatgttaatatttttaaaattggttttttagtttttagtatatgtttatgttatttttattgtgaattatgattgaaaatttagtaaaattttattttaaatgatgaggtaattgtgttatttttttttttttttttttttttttgagatgtagttttgtttagttgtataggttggagtgtagtggtaggatttttgtttattgtaagttttgttatttgggtttatgttgtttttttgttttagttttttgagttgttgggattataggtgtttgttattatgtttggttaatttttttgtatttttagtagagatggggttttattgtgttagttaggatggttttgattttttgattttgtgatttgttttttttggttttttagagtgttgggattataggtgtgagttgttgtgtttagttataatgttattttttaaatgttatttttagaaggatttagttgatatgttagtatttgtttattaagattttgttataaataagttgtgttttttttttttgttttgtt

SEQ ID NO: 526 - DNA, 6110 bp, Artificial Sequence; identical to SEQ ID NO: 524
  chemically treated genomic DNA (Homo sapiens)

SEQ ID NO: 527 - DNA, 6110 bp, Artificial Sequence; identical to SEQ ID NO: 525
  chemically treated genomic DNA (Homo sapiens)

SEQ ID NO: 528 - DNA, 6000 bp, Artificial Sequence
  chemically treated genomic DNA (Homo sapiens)
attgtttttttttatatatttttaatattttttagttaaatttatttaaatgtttgtattataagtatataattttttaagttattaagtttttaaaaatataaagttaaaaataaaaagtggaatatttattttttattttatggagttttttttatggtttatatgaatatttttgttataaaaatttttaattgtaattatatgtttttttattattattatatttaagaaaagtgattataattttgatattggttaatatttaatgtatatttaaattttttaagaatgttttttataggattttttttttgttgaatttttagattgtttttgttttgttttgtaatgtttatatattatgtttggtagttatatttttttagtttttattaatttagaagttttttttttatttttttaatattgatttttgtaaaggaataagaatagttgttttatagaatgttttatattttgggtatatttgtattaaattgaatataaatgggaggtgtaataaatgtaaaatatatattaaataggagatttagtataaaagagaatgtaaattattttattaattattttgattatatgtagaaaatttaattttttggatatattgagttttataaaatatatttataaaattattttatttttttatttttattttttattgttgttattagaaaattttaaattataaatgtggtttatatgatatatttattggatagttttagtttataagtttaattgtatatagattaaatgtttttgtagatatattaatatttgttaggtgatgttgtttatttaaaatttaagtgatgagttatttattatagtttattttattgtgagagatattaggtttgattatttggttaaggtgttaattgtaaaatttttaattggagaagtatattttttttttaattagtaaatattttgaagaaaatttttagatataatatttttttgatagtttagagtttattgataatttttgtttgaatttattataataatggaagttttaaaatgatagttggaatttttttttaaagattattgttttattttttttattttttatatttttttttagtttttttttttttagaatattaagtatttagtagtagtatttagtattttaaaattagttatagttatgatgttttttgatgtttaaattgttttagagttggttattggaagtattttttagatagttttagtgtgtttttgattattttattaaattttatttttttatttttaggtattataagatattttaggtttattttttattttttttgttttagatttggttgaaattagttattgaggggtttattttttttagggaggaatggtatttagaaatttagatttggtattaatagtgtttattgttattgttttttttagtggattgaaaatgaattattaaaagattatgaatttatattgaaatttttaatttaaatttaatattatttttaaaaatgtatttgatttttatatttgtatttttttttttatattgaaaagtttggttttttataatattaatgtgtttattaatttattttataatttatattatagtttttaatattattaaatttattagtttattttataatttattattaataatgaatttatttagtgaagttttaaatattttataaaggtagagtattatgattaaaatttattttaaataattattttttttatatgattatattattaatattatatatagatatttattgttagttaataatttaaatgtatttttgattttttgttttattagttaggttataaatgtgatgtttatatagttatttattggaagtaagagtttggattatagagtagattattagtagtatatggtttatgtgtgggtgattaatattatttgaaaagtagaagtttataagatagaaatatatatgagtatttgtttgtttggggtaggaaagttgagaaagaggtatattaagattaagggaaagaggttgggaagggtaaaaaggtgaaatgaaaagaggttggtgaatgattaagaatggttggataggataaataagttttaatgtttgatagtagatgagggtgattatagttagtaatatattgtatattttaaagtagttagaagatttaaaatgttattaatatatagaaatgaaatatatttaaggtgatgtattttttaaatatttggatttgattattatatattttgggtatgtaaaaaatgtttttatgtattttattttataaatatgtaaaatattatgtattattaaaagaaagaataaaaaagatagggaaaatgtatatgttgtgttttatttagttaataaatttttgttttaagtagggatattgattttaaaggttagtttgtgttttttaaaaataattaaaaataataatatgttatttattttagagttggaggttagaaataaattatttaaattttgtaattatgtaaattatgaaaatgaaataagttagttattttttattgtttagtttaaaaaagttttttttttttgtttttttattgtggttttttttaagatttattttgatttgaagagaaattgtagtttattagttaaatgtatgagttttaggtgtgttggaggtgagattaatttttagttttttgttgaagttagagagtagtaagagggagtgtttgttgttgatgttttagttgttttggttgtgatgggtattgtaggggtttttttgtgtgtggggtttttagtatttttatgaaggtagagttgggggtttggtagtgtgttttggattttgtttgttgttagtgtgatttttttttttggttttagttgttgtggatgatgtttttttttatttattgtttgtgggtttagagagtaggtttttgtattgtgtgggttgtgtgtgttttgggtaatatggtttagtgttattatggtttgggtgttgttttaggagtttttgagtttagatttaattttatttggtttttatggatttgttagaggattttatattatttatgttttaagaagttttttttttgtgaagattaagtttaggaaatttgaaagtttgatatttgggaattgttttatagtagtttttagttttgtgtgtttttattttgtgttttttggaatggttattaagatgtgaaattttggaagaagatattttgattttagtggaaagatttaaaggaaatgaatagtggtttttgtttttttgagtttggaagagttgttatttgaatgagtttaggttttttgtggtaaagagagtgaagtggttgtgtttagtttatgttttggtgttgtttttgtttagttaattagttttattatagatgattgtttttggtttggattgattgaatgttgattttttgagaaattgtgaaataggttgaatttttaggaggaatgttttggtttttgttgtatttttttagaaagggtaagtagagaaatgtgtattagttgaattattggggatattttaatttatgtagatatgttttttaaagtttatataagtttttatatttatataattataggatgtagttaagggaaatttttttgggatttgtatttaatatagttaatataaaaattttgatttttttaattttgtattatttttttgttttttaatatttttgaaaaggttaggagaaatttttttgtagtggtttttttttagtatgtttgatagtttttgagttatatttgtttattttttatttgatgataaatggaatgaaagaaaaaggaagttttaaaaaatatatagagataggtattttaaggtataaatgttattttaaagtgtgtaatattttaaaattttagatgttagattaatgtttgtgtttttttagggtattttaaatttttatattttaatttaaattagtaaaataaatatagtatgttttagtatattatattagttgtaatttttttttatatttattgttaatatttaatatttttttttgtttattatttattttaaattgaggaaaagtatgtgtaatttgtataatttaaaattgtaaagtaatgttaatttatattagagttttttttattttttatgaatatagaggaaataggtttgttgtattttttagtttatattttatgatttttatatattatttattagtttattgtataagtttagaagaagaaaattattttgttttttattgtatagtttgaggatgtttttattttttttaaataatttatattttaaagttataatttttttttatttttgattataaattttttttattttgatatattttgtttttggttttataatataatgaagtttttttttgtttttttttttttttttttttttgagatggagttttgttttgttgtttaggttggagtgtagtggtaggattttggtttattgtaagttttgttttttgggtttatattatttttttgttttagttttttaggtagttgggattataggtttttgttattatgtttggttaattttttgtattttttgtagagattgggttttattgtgttagttaggatggttttgattttttgattttgtgatttgtttgttttggttttttaaagtgtagggattataggtgtgagttatagtttggttttttttttttttttttttttttttttttataaattgttaattaggtttttaataggttattattttttttatatgttttaattgtatatgtaagtgtatagtattgtttattgtttaaaggtttaataataattttgtggtttatttggggtaaatgtaaaagtttttatttttattatatgtgtttttaattttatttgtgtttatgatttttgtttttatttttgttttgttttgttgttttattttattttttatttatgtaattttgttgtattttatgtatttttttgaatggttttaaattttttttaaatagtgtaggatataaatatagtgttatattgttatgttgattatattatttttataattttgagtattaggtaaagatttttattaaagatataagtaagttaaagattagaataatatagattttaaaaataagattttattattttattatattgtattttatttttttgttttattgatatgaaagtgtgaatataaaatatgatggatttaaaataaattagtttttgttatttttaatagtttttggttttttgaaagatattagttttgtatttgtgttattattatttttgttaagttgaatttggttgttttttttaagtttttttaatttttgatgaaatttatttggtttttttgtaagttgatatttatatatttttatttaagtggtgatatttttatttgaagtgattgttataatttgtatttttttgttttttgtttttatgtagttattttattaatttgtttatattttgataatattaaagatttgtttttttgttgtagtttgttttatatgtatttatgggagtaataatatataatgataataataataattaatatttattaattattggttatttattaggaattgttaagtattttaaagaaattaagttatttaatttttataagaattttatgaagtagttattatttttgttatttttatattataataaaagatattgaggtttgtattatttgtttagttatatagtaggtaaggtgttaattagtagttttttttttataattgtatttttaattattattttatattgtagtatattattataggatatattattttattgttttttttagttttatgaagtgttttttttttatgagtttattttggaaaatttgtaatggttttttgttatagattatattatatttaatagtttttttttagtttttaag

SEQ ID NO: 529 - DNA, 6000 bp, Artificial Sequence
  chemically treated genomic DNA (Homo sapiens)
tttaaaagttaagaggaaattgttagatatgatatagtttgtggtagggagttattgtaggttttttaagatggatttataaggagaaaatattttgtgggattggaaaaggtagtgaagtggtgtgttttatgataatgtattatagtgtaggatagtggttaagagtatagttatgagagagggattattggttagtattttatttgttgtgtgattgggtaaataatgtaaattttagtgttttttattgtaatatgggagtaataaaaatagtaattattttataggatttttgtaaagattaaatgatttaatttttttgaagtgtttggtagtttttgataaatgattagtagttaataaatgttagttgttattattattattatatattattatttttatagatatatatagaatagattgtagtagagaggtaaatttttaatgttgttagagtatagataagttggtgaaatggttatatgagagtggaggataagaaggtgtagattgtggtagttattttaaatggaaatattattgtttgaatgaaggtatatgagtgttaatttgtaaggggattaggtaggttttattagaaattaaggaagtttaaggagaatagttaagtttagtttgatagaagtggtggtggtataaatgtaagattggtgttttttaagaaattaaggattgttgaaagtagtaagagttagtttgttttaggtttattatgttttatatttatatttttatgttagtggagtaaagaaatggaatataatataatagaatggtagaattttatttttaaaatttgtgttattttgatttttaatttatttatatttttgatagagatttttatttgatgtttaagattgtagaaatagtataattaatataatagtatagtattgtatttatattttgtattgtttagggagggtttaaggttatttaaaaggatatataaaatataataagattatataaatgaaaggtgagataaagtaataaagtaaaataaaagtgaaaatagagattataggtataaataagattaaaaatgtatgtaatgaagatgaaagtttttatatttattttagatggattatagggttgttgttaagtttttaaatagtgaataatgttgtatatttgtatatgtaattagaatatgtggaaaaaatagtggtttgttagaagtttaattaataatttgtgaaaaaaaaaaaaaaaaaaaaaaaaagaggttgagttgtagtttatgtttgtaatttttgtattttgggaggttgaggtgggtggattatgaggttaggagattaagattattttggttaatatagtgaaatttagtttttatgaaaaatataaaaaattagttgggtgtggtggtgggagtttgtagttttagttatttgggaggttgaggtaggagaatggtgtgaatttgggaggtggagtttgtagtgagttgagattttgttattgtattttagtttgggtgataaagtaagattttgttttaaaaaagaaaaaagaaagaaaaataaaagaaaattttattgtattgtaaggttaagaataaaatatattaagataaggaaaatttgtagttaagaatagaaaaaaattatggttttgaagtatgagttatttaaagaaagtggaaatatttttagattatgtagtaaaaaataaagtgattttttttttttaaatttatgtaataaattgataggtaatatgtgaaagttatagaatgtagattagaggatataataaatttattttttttatgtttataagaagtaagaaaagttttgatgtgagttagtattgttttataattttgaattgtgtagattgtatgtatttttttttagtttgaagtaaatagtggataggaaaaaatattaaatgttggtagtaaatatggaaggaaattataattaatgtaatatgttaaaatatgttatgtttattttattaatttgaattaaaatgtaagaatttaaaatgttttggaaaaatatgggtattgatttgatgtttgaagttttaaaatattatatattttgaaatagtatttgtattttgaaatatttgtttttatatattttttaaaatttttttttttttttattttatttattattaaataaaggatgaatagatgtaatttagaaattgttaagtatgttgaagaaagattattgtagaaaaattttttttagtttttttaaaggtgttaggaagtagaaaggtgatatagaattggagaggttggagtttttgtattaattgtattaaatgtgaattttgagaaaattttttttaattatgttttgtagttatatggatatgaagatttatgtgaattttgaaagatgtgtttatataagttgaaatgtttttaatgatttagttgatgtgtgtttttttatttgttttttttagagaggtgtaatggaagttagaatattttttttggaaatttaatttgttttgtagttttttgaggaattagtatttagttaatttgggttgggagtagttatttgtggtgaggttgattggttgggtaggaatagtgttggggtgtgggttgagtatagttgttttgttttttttgttataggaagtttgagtttatttgagtagtggtttttttaagtttaaagaagtagaggttgttgtttgttttttttaggtttttttattaaagttggagtatttttttttaaaattttatgttttggtggttgttttaaggagtgtgaggtaggggtatgtaaagttgggagttattatgggatagtttttaagtgttaggtttttagattttttgaatttggtttttatgggagaagggttttttgaggtgtggatagtgtgaagttttttggtaagtttatggggattaagtggggttagatttagatttaggagtttttggagtagtgtttaaattgtagtggtattggattatgttgtttggagtgtgtatagtttgtgtggtgtggggatttgttttttgagtttgtgggtggtgggtgggaggaagtattgtttgtggtgattggaattgggagggagaattgtattggtggtgggtaaagtttagaatgtgttgttagatttttaattttgtttttgtggagatgttggagattttgtgtataggaaagtttttgtagtgtttattgtggttagagtagttggggtattaatggtgggtgtttttttttattgttttttggttttgatgggggattagaggttagttttatttttagtgtgtttgaggtttatgtatttggttaatgagttgtggtttttttttaggttggaatggattttgaaggggattgtaatggaggagtaaagaagaagaatttttttaaattgaataataaaaggtaattagtttgttttatttttatagtttatatagttgtgagatttgagtaatttatttttagtttttagttttgaaataaatgatatgttgttgtttttaattatttttaagaaatgtaagttagtttttggaattaatatttttgtttagagtagaagtttgttggttgagtggagtatagtatatgtattttttttgttttttttgtttttttttttaatgatatataatattttatatatttatgaaatggggtatatggaagtgttttttatatgtttggaatgtgtaatgattaagtttgggtatttgaaggatatattattttaggtatattttatttttatgtgttgataatattttaagttttttagttattttgaaatatataatatattgttaattgtagttatttttgtttgttattgaatattggaatttatttgttttatttaattgtttttagttatttattaatttttttttattttatttttttattttttttggttttttttttttagttttggtgtgttttttttttagtttttttgttttagataggtggatgtttatatgtgtttttgttttatgaatttttgttttttaagtggtgttggttgtttatatgtgagttatatgttgttggtgatttgttttgtggtttaggtttttgtttttggtaaatggttatgtaaatattgtgtttgtggtttggttgatgagatagaaggttaaaagtatatttaggttgttaattggtaataaatatttgtatataatattggtaatgtaattatatagggaaaataattatttaaagtaaattttgattatggtgttttgtttttatagaatatttaaaattttattaaatagatttattgttagtagtaaattgtaaaatagattagtaagtttaataatattagaaattgtaatgtaaattataagataaattagtaaatatattaatattataagaaattaagttttttagtgtaagagaaaaaatataaatgtggaaattaaatatatttttaaaaataatgttaagtttgaattagaaattttaatatgaatttataattttttaatagtttatttttagtttattgaaagggatagtaataatgagtattgttagtattagatttgggtttttaaatattatttttttttaaaagaaatgaattttttagtagttaattttagttaggtttgggataggaaaaatagaaagtgagtttggagtattttgtggtatttgaaaataaggaagtggagtttaatggagtagttgaaagtatattgaagttgtttggaagatgtttttaatggttaattttgggataatttgagtattaaagaatattgtaattgtaattgattttgagatattgaatgttattgttgaatgtttaatattttgagagaagggaaattgaaagaaagtgtgagaggtagagaaaataaagtaatgatttttagagaaaaattttagttattattttggaatttttattgttataatagatttaggtaaggattgttaatgaattttaaattattagaaaaatgttgtatttaagaattttttttagaatgtttattaattggaaggagaatatgtttttttaattaaagattttgtagttagtattttaattgagtgattagatttggtattttttatggtagaatggattgtagtaaatgatttattatttggattttgagtaaataatattatttagtaaatattaatatatttgtaaaaatatttagtttgtatataattaaatttgtagattggggttgtttaatggatatattatgtgagttatatttgtaatttaaaattttttagtagtaatagtaaaaaatgaaaataaaaagataaagtaattttgtaaatatattttatagaatttaatatgtttaaaagattggattttttatatgtaattaaaatgattaataagatagtttatatttttttttatgttaaattttttgtttgatgtgtattttatatttattgtattttttatttgtatttagtttgatataggtatatttaagatgtgggatattttgtaagatagttgtttttgtttttttataaaagttaatgttaaaaaaataaaaggaggatttttagattaatagagattaaagagatataattattaaatgtagtgtgtgaatattataaaataaaataaaaataatttaaaagtttaataaggaaaaaattttatggaaaatatttttgggagatttgaatgtgtattagatattagttaatattagaattgtaattattttttttagatgtgataatggtaggagaatatgtaattgtaattgaaaatttttgtaataaaaatgtttatataaattatgaaaaagattttatagagtggagggtaggtattttattttttgtttttaattttgtatttttgaaaatttgatagtttaaagaattatgtatttatgatataaatatttaggtagatttaattaagaaatattgagggtatgtgaagagaaatagt

SEQ ID NO: 530 - DNA, 6228 bp, Artificial Sequence
  chemically treated genomic DNA (Homo sapiens)
tttttttttttaaaagtttgaaataaaggaaattttttgtttttaggaatagttttaattagttatatatgtgaatatagatttagtgattgtttagataattttttattaatttaatgttgggatttttttgatatattgatttttttttttttttttttttgtttattattagtataagtagtttaaaaaaaaaaaaaaaaaaaaaaaaaagtttagatatgatattagattttttaattagataggtaagatgttgataatttgtagtgtttgaaagtaaagagaaatgaaggattattgagggtggaataatggtttttttttaattagtttttggttggtaaaaaaaaaaaaaaaaaatagttttaaaaattagaattgtgttttgtgggggtggatttgttgaattgttagttttattagttaatgaggtagtttgttaaatggagatagaaagattatttataataatgttatgttttgtgtgtgatttaaaaattaaattgagtggaaatttagtaaatattaaattgtattgtttattttttaattaatttgttataaattataaaataaaattattgaatatattggataatgtatgtttttttgaagaaaaagtattaaaattatttttgagatgaaattgatttagaggttgtttattttttttttattagagaaataagttgtagtttgaaagtttgaaaaaggtattgaaattttgggtgggatttttagaattagtgtgttgtataagttaataggtaatgttattttttttgtaagtttagtggagtattagggggtttgggattatatggttttattgttgatattgtttgtttttaatattaataggttagggatttaaggttttggggtagatgttatttaagtgaggatagaagtaaatattatgattgtttattgagttttttttttgtagagtataattagtataataggtgtttaaaatatataagtttagtttggtagaggggtaagagtagagaaggtgatttaaattttggtttagtgagggtttattttgtgatattgaggggaatttattgaaatttattgagatttattttttttatttggaaaataaaaaatatttgttttaaaaagggttagagtttatagtgaggtgttttatatatggtaaatagttaatgaaaattatatttgattagaatattgtagggtttataagaattaaattgatttattttaaaaattgaagttaagaaggtttaatgagtgattgtttttaattttatttagattttttgtttttttttttattttaaggatgtaagttttagttttaatattgtttttttgggattattataatgtagtttttttgttttaattttaaaattttttgtttattttagtaagtttgttgtgagaagtatattattttgatgtgataataaatatgttaatgttaatagaaatttttattaagtgtttattatttatttagtgtttattatatattaggtattgtttttttgttgtattattttatttaatttttataatattattttgaagtaaattttattatttttattttataggaaaaaaaaataatattgaaaggataaataattgttagaggggtagaattatttgagttggatatattggttttagaattatgtttttaataattattttattttggttttgaagtatttttgttttgtgttatatgaatttttttttgtgttatatgaatatatttagaggttgttatttagtgggtagagtttgggagtttttatttaatattggttattagggttaaggtgaggttatgaagtttatagttagtttattttagaatttaagttttttttatttttagttttaaggaattttaggtgttgagtatttttggattgttttttatgaagtatggggtagtttagatttttttaataatatgattttaattaatagttgttaaaattagtagtttagggtagaaattatattagtgttttttggtattgtgtatatttttagtttttatattagtgtttggtatataatagtgagatttgattggtgaataggtgattggataggtagatagataaatgggttaataaatggatggatggatgtatagttgtgaaagatgttgataataaagaagtgatatataatattttattattttttttattaggttatagttttttttataattttattattttggttatgttattttaaatagttattgtaaaatttaaagttatttatataaaagaagtaaaatttggaagtatattagttagaatagtattaaatagtttttttaaaaaagtaagaaaaaaaattttatttatttaattaatatatatttagggtttattttttgttaggtatttttttaggagtttaaagtataattgttaataaaaatattttgtttttttggtgagtgtatgttaatgggggagatagataaaaataaatatttttatatgtaatgtattaagttgtttaattgttatggagaaaaatttagtagagtgatatagttaaataatataggagtggaggttttgttatttaatattagatggttagttatttttaaattgagtaaaagttgtagtttatgttagaatgtgagaaaagaaaattaatattttttgggaagtagtaattgtaggaagataaggaattaggagatttggattagtattagagatgttttgtatagtaatttgataaaaagggagagattttttgtgatatatatattttttttatttttttttatagaattaatagttttgaaatttgaaggtgttagtgttttattggttttaaattgtgaagttgaatgatgaaagtattttttttgtaattagtgtagtaaaatgataggtagagaaattatgttgggaagaagtaaggttattagttgaattattttgattttggtttagaatatagtttagttttaatttttgtagtgtatttgttttttttattttggtttaagatttggagtgatgtgtttttgttttagagtatttttttttttgtgaggtttgaaatatgattattagtggttatgtatgtttggttttagtagtgaatggatatatgatttattatttagttatattttatttgttattttttttatttgttattggaggattttttttgttttttttttatggtttttatggatatttgtttttgagtggatgtagtattttgttgttggtaagtaagttttgttggaatttgtttttttttttttgggttgattggatgaagggatttgagaaaatggaatggttggtatttagggtaattttttattttattgggtgttggttttttttggttttgaattttatttttagttttgtggaaagagatatgatttgaaattagataagtggtaaattttagaatttaatttgtttaaagttgttttggtattttgttttgttttataaaatgtaaatataaaaagtgatgagtatgtgtggttaatatttgtgattaatatttaaagaaattggttatatgataaataatggaagtagtgaattaggagatgatattataaaaattattaatgataatattagagttaaaagttattttggttgtgagattttttttgaattttttatttgttttttgtgtataaatgatatttgtaattgtttttaattttttatagatttttgttattaatttatattatattaagtttttttagtgtttttggtattttttgtttttgtattagttattttttattttagatttttttttaaattttttgtataaggtattataaaataaaaatagttaaagttagaattttttaagattgatatgatttttatattgaaatatttatattgtgtaatttttagaaagttttgtttgtttaaagataaattgtggtagttagtgagtttttttatttgttaataataatttatttggtttagtatttggaggtgaaaaggtatatttatttaataataggtatttatagtatgttttttaagttttttttggtttatagagtaatagttttttgtaattttttttggtgattgttttgtattttgtttttttttaaggattttttttaaatattagtatggtattattgggatattattttaatttttttatattgtgttttttgtgtttttagttattttttttattatatttttagtttattgaaagtagggagtttgttttatttaagtagaatttttggtatattgtttttaaaaatagtaggggatgggtgtttggatggatgaatagattgatagataggtaaatagatgatagatttgtatttttgggatgttgattgtaattatagtattatattatttttgataaatagtgatttgatttgttgatgagtttttttttttgtgttttgaatttttggtttgaatatttgatttttatgtttttggaattgtttaaaaatttttttttatgtttttgaagtttaaattgaaagttgaagtagttaaagtggtgtattgattatttagagaaatggatatagtattagtatttaaaatattttgttgatttaagtgttgttttaaattatgtttatttaatatgtaaatgatataatgaagttatttttagttaataaatgaggaggtttaaatgattgataaagttattaaaattttatttatgagtttttgtgtttaattttgttgtttaattggtttgatagtatattttaataggttttttttttgagattagaagtatattttgtagatgtagttaagaagttgagatatgagtaggatttttatgttgaatgattaaatttggtagattgaaattttaaggtagtttgaaatttttaggtttttaaaagtaattttgggttttgggtttttttggttattgatttatttttatttatatttattttttttttttttttttttttttttttttttttttttttttttttttttttttttttttttttttttttttttttttttttttttttttttttttttatttatttatttatttatttatttttgagatggtattttgttttgttgttgggttagagtgtagtggtgtgattttgatttattgtaatttttattttttggttttaggtgttttttttattttaattttttgagtgattgggattataggtatgtattattatatttagttaatttttgtatttttagtagagatgtggatttattatgttggttagaatagttttgattttttgattttatgatttagttattttagttttttaaagtgttaggattataggtgtgagttattgtgtttggttttggttattattgattttaaggaaaatgtagagtatattaaatggaaaaatggttgagatatattatatttaagttttttttgtatttaaaatataaggtaattatttttattttatagttattaataaagtataagatgttattattgttagattaaattataatgtagttgttattttttagattaaaattggttatatagtggtaattgaatagatttaatttttgaaaagtgagggtttgaagtttaaaaaaagggtaaatagtggttgattttttttttgagggttttgtaaggagagtgttaagtaattgtattttaaaaggtgtttggagaaggggtagaaaaaggattaggtatagaaagtttaggttggaatattaaagattatttattttatattttaatattttgtattattattttttgttatagttgaagtatatgaaagttgtttagatggaaatgattaaaagaagttataatgaatatgattttgttagttggtttttaaagaaggaattgtttttgttaaagtttgtgtttttaaaagtttttagaaaaggataaagatttaaaaattaattatagatttggttaaaaataaatttaaggtttttatttatgtattgagattagtaggaaggtagttaaattttgtaaagatttaataattagtaatatatatatttgggtggaaaagttgattaatgtggaataaaaagggagtaaatatgttggagaatgattttgtaaagagatttatgttattgaattgtaggatttattgatattttttttgtaatttgtatatgttttgattttgtagtt

SEQ ID NO: 531 - DNA, 6228 bp, Artificial Sequence
  chemically treated genomic DNA (Homo sapiens)
agttgtagaattaagatatgtatagattataaaagagatattagtaagttttatagtttaatgatatgaatttttttatagagttattttttaatatgtttgttttttttttattttatgttggttagtttttttatttaagtatgtgtgttgttagttattgagtttttatagaatttggttatttttttattaattttagtatatggataaaaattttaaatttatttttagttaagtttgtggttaatttttaagtttttgtttttttttaggaatttttgaaaatatgggttttaataaggataattttttttttgagggttaattaatagagttatatttattgtggttttttttaattatttttatttgagtagtttttatgtgttttgattgtagtaagaaataataatataaggtattagggtatgaagtaagtaatttttgatgttttagtttgaattttttgtatttagttttttttttgttttttttttaaatattttttaaggtgtagttatttagtattttttttataaggtttttaagaaaaaagttagttattatttattttttttttgaattttaaatttttgttttttaaaggttgaatttatttaattgttattatataattagttttgatttagaaaatgataattgtattatagtttaatttaatagtaatggtattttgtattttattagtaattgtgaaataaaaataattattttgtattttgagtgtaaaagaggtttagatatgatatattttaattatttttttatttaatatgttttgtattttttttaaaattagtagtagttaagattgggtatggtggtttatgtttataattttagtattttgggaggttgaggtggttggattatgaggttaagagattgagattattttggttaatatggtgaatttatgtttttattaaaaatataaaaattagttgggtgtggtggtgtgtgtttgtagttttagttatttagagggttgaggtgggagaaatatttgaaattgggaggtggaggttgtagtgagttaagattatattattgtattttggtttggtgatagagtgagatattattttaaaaataaataaataaataaataaataaggaaggaaggaaggaaggaaggaaggaaggaaggaaggaaggaaggaaggaaagaaagaaagaaagaaagaaagaaagaaagaaagaaagaaaagataaatataaataaaaataaattagtagttaaagaagtttaaagtttaaagttgtttttgggaatttagaggttttaggttgttttagagttttaatttgttaaatttgattatttagtatgggaattttatttatattttaattttttggttatatttataaaatatgtttttgattttaggaaagaaatttgttaaaatgtgttgttaggttagttgagtaatggaattagatatagaggtttataggtaaaattttaatggttttattaattatttagatttttttatttgttagttaaaagtaattttattatattatttgtatattgagtgaatatgatttgaaatagtatttgggttagtaagatattttgagtattggtattatgtttatttttttggatagttaatatgttgttttggttgttttaatttttagtttgaattttagaagtatgggaggaggtttttaggtaattttagagatatgagggttaaatgtttaagttagaaatttgaaatatagaaggaaagatttattagtaaattgagttattgtttattaggaatgatatagtattatgattgtaattaatattttaaaagtgtaagtttattatttgtttgtttatttgttagtttgtttgtttatttaaatatttattttttattatttttgaaggtaatgtattggggattttatttaggtagaataagttttttgtttttggtgagttaaggatgtagtagaaggaatgattgaaggtatgaagagtataatatagaaagattaaggtggtattttaatgatattatgttaatatttgggggaagtttttgaagagaagtaaaatgtaaaataattattaggaagagttataaagaattgttgttttatgagttagaaaggatttggagaatatgttgtggatgtttgttgttaaataaatatgtttttttatttttagatgttaaattaagtaagttgttattaataggtggaaaagtttgttggttattatagtttgtttttaaataggtagaattttttaaaaattgtataatatagatgttttaatgtggaagttatattagttttggagaattttaattttgattatttttattttatagtattttatatagaaaatttaagggaagatttgggataagaaatagttagtatagaaataaaaggtgttaaggatattaaaaaagtttaatgtgatatgaattggtagtaaaggtttatgggaagttgagaataattatagatattatttgtatataggaaataagtaaaagatttagagaagattttataattaaaatagtttttaattttagtattattattagtgatttttatggtattattttttaatttattgtttttattatttattatatggttaatttttttagatattgattatagatattaattatatatgtttattattttttgtgtttgtattttatgaaatagagtaaaatattaaagtagttttgaatgggttgaattttaaaatttgttatttgtttagttttaaattatatttttttttatagaattaaaagtagaatttaagattaaaagaaattagtatttaatgaaataagaaattgttttggatattaattattttgtttttttaggtttttttatttaattaatttagagaaaagagagtaaattttagtaggatttatttgttggtgatggggtgttgtatttatttggaggtggatgtttatgaaggttatggaggggaggtagggaaagttttttgatgataggtggaaagagtaatgggtagggtgtggttggatagtgagttatgtgtttgtttattgttgggattggatatgtgtggttgttggtggttatgttttgggttttatagaaagaaaggtgttttggagtaggaatatattattttaggttttaaattaaagtgagggaggtaaatgtattgtaggagttgaggttgagttgtgttttgggttaaagttaagatggtttaattgatgattttgtttttttttagtatggtttttttgtttgttattttgttatattgattataggaaggatgtttttgttgtttagttttgtagtttaagattagtgagatattagtatttttaaattttagagttgttaattttgtaagaaaaaatgaaaaaaatatatatattataaaaaatttttttttttttattaagttattatataaaatgtttttaatattaatttaggttttttaattttttgtttttttatagttattgttttttaaagagtgttaattttttttttttatattttaatatagattataatttttatttaatttaaaaataattggttatttgatattaaatagtaaaatttttatttttgtgttatttgattatattattttgttaaatttttttttatggtagttaaatgatttgatatattatatgtgggagtgtttgtttttgtttgttttttttattagtatgtatttattaggagggtagagtgtttttgttaatagttatgttttaagtttttagaagagtatttgataagggatagattttgagtatgtattagttgaatgaatgaaatttttttttttgtttttttagggaaattatttaatgttattttaattgatatgtttttaaattttattttttttatatgagtaattttggattttatggtggttatttggagtgatatagttaagataataaaattatgggagaaattataatttaatgagagagatagtaaaatattatgtattatttttttattattaatattttttataattgtgtatttatttatttatttgttgatttatttgtttgtttgtttatttagttatttatttattaattaaattttattattatgtgttaggtattaatgtaagaattagagatatatatagtgttaaagaatattaatgtgatttttgttttgagttgttagttttaataattattgattgaggttatattgttaaagaagtttaaattgttttatgttttatgaaggataatttagagatgtttaatatttaggattttttgagattgggaatagaagaagtttaaattttagagtgggttggttgtaaattttatagttttattttggttttgataattaatattaagtagaagtttttaaattttgtttattgaatggtaatttttgaatgtatttatgtggtataaaaaaagatttatgtggtatgaaataagagtattttaaggttagaatagagtagttgttaagagtgtgattttagagttagtgtgtttagtttaaataattttgtttttttggtaattatttgtttttttaatgttattttttttttttgtaaaataagaataatagaatttattttagaatggtattgtgaggattaaatgaagtaatataatagagaaatagtgtttggtatatagtaaatattaggtaaatagtaaatgtttggtaagagtttttattaatattaatatatttgttattatattaaaataatatgttttttataataagtttgttggaatagataagaggttttggggttagggtagggagattatattatagtaattttaggaaaataatgttaggattaaagtttatgtttttgaagtaaggaagaaaatgagggatttgggtaaggttgagaataattatttattaagtttttttgattttagtttttgaagtgagttagtttgatttttataaattttataatgttttaattaaatataatttttattgattatttattatatgtgaggtattttattataagttttaattttttttaaggtagatattttttattttttagatgagaagagtaggttttagtgagttttaatgaattttttttaatgttatagagtaagtttttgttaagttagaatttgaattattttttttgtttttgtttttttgttaagttaagtttatatattttgaatgtttgttatgttggttgtattttatagaggaaaaatttagtgagtagttgtgatatttgtttttgtttttatttagatgatatttgttttagggttttgaatttttggtttattaatattaaaaatgaatagtgttaatagtgagattatatggttttaggttttttagtattttgttgaatttataaaggagatgatattgtttgttggtttatataatatattaattttaaaaattttatttaaaattttaatgttttttttaaatttttaaattataatttgtttttttgatgaaaagaaagtaaatagtttttgaattggttttattttagagatgattttggtgttttttttttaaaaaagtatatgttatttaatatatttaatagttttattttgtagtttgtagtaaattaattagaaaataaataatataatttagtatttgttgagtttttatttaatttgatttttaaattatatataaagtatagtattgttataaatggtttttttatttttatttgataaattattttattaattggtggagttgatagtttagtaaatttatttttgtagggtataattttgatttttaaagttgttttttttttttttttttattaattagggattggttgggaaaaaattattattttatttttaataattttttatttttttttgtttttaaatgttgtagattgttagtattttgtttgtttggttgagaggtttggtattatgtttgggtttttttttttttttttttttttttttaaattgtttatattgataataggtaaaaaaaaaaaaaaaaaaaaattaatgtgttgagaaaattttgatattaggttggtggaaaattgtttgagtagttattgggtttatgtttatatatgtgattgattaaggttatttttggaagtagagaattttttttgttttaggtttttagaaaaaaaga

SEQ ID NO: 532 - DNA, 6190 bp, Artificial Sequence
  chemically treated genomic DNA (Homo sapiens)
ttaagtttttaagaagtgtaagtatttattgatgaagaaataattagtatgtggttaaattatgggtttgttttataaattaatatttggattaagtaatagttttaattattgttattagtataattaatttatgatgaggaatgattaattgattagtgaatattgttatattataagaaatttatattattttttttatggggatttaaatattgattatttattttaaggtttaagtttattttttagttgagaattttaaggtaattatatattttatatttttttgtataaagaaagaaaatattgagttgtttaatttttattatatatagagagagatatattaatgttgttatttttgtgtaatgatatagtatagaggtaagaaatttggaagtagtggttttgtttaatgaggttgattttatagtttaagaaatgagaatgaatagaattttgaggatatttatttttatttttatttttttgggattagtgtatttttattttttggagagatgttaagtaagaatgtgtagtagttttttttggataatagatttttgtatatatatatttgttagtgatgttatgttttttatttttaatttaagttttttttgttttatttttaatatagttgttttttttttttttgtttaataattttttatttatttttattgtttggtaaaaatgaatttagtttttaaggaattttaaggattttaaataagtatttggagttataagttttatggattaagtagaaattggtatataatgtagtgttttgtgtatttttataattattttaatgatagtgtgttaaatgttttgtaaatttttttgtgtttttttgtttaaaatgtgtgttttttttgtagttaaagggttttttataataagtttttgttataaaatgatggttatataaaagagagaagagaggtgtaaaaataataaatatagatttagtaaaaattttatttttttattgttttgaattttttaatagtaagaattgagtttgttgggttgaaaattgttttaatgtatttttataaaaggatttttgatttggtaagtgtgtgtgatgtatattttttatgttatattataagtgttatttagtaattttattagatagggtagtgttttagtatggggtggggtgttttttgataggtttttaaaaggtttggatgttaatgtatattttaatattatttataaaaaggagattggagtagtgtttttttttgtattgggtaaggagattttttttttttgtttaattatttgtttgttttgttttgtgggagaattataagtaaatgttatagaggtagtggagaaaaaagggtgttttaatttttttttagagttttttttatttgatgtatgttgtattttttaaataagttgtgtaaaatggttgtagggtagattggtttttttttttaaagttttttatttggttgggtttatttgtaaatattgtatttattttttttagtgttttaggattggttggaaagatttttttttttgtaggttgggttagtgtgagagatttaaaaaattatttttttttaaaattattgtattttaataaaaggattgggtaggggttggaatgagagaaaattggttttttaaaatgtaaaattgttatatttaaattagtttataaaatatgtgtttaattatgtggtgggatgtgtgtaggtgtatgatgagagaggtaattaatatggttatttggggtgtaaggatgtgggaataggtaagtaatttttatattggatttttattttagggagttgggttttagttatagttttgagttgtgtgattttgggtaggttttatttttttggggttttgttttattagttgaatagtatgaggatgagttatagttaatatttgttttatgatatttatttagtattatataagtgttatttttgtttttttagttaatattgatgtgggtagtattatatgtttattttatagatgaggaaattgaagtttgaagaagttaaatatttattttagaatatatagttggtaagtggtagatttggaattggaatttagtttagtttgattttttaatttatgtttttgattattatattgtttttttaagtttagatttgaaattttattttttgtgtggttgtgtgtttgggataggggtaattaatttttgattattttatatgttgtatagaatttggagaggattttttaaagtaaatgaattttgaaagttggattgtagagtaaatgagtgtagttaatttagttaggggtttgtaagagggagaaagagaaaaagattgtggaatggaaagttttttaatttaagttttttttaaggggtagttattttttgttttatagtttagggtttgtatgtgttttttttggagtggaaaaatatataagttataaggaatttaatagatagaaaggtgtatagaggaatttaaagtgtgggttggggggtgaggtggtgggtgggaggtgagtgggtgtaggtggaatattgttttttaagttaagttgttgtaaataaaaaggtgtaaagggagagaagttggtgtttaatgtgagttaggagtagtgttttggttttttttttgtttattttaaaagtattttttgtattgtttttaaggtgagaaataggaaagaaaatgttggtttgtgtgtttgttgtttgtttttttggttgtttgtttttgtagggttgttgggagtttttaagttttgtgagaattttgggagttggtgatgttagattagttgggttatttgaaggttagtagtttgggtagggtttattgaaagtttatttgtatatattaggtaatttaattttttattttgtgtgatagaagtagtaggaagtgagttgtttagaggtaggagggtttattttttgttaaaggggggattagaatttttttatgtgagttgtttgaggattgggatgttgagaatgtgagtgatttgagtagggtttgtttgggtattgttggggtaggatttggaatgtatttggaaggttttttgtaagtatttatttggaaggagaatttgggatttttttgggaattttttgttttggttggattggttgagtaagtttggaaaatggtaaatgattatttggattaattataggtttttagttggtttgtttgttataatttatgatttggggttgggaaaaagattaatagtttatgtgttaaaaaaggggtagagtttgatggagttgggtggatttttttatgttatttgtttttatatttagaggataagtatttttgtagatatttagtgtaagggagattatgtttgattgtatggatgttttgttagtgagttttgggtaaattttggatttttatattgtgagtttgtttttttgtatgttttaggagaaagtttttaaagtatgttttagtggattgatttaaattgaatggtagtattggtatattgtttaatgtaggtttatttttttttttttttttattaagaaaaaaaaaattgttttttttgtatgtaataaagatgttggaaataaattgtattggtagtaagataaaggatttaatgatttaatgttgaaggggtgtgatatgttggtatgtatattgattttttttgttgaaaattttttgttagatgttttttttttaaataattttttttgtttttatgtttttttttttattaattttatagttttttgaaaatagtttttaaaatatgtataaaaatgtggggggtggggagtagagggtgattataagattttaaaatattttttaagtagggtaatttgatatattttgtagtttttattaaaatgtatgtagagtggaatttaattttgttgttttttggattagttattagttgtataggtttttttattttttgtgtattttaatagtttaaagtaattaaaatatgatattttttttgaaaggaatttagtttaattaaggtggttgttgtttttgaagtttataaattattagtttaagttgttgtttttaatgttttttttgttaaggaaaggtaatattttttagtattgattttgttgttatttttttaagttattttgttggtttaagaagttgttgttttgttagaaaattattggtaatgaatattttttggattgagttatttattatttttatattttgtagtttagtttggaatgtggatattagttaaaggaaaggaaatataagtggggtagtttaatttaaaaaaaaaatattgattattttgttatttgatgttgatatagtgttgaggtatgtatttggttaatagtagtttggttgtaggtttgagaaatgattaggagttttagaaaattttatttttgggtggttgtagtgggagtttgtaggatgttttgttgttttgatagtgatttagataaatggtttagttatttattaaaatgtttttagtattttatttgataatttattggagtattagtttgaaaatgatattttaaatttttgtttttaaagaggttaaagtttaattggaagaaattgagtttttttaataatatggtggtttatttaaagagagaagaaaaaggggagaggggataatgataggatttaaattgttttttttgaaatttttttttaagaataaagatttgttttttgggttgggaaattaataggtttgtagttgaaaaattaataattatttgatgttaatagtttggttgtttgatttaatattttgtagagttataagtagggtaaaaagaatattgtttttagaaggtgttttaatttttagttgttttttaaatgtttttttttttttggtgtttattttatttttggagaatttaaagaaattggagtgttataaaataattttttaatttaagaagagattttttagatttgttttttttgtagtaattaaaatagtatgaataatttttgttggaattttagggaattggggttttttgaaatttttttttgttagagaaagtggtaatgaaatatgttttttaatagaaggaaaaaatatgtttaggatttttgttaaaagttattagatttaatagagtttttatatgtagatatttttttttttgtaattaattttttaaagatgtttattaagttgtaagagtagggggaaaagttttgtttgtttttggataagttaaataagggatttgttttatttagggagagtgagtggtgaatgtgttatttgtttaaaattatttgataagtaagaagtgttgataatagtaaagtttagttaattaaagaaatttgtattagataaagtaaataaaggtatttgataaagggattttagaaattttagtgttttatttttgtaagtagggtaattagtttttattgtggttagttttataagagtttgaattttatattttaattttaggttaaatgaataaaatgtaaatattgtttgtgtttttgtagagttgttttatttttataaattattttatgatggttagttgttttaatgatttttttttttttttagtataaataaaattaaaatttttttttttttttttttttagagattttaataaatgttttgtgttatgtagtgtttggtttagggtggtatagttagttagggttattgaaataaaagtatattagggttatatttgtgtaagtaagaatataattataattttttttattttatttaatggttattttgatgagaagtagatttgtttttgtttttaatatagaggaaatagtgggtaaagaagaaaaagtattaaattttaattaaaattattttttgttttgagttttttttatggtgtgtgtgtgtatgtatagtaaataaagtaagatttttgaatatggagtatattattataagtttattttgaaaggtgttaaaatattttttttattttttttttaattttaaaggtagaaaaatgatatgttagttagttgttatttgtagtagtgtttgtgaattgttttttataagtatttaaagttaggattaggggattattaagggaatgtggtttaaatattatgattgatgattgtttttggaaggtataggagttattaaa

SEQ ID NO: 533 - DNA, 6190 bp, Artificial Sequence
  chemically treated genomic DNA (Homo sapiens)
tttagtgatttttatattttttaggggtagttgttaattgtaatatttagattatatttttttagtagttttttaattttgattttgaatgtttataagaagtaatttatagatattattataaatggtagttggttggtatattatttttttgtttttaaaattaaaaagaaaataaagggaatattttaatattttttaaagtgagtttgtgatggtgtgttttatgtttaaaggttttattttatttattatgtatatatatatatattataaaaaaaatttaaagtagaaaatagttttggttggaatttagtatttttttttttttgtttattgttttttttgtgttaaaagtaaaaatagatttgttttttgttaaaatagttattaagtaaaatggaaaaggttgtggttatgtttttatttatataaatgtagttttaatatatttttattttaatagttttaattagttgtattattttgaattaaatattgtatggtataagatatttgttagaatttttaaaaaaaaaaaaaaaaaaaagttttagttttatttatgttaaaaaaaaaaaaaaattgttggaataattgattattataaagtggtttatgagggtaaagtaattttgtaagggtataagtaatatttatattttatttatttaatttaaagttggggtgtgggatttaaatttttgtgaaattgattataataagaattaattgttttgtttataaaaataagatattggaatttttgaaatttttttgttaaatgtttttatttattttgtttaatgtaagtttttttgattagttaaattttgttgttattaatattttttgtttattgggtagttttaggtgaatgatatatttattgtttgttttttttagataaagtaaattttttgtttaatttgtttaagaataaataaagtttttttttttatttttataatttaataggtatttttggaaggttaattataaaaggaagaatgtttatatgtaaaaattttattaggtttaataatttttggtgaggattttgagtatattttttttttttgttaaaaaatatgttttattattattttttttaataagaaaaagttttagagagttttagttttttgggattttaatagaaattgtttatattgttttaattgttataaagaggataggtttgaaaagtttttttttggattagaaaattattttgtaatattttagtttttttgagttttttagaaataaaatgggtattaaaaaagaaaaggtatttggggagtagttgaagattaaggtgttttttgaaaatgatattttttttgttttgtttatggttttataaaatgttaagttagatagttaggttgttggtattaaatggttattgattttttagttataaatttgttgattttttggtttaagaagtaagtttttatttttaagaaaaagttttagagagggtaatttaaattttgttattgttttttttttttttttttttttttttttagataagttattatgttattaggaaaatttaattttttttagttaaattttgatttttttgaaaataaagatttaaaatgttatttttaggttaatgttttaatgaattgttaaataaagtattaaaaatattttgatagatagttgagttatttatttaaattattgttagggtggtgaagtattttgtaggtttttattatagttatttgaaggtgggattttttgggatttttgattattttttaagtttgtagttaggttattgttgattaggtgtgtattttggtattgtgttagtattagataataaaatagttaatattttttttttaaattgggttattttatttatatttttttttttttaattgatgtttatgttttgggttgaattgtaagatatggaaataatggatggtttagtttaaggggtgtttattgttagtagttttttagtaaaatagtaattttttagattaataaagtgatttggaaaggtggtagtagggttaatgttaagaaatattgtttttttttagtaaggaaaatattggaagtggtagtttgaattggtggtttatgaattttgggagtagtagttattttaattaaattaaattttttttaaggaaaatgttatattttaattattttggattgttggaatatataaggggtggggggatttatataattagtagttaatttaaagaatagtaaagttaaattttattttgtatatattttagtaaaaattgtaaaatgtgttaaattgttttatttgaagaatgttttaaagttttgtggttattttttattttttattttttatatttttatgtatattttaaaaattgtttttaagagattataaggttggtaaggagaggagtatgggggtgggaggggttatttgggaagaaaatatttaataggaaatttttagtaaagggaattaatatgtatgttagtatattatatttttttagtattaaattattaaattttttgttttgttattaatgtagtttatttttaatgtttttattgtatgtaagagagataatttttttttttttggtagaagaagggaaaaaaataaatttatattgagtagtgtgttgatgttgttatttggtttgggttaatttattgaagtatgttttgagagtttttttttggagtatgtaggaagatggatttgtagtgtagaaatttaggatttgtttaggatttattgatagaatatttatatagttaaatatgattttttttgtattgaatgtttgtaaaagtgtttattttttaggtgtggaggtaaatggtatagaaaagtttatttaattttattaaattttgttttttttttggtatgtaggttgttggttttttttttagttttgaattatgaattatgatagataagttagttaaaagtttgtaattgatttaaatgattatttattattttttaggtttgtttggttaatttagttggggtggggggtttttagaaagattttaagttttttttttaagtaaatgtttgtaaaaagttttttgaatgtgttttggattttattttgatggtgtttagataaattttgtttggattgtttgtgtttttggtattttagtttttaaatagtttgtatgggggaattttggttttttttttggtaaagaatagatttttttgtttttgaatagtttattttttattatttttgttatatagaatgaaagattgaattgtttaatatatgtgagtgaatttttggtgaattttatttgggttgttaatttttaaatgatttaattagtttgatattattaatttttaggatttttatagagtttaaaaatttttagtagttttgtaaaagtagatagttagagaggtaggtagtgagtgtataagttggtgtttttttttttattttttattttaaaaataatataagaagtgtttttaaaatgagtaggggaggagttgggatgttgtttttggtttatgttgagtattaatttttttttttttatgtttttttatttgtggtggtttagtttggaaaatggtgttttgtttgtgtttgtttgttttttgtttattgttttgttttttagtttatattttaaatttttttgtgtgtttttttgtttgttaaattttttataatttatgtatttttttattttagaaaaagtatatgtaagttttaaattgtagaatagagaatggttattttttgggaaaggtttgggttgggaaattttttattttatagttttttttttttttttttttttgtaagtttttggttgaattgattgtatttgtttgttttgtaatttagtttttgagatttatttattttgaaaaattttttttaggttttatgtagtatatagagtagttaggaattggttatttttgttttaaatatatagttatatagaaaatgagattttagatttggatttgaaaaaatagtatagtggttaagagtatgggttggggaattaaattgaattagattttaattttaggtttgttatttattagttgtgtgttttgggataagtatttaatttttttaggttttagtttttttatttgtaaaatgggtatataatattatttatgttagtgttaattgggaggatagaaataatatttgtatggtgttgggtaaatattatggaataaatgttagttgtgatttatttttatattgtttaattggtgaaataaaattttggggagatgagatttatttaaggttatatagtttagagttgtgattagaatttagttttttaggatgaaagtttaatgtgaaaattatttgtttgtttttatatttttgtattttaaatagttatgttggttgttttttttattatatatttatatatattttattatataattaaatgtatattttgtaaattggtttaagtatgatagttttatattttgaaggattagtttttttttattttagtttttgtttaatttttttattaaaatatagtaattttaagggaaaatgattttttagattttttatattgatttaatttataggaagaagagtttttttagttagttttaaaatattaagaaggatagatgtagtatttataaataaatttagttggatggagagttttaaaagggagagttaatttattttgtagttattttgtataatttgtttaaaggatgtaatatatattaaataaaggaaattttggagaggaattaaaatatttttttttttttattgtttttgtagtatttatttgtaatttttttataaaatagggtaggtaagtggttaggtagggagggagagtttttttgtttaatgtagggaagagtattgttttagttttttttttgtggatagtgttggaatgtgtattggtatttgggttttttaaaagtttgttagggggtattttattttatgttgaaatattgttttgtttagtggagttgttaagtggtatttgtggtgtaatatgaaaagtatgtattgtatatatttattaagttaaagatttttttatgaaggtatattaaaataatttttagtttagtaagtttagtttttgttattgaaaagtttagggtaataaaggggtgagatttttgttgaatttgtgtttgttatttttgtgtttttttttttttttttatatggttattattttgtaatagagatttattgtaagaaattttttaattataaagaaaatatatattttaagtaagagaatatagaggaatttataaaatatttaatatattgttattaaggtagttgtaaagatatataaagtattatattatgtgttaatttttatttggtttatgaggtttatggttttaaatgtttatttaaggtttttagagttttttggaaattgagtttatttttattggatagtggaggtggatgaaaagttgttagataagagaagaggaaatagttatattggaagtagagtaggagaaatttaagttagagatgagaaatatggtattattgataggtatgtgtgtatagggatttgttatttaggggaggttgttgtatatttttgtttaatatttttttaaagagtagagatgtattggttttagggaagtgaagatggggatgggtgtttttaaaattttgtttatttttattttttaagttatggaattagttttattgagtgagattattgtttttgaattttttatttttatattgtattattgtataaaaataataatattagtgtgtttttttttgtgtgtggtaaaggttgggtgatttgatgttttttttttttgtgtaagaaaatgtaaaatatataattattttgaagtttttaattgagaaatgaatttgggttttgaaatgaataattagtatttaaatttttatgaaaggaatagtatgggttttttataatatgataatatttgttagttaattaattattttttattatgaattaattatgttgatagtaataattagagttattatttaatttaagtattaatttataaaatagatttatgatttagttatatgttaattatttttttattagtaaatgtttatattttttgaaaatttga

SEQ ID NO: 534 - DNA, 6244 bp, Artificial Sequence
  chemically treated genomic DNA (Homo sapiens)
gagaatgttggagagaaagtggttaagaaaattgtttttattgaattttttgggttaattttgattgtaagtttttgaataattaaagtttgtgaggagatagttaatttttttattttttttatgttaatagtgaataattgtagatttttttttttttttttttttttttttttgttttttttttttttttttttgaatatttttgtttttttttgggattggtttagagtatgggtggttattgttgatttataggaggtattattgttattaataaagggtaatagtttttttttttaatatttatttatatttagtatttatttttaatattgattatggagagagtttttttgtgtttaaatattgtaatattgggggttttttaaagtataaaaatatatatttgtatgatggtattattaatatttttatggttttttattttttttttgtattggttttaagagttatttataaattttttagtaattgtatagtgttttagggttagagattggttatttttggtattgtgattagagttatttaatatttaaggtggtgattaatgtttggtaataaagtttttattgggtgttatgtgttttgggattttgagtgtgggtattttaggagtattttagtattgtgtgttagtattatggttgagagaatagttgagaaagtggttaagaggtggatttatgtgaatgttattgggaaatgagagattttgtttttaattatggttagtgtaatttgaaagtttaaaattagtttaaaataaaggtatttatttttattttatgtttatattttaggtttttaataatatgtattttttatatgtttatagaaagtagttaattgagttatttatggaaaggtttgtgggtttggttaatgaagtggaggagtattatattttagttggaaatatatttttagaatgttaaaatatttattttaaagtttggttttttggtgtaattggaggtatggtaatgtttttgtttagagattgggggttagggttagtaaggtatttgatttatatgtattttagaaggtttttattgttaaattatatttttttggaaaaattatttatgttttattttgtaaatttgatatttatatatttttgattggtattttattttagttgtaagattatgatttatagtaagtttgtttttttttttgtttggggtggtagtagaaagtatagggtattttttagtttttaagggtaggggtaaaggggttggggttttttttttttagtatagttttttttggttgtgttatattgttttttgtgagtagatagtaagtttttttttattttttattgttatttatttagtgttgtgtagtagtttagttgtgtgtttgttgggaggggttgttaagtgttttgtttattggttgttttttgaatttttgttattttatgtataaatatatttatatattttttttgtttagtttatatattgagttatttgtatatgtgagtatatttttttttttttttttatttttttggtttttgatttttataagtttatggaatatttttggaaagatgtttttgatttagtagggtaggtttgttttgatttttttttttgtagttttagtattttgagaaagtaatttatttttttggttagtgtttgtattttagtagggagatgaggattgttgttttttatgggggtatgtgtgtgtttttttttttttttaggatttgtaggattttttgtgttatttgtatataatttggtaggtttatattttttaagagttttatgaagtgttttttgtatgtgttttaaaaaggtatttgaaaattgaaagtgtgatttatggaaattaaattatttgtaaaaaattgttttggaaagtaatgattgttggttataaagggaaatatttgtgatgtatttaatgtgtttttaattttttatttgttgataatttatagttattaatgttaaatttgattttggttttagttatatttgtatattgtttaataatggtttatttttgtaagaattagataaaatgtatatttgatataaaatagttaaaaatgtaatttttagtaatagtaagtttggtatttagatagattatgaatattttgttagatattttgttgggtgtttgggatagtaattaaaataaagtattgatagttgtattagagtttattaggttgtagtaaaggaagtttatttaaaagtataaattatttaagattatagatgtatgatatattttatttattttttgtttttttaatatgtatatatatatatatatatatatatatatatatatatgtgtgtgtgtatgtgtgtgtgtatgtttaatttttaatttagttaaaaatttttttttatttgttttttatttggatatttgattttgtatattttagtttaagtgaattgagaagattgagttgtaggattaaaggatagatatgtagaaatgtattttaaaaatttgttagttggattagattgataatgtaatataattgttaaagttttggtttgtgatttgaggttatgtttggtatgaaaaggttatattttatatttagttttttgaagttttggttgtataattaatttgtggaaggtatgaatatttatgtgtgttttaattaaaggtttttttgaattattttttatatgagaatttttaatgggattaagtatagtattgtggtttaatataaatatataagttaggttgagagaattttagaaggttgtggaagggtttatttattttgggagtattttgtagaggaagaaattgaggttttggtaggttgtatttttttgatggtaaaatgtagttttttttatatgtatattttgaatttttgtttttttttttttagatgttttttgttagtttttttagttgttaaatatagttgtttgtggttggttgtgtatgtaattgtatattttattttatttgttttattttggttatagtgtagttttttttagggttattttatgtatatattatgtatttttagttaatgaggagggggaattaaatagaaagagagataaatagagatatattggagtttggtatggggtatataaggtagtatattagagaaagttggtttttggatttgttttttgtgtttattttaagtttagttttttttgggttatttttagtagatttttgtgtgtttttgttttttggttgtgaaatttagtttttatttagtagtgatgataagtaaagtaaagtttagggaagttgttttttgggattgttttaaattgagttgtgtttggagtgatgtttaagttaatgttagggtaaggtaatagtttttggttgttttttagtatttttgtaatgtatatgagtttgggagattagtatttaaagttggaggtttgggagtttaggagttggtggagggtgtttgttttgggattgtatttgtttttgttgggttgtttggttttattggatttgtaggtttttggggtagggttggggttagagtttgtgtgttggtgggatatgtgttgtgttgtttttaattttgggttgtgttttttttttaggtggtttgttggtttttgagttttttgttttgtggggatatggtttgtattttgtttgtggttatggattatgattatgattttttatattaaagtatttgggatggttttattgtattagatttaagggaatgagttggagtttttgaattgtttgtagtttaagatttttttggagtggtttttgggtgaggtgtatttggatagtagtaagtttgttgtgtataattattttgagggtgttgtttatgagtttaatgttgtggttgttgttaatgtgtaggtttatggttagattggttttttttatggttttgggtttgaggttgtggtgtttggttttaatggtttggggggtttttttttatttaatagtgtgtttttgagtttgttgatgttattgtatttgttgttgtagttgttgttttttttgtagttttatggttagtaggtgttttattatttggagaatgagtttagtggttatatggtgtgtgaggttggtttgttggtattttataggtatttgtgtttgtgttgtttgttggggtggttgttgtgtttggtaggagggagggagggagggagggagaagggagagtttagggagttgtgggagttgtgggatgtgtgatttgagggtgtgtgtagggagtttggggtgtgtggtttagtttgggggttttgtgtgtagtttgtgttgtgtttagagttaagtttttttgttgggtagttgaaaaaaatgtattttttatttatttattgtttgtgtgagaggtagatttgaaagtttgggttttttaataaaatatatgttggaaaattagataaagtagtagttatttgtgggggaaaatatttttaggtaaataaatatggggtgttttgagttatttgggaaggttttgtttttggtatttaaagttgggggtgtttggagttagtagagtttagtagagttttatttatttttttaatgtttttgtttaatgtgttttttaaatttttttttatttagattatttgattggaaatatgttagttatgatgatgattttttgggaagtgatttttgttatttgttttttttttttttttattttatgttttggggttttagagagtgattgggagttgaatgggtttgattttggagttagttggttgagtttgtgttggagtggattgttggtatgtgatttttgatagttggaaatttgtaggtgttttgtgagtttaaaataagttatatggaagtataagtgtttaaaaataattttttgttagtttagtgataagtttgttttatttggggagaatgttttggagtggtgtgtgggttagttagggtttgtgttttgtagttattgtggaaggagtgtggttggtttaggatataggagattattttgtgattttaatggtgaaggttgtgtgtttttattttaatttttttttttataagaattgttttttttttttttttttttttttttatttttttttgtttagtttttttttttgttttttgttttttgtttttttgatgggtttgtagagggattaggtgggtgtttttggtgaatatttttttaggtggttataggataggtgtattttggattgggtttggaagttttagggtgttatatggttgggttttgaattaggtattttttaattgtatattggtatttggattggtgtttttatatttttttgttttgtaagttgtggattagtttttgtttagtattttgtttttagggatatttatagtagaaggaaggggattaaagtgtagtttggttttagaggatattgaagggtagattttgggggtatttagtgtgtatttttagttgttttggagaaatttagagtattttatagttatgtagatttaagttgtttttatttaaaagataaataatgaataaaatttttaaaggttggtatattttaaattaattttatttgttttaatttagggttaaaatagagaaaaaggattttttttgtttatttttttttttttaaatggaagaataaagtatagtgattaagtttaattttatataatatttaaaattgtttgatgtgaaggaaggtattggtatgatgtgaattttataattttatgatggattttagaaattatttttttttttatttaatttttagtttttttattgtaaattaatgttgttgaattttaatgggtattaatgagattgttttttggtagattatttattgttttgttaataattataaagtgaatttggttaaatatagaggggattgtattttatttaaaattgtttattattttagtgataagtggtattagtgtaatatgttttattttatattttttgtattatatgatatttaaatatttttagaataataaaaaaagagataaggaatttaaaaattaaaaaaaaaatttgtataaatgggattttgtgtggaaatttagttttagaatgattttttttgtgttttattttttggattatttttttttttttgttagaattttgtttgttattatttagtaaggaaaagaagtatttatgtaagttttttatatggataga

SEQ ID NO: 535 - DNA, 6244 bp, Artificial Sequence
  chemically treated genomic DNA (Homo sapiens)
tttgtttatatgaagaatttgtatagatgttttttttttttgttggataataataggtagaattttaataaaagaggaaagataatttgggaaataaaatataggaaaaattattttaaaattgaatttttatatagagttttatttgtgtaagttttttttttaatttttaagttttttgtttttttttttattattttaagagtgtttgaatattatgtaatgtagaaagtgtaagatagggtatattatattgatattatttattattgggatgatgaataattttgaataagatgtgattttttttgtatttgattaggtttattttgtaattattagtaaggtagtaaataatttattaaggagtagttttattagtgtttattgaaatttagtagtattaatttgtaataaaagaattgaaaattaaatagggaagaaaatggtttttggagtttattataaggttatggaatttatattatattagtgtttttttttatattaagtagttttaaatgttgtgtggaattagatttaattgttgtattttgtttttttatttaaaaaaaaaaaggtgggtagaagaaattttttttttttgttttaattttaaattaaaataagtaaaattaatttgaaatatgttaatttttaaaagttttgtttattgtttgttttttgagtaaagatagtttggatttgtgtggttgtgggatgttttaaatttttttaaggtggttgaagatgtatattgaatatttttagaatttgttttttagtattttttggggttaaattgtattttagtttttttttttttgttataaatatttttggaaatagaatattgaataaaaattggtttatggtttataaggtagaaagatatagggatattagtttggatattagtgtatagttgggaaatgtttaatttaggatttagttatgtggtgttttgaagtttttaaatttagtttggggtatatttgttttgtggttatttaggaaggtgtttattagaagtgtttatttaatttttttgtaggtttattaggaaaataaaaaataaaaaataaaaggagaaattgggtaagagaaaatgggagggagaggagagggagaaagaataatttttgtagggaaaaaaattaaaatgaggatatataatttttgttattgaagttataaagtggttttttgtgttttggattggttgtgttttttttatagtggttgtgaggtgtagattttggttgatttgtatgttattttggggtattttttttgggtgggataggtttgttattgggttggtaggagattatttttaagtatttgtgtttttatatggtttgttttaaatttgtgggatatttataaatttttggttgttagaagttatatgttagtaatttgttttagtgtggatttagttagttaattttgaaattagatttatttaatttttaattgttttttaaagttttaggatgtggggtggggaggaggggaaagtgggtgataggaattgttttttagaaagttattattatagttgatatatttttaattaaatagtttagatgaaaggaaatttggggagtatattaaataaaaatattaaaaggataaataaaattttgttgagttttgttaattttaaatatttttaattttaaatgttaagagtgagatttttttaagtgatttaaagtgttttgtgtttatttgtttggaggtgtttttttttataaataattgttgttttgtttggttttttaatgtgtgttttgttaggaagtttgggtttttgggtttgttttttgtatggatggtaagtgggtggagagtatgttttttttagttgtttggtgagagaatttgattttgaatgtagtgtgggttgtatgtagaatttttgggttgggttgtgtgttttgggttttttgtgtgtatttttgggttgtgtgttttgtggtttttgtagttttttaggttttttttttttttttttttttttttttttttttgttgggtgtggtggttattttgatgggtggtgtgggtgtgggtatttgtagaatgttggtgggttggttttgtgtattgtgtagttgttgggtttgttttttaggtagtagggtatttgttggttgtggggttgtaggaaaggtgatagttgtggtggtgggtgtagtagtattagtgggtttggagatatgttgttgagtggggggaaattttttaggttgttggagttgaatgttgtagttttagatttggggttgtaggggaggttggtttgattgtagatttgtgtgttggtggtggttgtggtgttgaatttgtaggtggtgtttttggggtagttgtatatggtgggtttgttgttgtttaggtatattttgtttaggggttgttttagggggattttgagttgtggatggtttaggggttttagtttgtttttttggatttgatgtagtagggttattttagatgttttggtgtggagggttatggttatggtttgtggttgtgggtagggtgtagattgtgtttttgtagggtagaaggtttagaaattggtgggttatttggaaaaagagtatagtttgaggttagaggtgatgtagtgtatgttttgttgatatgtgagttttggttttggttttgttttgggagtttgtgggtttggtgaagttgggtgatttgatgggagtaagtgtagttttaggatgaatgttttttgttagtttttgggtttttgggtttttaattttaagtattggttttttgagtttatatgtattataaaggtgttggaggatggttagggattgttgttttgttttgatattggtttaaatattattttaggtataatttgatttggagtgattttaaagagtagtttttttgaattttattttatttgttgttgttgttggatagaggttgagttttatggttagggggtgggggtgtatgaggatttgttaaaggtggtttagggaagattgggtttaaaataaatgtgaaagatggatttaggggttggttttttttaatgtgttgttttatgtgttttgtgttagattttgatatatttttgtttgtttttttttttgtttgattttttttttttgttggttagaaatatgtagtgtgtatataggatgattttggggaggattatattgtaattgagatagggtagatagaatggggtgtgtggttgtatatgtagttagttatagatagttatatttagtagttgggggaattgatagggggtatttgaggggaagggggtggagatttagggtatatatataggaagagttgtattttgttattaggagaatgtaatttgttaggattttagtttttttttttgtaaaatgtttttaaagtagatagatttttttataattttttgagatttttttagtttgatttgtgtgtttatgttggattatagtattgtatttggttttattaggaatttttatgtgaaggatgatttagaaaaatttttggttagggtgtatatgggtgtttatgttttttataggttggttatgtaattaaaattttagaaaattgaatataaaatgtgatttttttatattaaatataattttaggttatgaattaaagttttggtaattatgttatattgttggtttggtttagttaatagatttttaaaatgtatttttgtatgtttattttttagttttataatttgatttttttggtttatttgggttaggatatgtagaattaaatatttagatgaaaaataaatagaaaaaagtttttaattgaattaaaagttaaatatgtatatgtatatatatatatatatatatgtgtatatatatatatatatatatatatatatatattaaggagataaaaaataggtgaagtatattatgtgtttataattttggatagtttatatttttgaataaattttttttgttgtagtttaatagattttgatataattattaatattttgttttaattgttattttaaatatttaatagagtatttgatgaagtgtttatggtttatttaaatgttaagtttattgttattaagagttatatttttgattattttatattaagtatatattttatttaatttttataaaaatagattattgttggataatatgtaaatgtagttgaagttaaaattgagtttagtattaatgattatagattgttagtaaataaagggttaaaaatatattaggtgtattgtagatatttttttttatggttagtaattattattttttaaagtaattttttatagatgatttaatttttataaattatatttttaatttttaaatgtttttttaaaatatatgtaaaaagtattttatagggtttttaaaaaatgtgaatttgttaaattatatgtaaatggtataaagaattttataagttttgaaagaaaaaggagatatatatatatttttatggagaatagtaatttttatttttttgttaggatatagatattagttagaaaggtaagttgtttttttaaaatgttaaagttatagagagagaaattaaaataagtttattttgttggattaagaatgtttttttagaaatgttttatgggtttgtagaagttaagggttgagagagtgagaaggaaggaaggaatgtgtttgtatgtgtgagtggtttagtgtgtgaattaggtagagagagtgtgtggatgtgtttgtgtgtggaatggtagggatttgggaagtagttagtaggtagggtatttggtagttttttttggtagatatgtagttgggttattgtatagtgttggatgaatggtagtggggagtgaggggagatttgttgtttgtttatagggagtagtgtggtatagttagagaaagttgtattggggaggagaaattttagtttttttgtttttatttttggaggttggaaagtattttatgttttttgttgttattttaagtaagaggaaaaataggtttgttgtgaattatagttttatggttaaaatagaatgttagttaaaagtgtatggatattaagtttataaaataggatatgggtggtttttttgaaagaatataatttaataataaaagttttttgggatatatgtggattaaatgttttattggttttagtttttagtttttgaatagaggtattgttatgtttttgattgtattaggaaattagattttggaataaatgttttggtattttagggatgtgtttttagttgaaatgtaatatttttttattttgttaattaaatttataaatttttttatgaatagtttagttgattgttttttgtaaatatgtgaaaaatatgtattattaaaagtttaggatatgaatataagataaaggtagatatttttgttttaaattgattttaggtttttgagttgtattgattgtgattgggaatgaggttttttattttttagtggtgtttatatggatttattttttgattatttttttaattatttttttggttatagtattaatatgtaatattgaggtgtttttagagtgtttatgtttagggttttaggatatatgatatttaatggaggttttgttgttagatattagttattattttggatattaaatgattttaattataatgttaggagtggttggtttttggttttgggatattatgtagttattgagagatttatgagtggtttttgagattagtataaaaaagaaatagaaagttataaaaatgttaatgatgttattatgtaaatatatgtttttgtgttttgaaagatttttagtattgtagtgtttgagtataggagagttttttttatagttagtattgaaaataaatattggatataaataaatattgaaaagaaagattgttattttttgttggtgatagtggtgttttttgtaggttaataatggttatttatgttttagattagttttagaaaaaagtaagagtatttagggagggaggagagaggaataggggaaaggagaaggaaaggaaaggggatttgtaattgtttattattgatataggaagaataagaaggttagttgtttttttataggttttgattgtttagagatttataattaaagttagtttaagaagtttagtaaaggtagtttttttaattattttttttttagtattttt

SEQ ID NO: 536 - DNA, 6199 bp, Artificial Sequence
  chemically treated genomic DNA (Homo sapiens)
tagtatttttggttttttgggttagtatgtttaggttattttattattttttggataatttgataggatgaaaagtgttggttttagaattatgttaattttggtgtaaatttttatttagatatttaattggttgagggatatttggggttagttatttaggtataaagatttttatgtgtaaattgggaataaatttattttttttggaaggttattgtagaatatatgaaatagtatgttgtttttatgaaggaaggtattatgtgtggtttatggttagtatttagtatattgttagttttatagtagatgtttaagaaatattggttgtataagtagaggatttaatatagtgtttagtatttaataggtatttaataaagattaatttttttttttttttttgtagggatgttaaatttagaatatagttttgagtagaatagtttataatttttatttttaaggattttttagttgtagtttttaggataattatttgatgttattatagtagttagttggtgtagtttggaataggataatatttgagaggaagggggtgggtattttttatttaggtttaaaggattttgagttaaatgttttttattttttggttttagggagagaatgtgtgtttagaaatggttttgatataattggtttttttatatatattttttttgtttattaagaggaagtgatatgtggtatgttgtttaataggttttgatgatttttaagtaaagagatggaagatggaattttaattttatggagatttaataaatttatttagagttgttgtgtttaagattttttttatatgtattattgggtagttggtaattttttggtaggggtagttttttgtagaggttggttagtagattaggtattttttttagattgttttttgtttatagttggtaataatttatttggtattaggattattggttaaagataatagttaggtaaagtgggtaagtagttttaatttttatttggagatgttttagagggtgtgtttgtagtattggaattttgttttttttgtaattagttgaataaatatttgttttaaaagagaattaaagtaggagggaataggagaggttattgtataaattaataggaattatttaattatttatttttttagagagtttatttatagaatggtttttaagtttagttagttagtttaagagaatttattatttttattttttttgattttattttagttatttgatttttattgatttgatttttttgttttttataagagttggtatagatgagttgaaattgtaaagaaatgtaaaatgagagagggggtggggttttagggtaaatttaggaggttttttgtttagtggtaaagtgaagtgtttgttatattttaggtttagtttatagatagttgtatttttgatatttttgagtttatggtgtatgtttttttttattttagtttttttaatggatgatttattttttatagtttgatgtttttttgtatattttgaggggatagaatattttttataaaatttgtatttttgttaggtagggagataagtaagaaaataggattgaatttattgaagagtaaaatttgtttatagtgattattggtaaagaagtttttattattattttattttggtttagtgatgggtaggagaattttttttttttggaaagggaatttgttggtgttagttattgtgtttatattattgttaagatttataatatattgtaaggtaaggagagtttgttatattttttagtgaaagaaattaagttttaagaaagtaatttagtttgtttaaggttatatagttagttatatgatagaattggaatttatatttgtatgtgaagtttgttattaaattttaatgttttatagagttttaaagattaggtttttgttttgttagtaaatagtgtttgaagaggtttttgggttttggttggaaagtaataggtagagtagttggagttttttaattgattttaggtaatgaggtgtaaagttttttggtttaatgtgtgatatagtaagtgttttataaataaggtaattatgtagaaagttgtatattttgggggaaatgaatttagggggtgtagtgtaaatataatttgtatagtttatattgttttaaaatttgataatttttagttatttaatttagtgggaatttttgtttatggttatgttttagtttgagaggagagtgttatatatgtaaattttgaaataaagggaatttgatttgggggagagaagtttaggataggattgagattttttggggggaatagatggagaggtttgtgggttattgatgtttattattttttttaggtattatatttattatttttttgtgtgtgaattattgtataaggtaagggaaatattgaattaattttttatttttataggtttgggatttaatgaatatataggttatagttttttttgttgagaaattggaatataagtatggaatagtggagttatgggggtgattagggtgaaagatgtttgatttttgaagtatagggttatttgtatttttaaggagttaattttttgtggtgaaatgaggttagttaggtttttttaattattaatgtttttaataattatttaatataatagaaagagatatagaagaagggttgttggggatttttgattagaggttaaagaaaagggatatataaggggtttggtttttatttagttgttgtttttttggatttaaggttttaggtggttatttaggtaagtggttatttaagttgtgatttgatttattaatatttgtatttttttgtttatgttttttatgtatagtgttttgttgaaggagaaaaaggttataatgtgattttagtttattttattttggaagagtttatttattatttgtttaaagttttgatatgttgtttttggggtgatgtggagttgggatgttaggttattgaatgtttgttggtattgtagtttaaatttgttgtttgttttttttagtgtttgttttattgttgttatggggattattttttgggtatttaaattgttgttgtggttagtggttttatttattgtggggttgtttgttaggtgttaggatgggttgttattgatggtattgggggtttttatttttgatttagttttttttggggttttagttttgtttttttttatattattaaattgattttagttgtattttttttgggaaagtttgtaggagagaaagttaattattagtttttggttgttttgagatatttttataatagggatgggtttaattagtttattgtttaaaatatttgtttatttattgagttttgtttttggttagtgatttttttttaagatttaaagttaagataagattttgaagggagagaaagagttttaggaaaaaaaaataattaatatgtatgttatttattttaaaaattttattttttttttaggtattagaattggtttttttgtgggttttatgaaggtttgggtttaggttttaagatattttatttaagttaaattgaaagtattagtggattttgaattttttattagttttttttatttttgttttttttgaaatgttttttttggaaagttattttttgggtagttttttttgttttatttttgtttttttgtattatttatatttaaatttgttttaggtaaaggtaggtaggtgtagtttttggaagattttttgtattataggttgggagaggaggtggttgtggggatgttggtaatttagttggttttgtggtggttggtaaaaaaattagttttggttggagggattatgtgatttggtaggttgggagtttagaaggtgatataggaattgtgaagtttaggaattagtttttttgtttgtttttttttttattgtttggattgagggtggttgttttgtagttgtggttttttgttatttgggagtttagtttttttttttttgtatgttttttggttttttgttttttattgggagttaggagtatttttttggaggtggttggtatggatttagttggtttttgttttttttttttttatttaagtattagtttagggtgaggtggaggtgtttgaaattttaaagggattttttaatggggtttaaggttttagtgagggatgtagggagggggaaattgttttagatttgtaatttgattttgggaaggttatttttaggtttgtttgtgatgttgaaggttggagatttttaataaatgttgttggtttgttttgaattttttaaaggtttagaatgtggtagttggggattgttgggttttttattttttgtttggatataatggttgttggtgttttgtataaagattgggtgagggtgaggtgttgggtttttttttaggttaggaagaggggttgaggtttgtttgatggttttatagttgagattatgtttttttggggataggtttaaagtggttttttggtgtttttgggagggttttggggttgggggttgtatttttttggagtttagggtgggttggttgtggtttagtggttttttgagtttattaggttgggtatttgttgagttattgttttgttgttaggtaattgtttttttttgggggtgttttttagatttttttgagaggaggggttttgtttttggtggtttgttttagtgtagttaattagtgagtttagttggtatggaagtgggatggtgaaggtttttattgggtgtaatggttgttatgtataggggaggtggtgtttttatttgtgagttttgtgagttgtggggggttatatttttttttattggtttggtagtttttagatgtaagagttttttgtggttgagttttgtgttgtggatttgggttggtttatttggttgttggtttatttggttgattgtttgtgttgttttttttgaataagttggttttagttttttttgaagagataggggaatttgtaagtttagttatttttggtgttgtggtaatgtgtgtgagtttgagatgtaaagggagtgtgtgttttgagtgattggtattaggattggggagagattgtttttttgtggtagatttggggaattgggaggtgtaaaaaattaatatttataattatatttttatttatttatttagttagttagttagttatttattagttaattagtttattttatttgtttgttagtttatatatagaagaagtattgttttgtggttaagtattttgtttggattttaattttgttagttaggtaagttttttaattgttttgtgttttaatgtttttaattgtaaaatgggtaatagtattaattttttttgttgagttattgtgatgattaagagagttattaattgtaaattttataggataggttgggtgtggtggtttatgtttgtaattttagtattttgggaggttgaggtgggtggattatttgaggttaggagtttaagattagtgtggttaatgtggtgaaattttgtttttattaaaaatataaaaaattagttgggtgtggtggtgtatgtttgtaattttagttatttgggaggttgaggtagtagatttgtttataggagaattgtttataggtgtgagttattgtgttttgttaatttttttatattttgaattatatagtgtgttattaaatgttttatttttgttaattagatgggtaaaaattgaaggtatttttatatttttttttttattatgaatgaagttgagtaatttgttatattttttagtttttttttggagggtggtggattttgtattggtgaattttttttatattgtttattttttttttaggtggtttttttgttgaattttttttttatttttttttttttttttgttattgttgtttgtttgagatggagttttgttttgttgtataggttggagtgtagtggtgttattttggtttattgtaaattttgtttgttaggtttaagtgattgttttgttttagtttttttagtatttgggattataggtatatattattatgtttggttaatttttgtatttttagtagagatagggttttattattttggttaggttggttttaaattgttgatttt

SEQ ID NO: 537 - DNA, 6199 bp, Artificial Sequence
  chemically treated genomic DNA (Homo sapiens)
gaggttagtagtttgagattagtttggttaaaatggtgaaattttgtttttattaaaaatataaaaattagttgggtgtggtggtgtgtatttgtagttttagatattagggaggttgaggtaggataattatttgaatttggtgggtagagtttatagtgagttaagatagtattattgtattttagtttgtgtaatagagtaagattttattttgaataaataataataataaaaaaaaaaaaaaaaatgaggaaagagtttaatagaaagattatttgaaaaaggggtaaataatatgaagaaaatttattaatataagatttattattttttaaagaaagattaaaaaatatgataaattgtttaattttatttataataaaaaaagaaatatgaaagtgtttttggtttttatttatttaattggtaaggataaaatatttgataatatattgtgtggtttagggtgtaaggaaattggtggggtgtggtggtttatgtttgtaaatgatttttttgtaagtgagtttgttgttttagttttttgagtagttgggattataggtatgtgttattatgtttagttaattttttgtatttttagtagagatggggttttattatattggttatgttggttttgaatttttaattttaggtgatttgtttgttttggttttttaaagtgttgggattatgggtgtgagttattgtgtttggtttgttttatggagtttataattaataatttttttaattattataatagtttaatgagagaggttggtattattatttattttataattgaggatattgaagtatagagtagttgagaaatttgtttaattagtagagttagaatttagataaagtgtttaattataaggtgatgttttttttatatataaattgatggatggatgaaataggttgattgattgatgagtgattgattgattgattgaatgaataaatggaaatgtgattataaatgttgattttttgtgttttttgattttttagatttattgtgagggggtgatttttttttggttttgatgttagttatttaaggtgtgtattttttttgtgttttgggtttgtgtgtgttgttgtggtattggaagtgattgagtttgtaagtttttttgtttttttaggggaaattgaggttggtttgtttgggagagatggtgtgagtagttagttaggtaggttggtagttaggtaggttggtttgggtttgtggtgtggaatttggttgtgaagagtttttgtgtttggaagttattgggttgatgaagggggatgtggttttttatggtttgtggggtttgtaggtgagagtgttgttttttttgtgtgtgatagttgttgtgtttaataggagtttttgttgttttgtttttgtgttggttgggtttgttgattggttgtgttggggtggattgttgggggtgaggtttttttttttaggaaggtttagggggtgtttttgggggagggtggttgtttagtaatggggtggtggtttggtgggtatttggtttagtgagtttgagaagttgttaggttgtagttggtttattttgggttttggagaggtgtagtttttggttttggagtttttttgggggtgttagaaagttattttgggtttgtttttaggaaaatgtggttttagttgtggggttgttgagtaggttttgatttttttttttgatttgaggagaggtttagtgttttatttttatttagtttttgtgtagggtgttggtggttattgtgtttgggtggggaatggaggatttggtaatttttaattgttatgttttgggtttttggggaatttagagtaaattagtggtatttgttgggggtttttggtttttaatattatagataggtttgggggtggtttttttaaagttagattgtagatttgaggtagtttttttttttttgtgttttttattgaaattttgaattttattgagaagtttttttagggttttggatgtttttattttattttgggttggtgtttaaatagaaaaaagaaaaataaaaattaattaaatttatattagttatttttgggagagtatttttggtttttagtaggaggtggagagttaaggggtgtgtaagagagagggggttgggtttttgggtggtaggaggttgtggttgtggagtggttgtttttgatttgggtgatggaggaggaagtaagtgagggggttggtttttgagttttgtaatttttgtgttgttttttgggtttttagtttgttgggttgtatgatttttttggttggagttggtttttttgttagttattgtgaggttggttgagttattggtatttttgtagttatttttttttttgatttgtgatataaaagattttttgggggttgtatttgtttgtttttgtttaaggtggatttgaatgtaggtggtgtgggggagtgggagtggggtgggggggattgtttagggagtgattttttgaggaaggtattttggagaagatgggggtagaaaaggttggtgggagatttagagtttattggtgtttttgatttgatttaagtgaagtattttggaatttagatttagatttttgtaagatttataaagaaattagttttggtatttggagggggaatggaatttttagggtaaatggtatgtatattaattattttttttttttgaagttttttttttttttttagaattttattttggttttggattttagaagagaattattaattagagatgagatttagtgagtgagtaggtgttttggataatggattggttgagtttatttttattataaaaatgttttagagtaattgggagttggtggttgatttttttttttataagtttttttagaaaggatatagttggagttagtttagtgatgtggaagagaataggattgaggttttagaagggattgaattggagatggagatttttagtgttattaatggtaatttattttggtatttggtagatagttttgtggtgaatggagttattggttatagtagtagtttggatgtttgggaggtgatttttatggtagtagtaaagtaagtgttgagggaggtaggtgatgagtttgaattgtggtattggtgggtatttagtgatttgatattttagttttatattattttagggatagtatattagagttttgaataggtagtgaatgaatttttttgggatggggtaaattggggttgtattgtggttttttttttttttggtggggtattgtgtgtggaaagtgtagataaggagatgtaggtattggtgagttggattgtagtttggatggttatttatttgaatgattatttagagttttggatttaggagaatggtggttgggtaagaattaagttttttgtgtgttttttttttttggtttttggttagagatttttaatagttttttttttgtatttttttttgttgtgttgggtgattgttggagatgttgatagttgaggaaatttgattggttttattttattataagaggttaattttttggaaatataaatgattttgtgttttagagattaggtattttttattttggttatttttatgattttattattttatatttgtgttttagttttttagtaaagaaaattgtagtttatgtgtttattaagttttaaatttgtgagggtaggaagttagtttggtgttttttttattttatataatggtttatatataaaggggtgatgagtataatgtttggagaagatgatgagtattaatgatttatagatttttttatttgttttttttaaggggttttagttttattttgggttttttttttttaaattaagttttttttattttaaagtttgtgtgtatggtattttttttttagattagggtatggttataggtaggagtttttattgggttgaatggttgagaattgttagattttggggtagtgtaggttgtgtagattgtgtttgtattgtgttttttaagtttattttttttaaagtgtgtgattttttgtatggttgttttgtttgtggagtatttgttgtgttatatattaagttaggggattttgtattttattgtttggggttggttggggagttttagttgttttgtttgttattttttggttagagtttaggggtttttttaagtattgtttgttggtaaagtaagaatttagtttttggggttttgtgggatattgagatttagtaatagattttatatgtaggtataagttttagttttgttatgtaattagttgtgtgattttggataggttgggttatttttttgaggtttagttttttttattaaaaaatgtggtaagttttttttgttttatagtgtattgtaaattttggtgataatgtgagtatagtgattgatattagtaaattttttttttagggagggagagtttttttgtttattattgagttaggatgagatggtggtgaaagtttttttattagtggttattgtaggtaagttttgttttttagtgaatttagttttgtttttttgtttatttttttatttagtggaggtgtaggttttatgagagatgttttatttttttagagtatgtagaaaagtattaagttgtggaaaataagttatttattgaaggagttgaggtggaaggggatatgtattatggatttaggaatgttaagaatgtaattgtttataggttgggtttagggtgtggtaggtattttattttattattgagtaagagattttttgagtttgttttggaattttatttttttttttattttgtatttttttgtaattttaatttgtttgtgttagtttttgtaaaaggtaagggggttaagttaatagaggttagataattggggtggggttaggggaggtaaaggtggtgggtttttttgagttagttgattagatttgaaagttattttgtaaatgaattttttagggggataaatgattaaatagtttttgttggtttgtgtagtgattttttttgtttttttttgttttgatttttttttggggtaaatatttgtttagttgattataggagggataggattttagtattgtagatatattttttgaggtatttttaagtagggattgaggttgtttgtttattttgtttgattattgtttttggttagtggttttaatattaggtgggttgttgttagttataaataaaaggtagtttgggagaggtgtttggtttgttagttagtttttgtagaaggttatttttattagagaattgttagttgtttagtggtgtatatgaaagaggttttagatatagtaattttgggtaagtttattagatttttatggggttgaaattttattttttatttttttgtttaagaattattagagtttgttggataatatattatatgttatttttttttggtgaatagaggggatgtgtgtggaagagttagttatattagaattatttttgagtatatattttttttttaaggttagggagtaaagaatatttgatttaggattttttgagtttgggtagaaggtatttgtttttttttttttaggtattattttgttttaagttgtattgattggttattgtggtggtattgggtaattattttggagattgtggttgggagatttttaagggtaggagttatgggttattttatttagggttatgttttaaatttagtatttttataggaaaggggaaggaaattagtttttattgagtatttgttaagtattaggtattgtgttaggttttttatttatgtaattagtgttttttgagtatttattgtgaagttagtagtgtattaggtgttggttataagttatgtatggtatttttttttatggaaatggtatgttgttttatatattttatagtaattttttaaggaaggtgagtttatttttagtttatatatgaaggtttttgtgtttaagtgattgattttaggtgttttttagttagttaagtgtttgaatgagaatttatattaaggttggtataattttaaagttaatattttttattttattaagttgtttagggagtaataaagtgatttagatatgttggtttagaaagttagagatgttg

SEQ ID NO: 538 - DNA, 6155 bp, Artificial Sequence
  chemically treated genomic DNA (Homo sapiens)
ttagaaaatattttaggttgtatttatagagattggtaatttatagttaagtaatagttttttgtattttgttttggaaatattgattttagaatattgtagtagatttttattgttatattttgagatgaatattagtaaaagggtatatttaatgatggtaaaaatgagatggtaaattattttgtttgaattatggttgaaggaattggtggaaaaagatttaggggaaattttaatagtttttaagtatgtgatgagatagagaaagtggaattgagggaatgaataagataatttaggagtaattatgtttagggataattttagaattattttataaaaagttttttgttaggtagtaagtttttagtaatgaaagtatttatttaaattatttttgagatatttttttattttaagattttaatttaagggtttaaagaatttaggttgatattgtataggattgtagtttgtagaggtagggtttgggataattttttagttattgggtatttatgtggttgatattaggtaattttaatatattatagggattagtaaattttttttttgtaagatgttagatagtaatattttaggttttgtaggttatatggtttttatagtatttgtttaattttgttgttgtagtgtaaaagtattgttgatattatgtaaatatagtttgttatttgtgttttaataaaattttatttataaaagtaagtggtgagttggatttggtttgtgggttatgttttgatgatttttgttttaattaatgaaatttagaaatagagttttaatgtaaatatagaaaggtttttaatttagggattaaaaattgaattgttaagatgttattgtttttttggtttgaaagagtatatattaagtgtttaaaatagtgaattgtttaatgaattaagaaattttttagtataaaagttaaatgataatggagaatttgatattgttttttattttttatttttgttatttaatgttgtttttaaaggtgttgttatttttgttgggtagtattgtttatttagttggattgttgatgtagatttagtttatattaataagttaatataggtttaggttttttgagaattaaaagatttttaagtattttttttttaaatatagtaatttttaatagtaattttaatattagaagtaagaagtaaataaaaatttttgatgattgaggtatttgttgttatatattttgtgtttttaaggttatatagtagagttttttgtattattttttggtttgttggtttttagtttatagtttgtaaaatggtggttatatgttaatgttgattagaagaaggagatgttattgtaattaggtaggttggtttttgttgagaagtgattattgattgttagaaaataaagaaatgggaggtatttagtaatttggggttgttggttttaggattagaaatgtatttttaagtttttattaaattttttaataattttgaagagttttgttgtttgtgttttaatataatatagtaattggtgtttgtaatgaggattataatttattaaaaaggtaaattgtgaattgtgtatatgtatatatatttttttaagtaaatgggattgttttattttgaatagtttttaaattgaaataatttattttgatatgtagaaaattaggataagtaaaattaatttatttatttttaagagttttagatagtagtgatttgttagtatgtatatgaatttttagttttggtattttgaatttaaaattttaatagagtggttttttgatttttaaagtgttttatttttagtaaatatatttttaattttgtgattttaaatttttaagttatattatgattttataattttatagtgatttatttttttattgttttaaatttaataattttattttttttattggtatttaattttttttgtagtttaaaggtttttttatttaaaatgttatatattttgattttttaattttagggatttttttttagataattgagaatatgtaatttttatattttaatgtttatttgattataatttatatttgaaaagtaatttttaaagaaatttgagagaatttaaaaattattttaaaagtattatgttatttttagtttaaaatattttagagaatttattttattttattttttttggagatagggttttgttttgttgtttaggttggaatgtagtggtgttattatggtttgttgtagttttgattttttaggttaaaatgatttttttattttagttttttgagtatttgggattataggtatgtgttattatatttagttaatttgtttgtttttttgtagagatggggttttgagtttaggttggttttgaattttttagtttaagggattttgttgttttagttttttaaagtgttgggattataggtgtgagttataatttttagtttagagttttttttttattaatggtgtataatataaaatttaaattttaatatggttttatatttggtttttatttattttttgtttttttttttttgttatatattttatttgtttttatgtattttagatttaagtaatgaaaaatagtttgtattgttaggaataggttgtatttttttatggtttgattttatatatatttttttgtggtaatttagaatatttgtttataggtttttttatattaggttatattttttttgtgaaatttttaatttgtaatattttattgaaattttatttttttgaagttttttttaatttttttaggtttttttattgtttatattttgttttgtaatagttattatattgttaaagttgttttttagtaaattatgagatttttaattgtggaagggaaggtatttttttaatttttgtttttgtgttatatttagtttagagtttgatattaagtaggtattttttaaaaaaaaaaaaaaaaaatatagggtagagatagataataagggatttttgatatttatgttgtagatagttataatattttaataggaattttgggaatttggggaattggaagtagttgggaaagtattggtatttgagttatttagtatttttttaggtttgtgtgtgagttttgttatttttaggtattagtatttgaaatttaatttttttatgaagttttttatttatttgtttttttggtgaaaaaaaaaaataataataaaaattgtttttttttttatttggtgttagtattgtataatttttaataagtttgaaaagataatgttggtaatattttataagtttattgttaatgtttaatatttattaggtgtttgttgtgtgttgatttttgtgtttatatattttttatatattattttatttatttttataatagtttagtgaagtagatgttattattattttaattttataaatgggaaaaatgagatttattgagataaattaaattatttaaggttatataattatagattaagggggttaaaatttgaatttagtgtagatttaaattagagtttatttttttatttattattggggaatattgtttggttataattgaagtttaaataatagtatggttataatatgggttttaaaataatttagatttggatttaaaatttatttattggaggtaagtgattttatttttgatttttagtttttttatatgtaaaatgataatatttattttaaaagtgttattgtttatttatgtatatggtatatattaaaaaagtaaatgttagttttatttgttatttttatattttatgtgaattttgggggtaatggtttgtatagaataaggtttggtatgagaagataaaaattatttgataaataaaaaagttgttattttgtttattagaatgttaattagtgtttgttttttaggattaataagtgttttattattataattatatttatttttttaatgaaaagggtgtgttttgagtatttaatagttaattatttataaatatattatagtagaataaggaataaaattagtgatttgtttattatagtaattaggttttttttttggtaatatttagggaatatatgagggttttttgtgggttgttatttattatataaaatagttgttttggtagttttataatagagatttgttagtgttatttagtagagaaaaattataaatatagttgttgtttttgtgtggtttgtggttttggttttgtttttatttgaatttttttatgtaggtatgttattatttaaaagtagttatttggtgtttttttttgtattttttagattttttgtaggtttaaaaaaatttaagttatttttataattgtttatatagattgatttatttggtttttttattagttaatgaaatttttgatatgtaggaaaaaggataattattttaaattttataattttagtggattttttttataagtttgaagaaaaatagttttaattattaaaaaatattttttttatattttttattgttttttgttaatttttgtatttttgtgggggttaaaaaggttaataatttttgttatttttattttttatattttttgtgtgttataattttgaagtatattataattatttgtttgtaattaagaattggtatagtataaatgtttaattaaattaggtttttttgttttttttaagttatattggttatgaggtggaggtggattatagggggtaggtattaatttagggagattatttaggtttttgtagtggtttagataagaaatattgatggttggtttaaggtattaagagtggtatttgaagaatgtagatagaataaagagagaattaatgaagtttgttgatgggttagatgttgattggtgtgagatggagagaggagttagggatggtaggttttttttttttttttttgttgtgtttgtttaatttttgtttattttttttttttttttgttttttgatggagttttgttttgttgtttagattggagtgtagtggagtgattttggtttattgtaatttttgttttttaggtttaagtgatttttttgttttagttttttgagtaggtgggattataggtgtatgttattatgtttagttaatttttgtatttttagtagagatggggttttattgtgttggttaggttggttttaaatttttgattttgtgatttgtttattttagttttttaaaatgttaggattataggtgtgagttattatgtttagttatttatttttaaaggattaagtttatgttttttattatgggaaattattttattttaaatttgatgattgtattatgtgtttttatagaatttggtatttttttaggatagtatttattttgttttgtaagtgtgaatgtaattattttatatatagtatatatataatttttatattttttgttttgttttgtgaaggtaagggttatgtttattttatttgttattagatttttatatttaatatagttttggggatagtattaatgtatttttggtgtataagtaaatagtgttatttatagtttttatttataatatttgatagattaattaaatatagtaggttatttgggtttttttgatttatgtttttagtttaatttttattttttttttatttggtattttttattttgttttttgatatatttttatagttttgtttattgagtaaaagaaaatataaatagtaagaagtaaatttgtgttttatggattttgataatattttttaaaagattttttaagattgttgatgtttaaaaaaattaagggtttttaatttataataatatttaatagtttttaaaatattataaattgattggaatattgtattaatagagagagttatggattttatttatgtgtagatttattttagttagaagtattaggattggtttatttgagaaagtaaatagattattataaatttattgttatattttaaggaaaatttattgatgatattttttaatattgtgattatatatttaaattatattttaagaatagaatgtttaagatattatttagataagaattaatataaaaagaaaaaggaaaa

SEQ ID NO: 539 - DNA, 6155 bp, Artificial Sequence
  chemically treated genomic DNA (Homo sapiens)
tttttttttttttttttgtattgatttttatttaggtgatattttagatattttgtttttaaagtatgatttaggtatatagttataatattagaaagtgttattaatgaattttttttgaagtatgatgatgaatttgtaatgatttatttatttttttaaataaattagttttaatatttttgattgaaatgaatttatatataaataagatttatgattttttttgttagtgtaatgttttaattagtttgtaatattttaagaattattaagtattattatgagttgaaggtttttaatttttttagatattaataattttggggggttttttagaagatgttattaaaatttataaaatataagtttattttttgttgtttatatttttttttatttagtgagtgaaattgtaagagtatattaaaaggtaaagtgagagatattaaataagaaaaaaatgaaagttaagttagagatatgaattaaaaaggtttagataatttattatatttgattagtttattagatattgtaggtaagagttataaatgatattatttgtttatgtattaaaagtgtattggtgttgtttttaggattatgttggatgtgggaatttaatgatgaataagatagatatggtttttgtttttataagataaggtaaagaatatgaagattatgtgtatgttgtgtgtagggtaattatatttatatttataaaatagaataaatgttattttggagaagtgttaggttttataaaagtatataatgtggttattaagtttggggtgggatggttttttatagtaggaaatataaatttaattttttaaagataagtggttgggtatggtggtttatatttgtaattttagtattttgggaggttgaggtgggtagattatgaggttaggagtttgagattagtttgattaatatggtgaaattttgtttttattaaaaatataaaagttagttgggtgtggtggtatgtatttgtaattttatttatttaggaggttgaagtaggagaattatttaaatttgggaggtagaggttgtagtgagttgagattgttttattgtattttagtttgggtgatagagtgagattttattaaaaaataaagaaaaaaaaaagataagtaagagttgaataaatataataagaaagaagagaggaaatttgttatttttgatttttttttttattttatattaattaatatttaatttattaataagttttgttaattttttttttattttgtttatattttttaaatattatttttagtattttgggttggttattaatattttttgtttggattattgtaaaggtttaaatggtttttttgaattgatgtttgttttttataatttatttttattttatagttagtgtgatttaaagagagtaagagggtttaatttgattagatatttatgttgtattaatttttggttgtaaataaataattatggtatgttttagagttataatatataaaggatgtgaagagtaggaatagtagaaattattagtttttttagtttttatgaaaatatagaaattaataggaaataatgaagaatataagaaaaatattttttgatagttgaaattatttttttttaaatttataaaagagatttattgaaattatagaatttaaaataattgtttttttttttatatgttaaaaattttattggttagtaaaaagattagatggattaatttgtatgaataattatagaagtgatttaaatttttttaagtttataaaaaatttgaagaatgtaagggaaaatgttaaatgattatttttaaatgatgatatgtttgtataaaaaagtttaaatgaaaataaaattaaaattataagttatataaaaatagtagttgtgtttatgatttttttttgttgaatggtattgataggtttttattatggaattattagagtaattattttatataataaataataatttatagggaatttttatatgttttttaagtattattaagaaagaaatttagttattatagtagatagattattggttttattttttattttattgtagtatatttatgggtaattaattattaaatatttaagatatattttttttattaagagaataaatgtgattatggtaataaaatatttgttgattttggaaggtaggtattggttgatattttggtagatagaatgatagtttttttatttgttagatggtttttgtttttttatgttaggttttattttgtataaattattatttttagggtttatataaagtgtagaagtggtaaatggaattaatatttgtttttttagtatgtattatgtatatgggtgggtagtaatatttttgaggtagatattattattttatatatgagaaaattgaagattagaagtgaagttatttgtttttaataaatggattttgaatttaggtttagattattttaaagtttatattataattatgttgttatttggattttagttatggttaggtaatattttttagtagtgaataagagaatgagttttaatttgaatttatattagatttaaattttggtttttttagtttatagttgtatggttttgggtagtttaatttattttaatgaattttattttttttatttgtgaaattgggataataatggtatttattttattggattgttgtgaagatagatgaagtgatatatgaaaaatatgtaagtatagagattagtatatagtaagtatttaataaatgttaaatattagtaataaatttgtaaagtattgttaatattatttttttaagtttattaggaattatatagtgttggtattagatggggaaggaaatggtttttgttgttgttttttttttttattgagaaggtaagtaaataaggagttttataaagaagttagattttaagtgttaatatttgaaggtggtaaggtttatatataagtttggaagagtattgagtggtttagatgttggtgtttttttagttgtttttagttttttagatttttaagatttttattgaaatgttatagttatttatagtgtaggtgttaggaattttttgttatttgtttttattttgtgttttttttttttttttttgagaagtatttgtttaatgttaggttttaggttaagtatggtataaaaataaaggttaaaaagatgtttttttttttatagttaagggttttatagtttattggggaatgattttaataatgtgataattgttataagatagaatatgaataatggaaaagtttgaggagattagggaaggttttagagaggtaaagttttagtagaatattatagattaaaaattttatagaaagggtatggtttgatgtaagagagtttatagataggtgttttaggttgttataagagagtgtgtataaagttagattatgaaagaatgtggtttgtttttagtaatataagttgttttttattatttgagtttaaagtgtatgggaataggtggagtatgtgataaagaaggagaggtaaaaggtaggtaggggttagatgtaaaattatgttagagtttgaattttatgttgtatattgttagtaaaaaggagattttgggttgggggttgtggtttatatttgtaattttagtattttgggaggttgaggtagtaggattttttgagttgaggagtttgagattagtttgggtttaagattttatttttataaaaaaataaataaattagttaggtgtggtggtatatgtttatggttttaggtatttaggaggttgaggtgggaggattattttagtttgggaggttaaggttgtagtaagttgtgatggtattattgtattttagtttgggtaatagagtaagattttgtttttaaaaaaaataaaataaaataaattttttgaagtattttgagttaaaaatgatatgatgtttttaaaatgatttttaaatttttttagatttttttaaaaattgttttttaagtgtaggttataattaaatgaatattaaagtgtaaaaattatatatttttaattgtttagagaaaaatttttaaaattaagaaattagaatatataatattttaaataaaagggtttttagattatagaaaaaattaaatattaataaagaggatgggattattaaatttaaagtaatggggggataaattattataaaattatgaaattataatgtagtttggaggtttgaggttatagaattaaaaatgtatttattaaaaataaaatattttaagggttaagaaattattttattgaggttttgagtttagaatgttaggattaaagatttatatgtatattgataaattattattatttggaatttttaagagtaaataaattggttttgtttattttaattttttatatattgaaataagttattttaatttgaagattgtttaaaatagagtagttttatttgtttagaagagtgtgtgtgtgtgtgtataatttataatttatttttttgatgaattatagtttttattataagtattaattattgtgttatattaaaatataaatagtaaaattttttaggattattgagaaatttggtggagatttgggggtatatttttggttttaaaattaataattttaggttgttgaatgttttttatttttttgttttttagtaattaatggttattttttagtgaaggttaatttgtttgattatagtagtattttttttttttagttagtattgatatgtgattattattttataaattataaattaaaggttaatagattaaaagataatataagaggttttgttgtatgattttaggagtataaaatatatgataatagatgttttgattattagagatttttgtttattttttgtttttggtgttaaaattattgttaaaagttattgtatttaggaaggaagtatttaaaaattttttggtttttagaaggtttgaatttgtgttaatttgttggtatggattgggtttgtattagtagtttaattgagtagatagtattatttagtagaagtaatgatgtttttaagaataatgttaagtagtagaaataaagagtaaaaaatagtattagattttttattgttatttgatttttatattggaaggttttttaatttattgggtaatttattattttgaatatttgatgtgtatttttttagattaagaagataatgatattttgatagtttgatttttaatttttagattgaaagtttttttatatttatattagaattttatttttagattttattagttaaggtaagggttgttaaagtatgatttataggttaaatttaatttattatttgtttttgtaaataaagttttattggaatataggtaataaattgtgtttatataatgttaataatatttttgtattgtaataatagagttgagtagatgttatagagattatatggtttgtaaagtttaaaatattattatttggtattttgtagaaaaaaagtttgttgatttttgtaatgtattagaattatttggtattaattgtataagtgtttagtggttaagaagttattttaaattttgtttttgtaaattatagttttatatagtgttaatttaagttttttaagtttttaagttaaaattttgaaataggaaagtattttagaagtgatttaagtgggtatttttattgttgggagtttattgtttgatagggaattttttgtggagtaattttgaagttatttttaaatatagttatttttaaattattttgtttatttttttagttttattttttttattttattatatatttgaaagttattagaattttttttgggtttttttttattaatttttttaattataatttaggtaagatagtttattattttatttttgttattattggatatgtttttttgttaatatttattttaaaatgtggtaatgaaaatttattataatattttggaattagtatttttaaggtagagtatagaaaattattatttgattatggattattagtttttataaatatagtttaagatgttttttgg

SEQ ID NO: 540 - DNA, 6155 bp, Artificial Sequence; identical to SEQ ID NO: 538
  chemically treated genomic DNA (Homo sapiens)

SEQ ID NO: 541 - DNA, 6155 bp, Artificial Sequence; identical to SEQ ID NO: 539
  chemically treated genomic DNA (Homo sapiens)

SEQ ID NO: 542 - DNA, 6239 bp, Artificial Sequence
  chemically treated genomic DNA (Homo sapiens)
ttaatatttattaaatgttaataatgtgtaatggagaaggttaatagtagggtattttattaatttgataaaaggttataatttggattttggatttaaattttaattatatttgtattttatttaggaaatgataattataaaaaggggatttagtattttaaatggagagttagaaggttaaataagtttatagtagtgatagaagtagtttttatatttaaataattttagattagtaaaaattttattagataggagaaattttattagatgggggtatttttttaattgatatgttttaaatgtaaaatattttttttagtttatattttagataagttaattttgttaaaagggttaaaggatgtgatgggaaattttgagttttttataatgagatatgtttattggtatattttttagtgagtgtaatagtaatgtgatgtgtggtggagaaatgatgttattggtaatattttttttttattattttttagggttttattttttttaggtttgatttaatttaaattttgttttggtttttaagtttgtgagtttatattaatttttatagttgtatttagtattttgtttttaaataaagtgaaaatattaaagatttaattaaaatttttttaaaaagaattttaattaatttttttatttagttataatatttggtaaaatatattttttatggtatttttaaaattatgattgaaatttgaatatatttttgaaatagatttatatttattttataatagtaagatatagaaaattttgtaagtattaattatattaaggaatgtagagtgtttttttaaaaatagttgaaaagagttatagtgtgtttagtagaattttagtttataattttaataattttagttttatgattttaagaattggttttattttgaaatatttttttatttgaaaaaaggaataatattattttttttttttttaatgtggttgtttaaataaaatgaaataatatatgtagtatagtatttgttatgaagggtttaataaattattagtttattttttttagttaatataaaagatatatttataagatttagatttaaggaaatttatttttataagtttttattagtataaaatgttattgttagtttgttttaataaaaattattattagttgggtgtggtggtttatgtttgtaattttagtattttgggaggttgaggtgggtggattatgagattaatatattgatattattttggttaatatggtgaaattttgtttttattaaaaaatataaaaatgggttgggtgtggtgttgtgtgtttgtagttttagttatttgggaagttgaggaagaagaattgtttgaatttaggaggtggaggttgaagtgaattgaggttatgttattgtattttagtttggagatagagtgagattttgttttggggggaaaaaaaaaattgttattattattttatttttttaagggatttgaattaagatgagggagtttatgtgtgattttgtaagaattttattaaggttgtatatataatgattattaaattattaataggagtttatagtaattgggttaaaatatttgggagtatttatgttggtaaaagagtttatttgggggttaaaaaaaaagttaaattaggtttaattttaaatggatttttaataaattaagagagtaatgttagtttattttttttgaaatgttagtagtatgatattaaaatttatttagaagtaaaaattttaagatggaaatatgttattaatattggtgttagtaatttattttagaaagtttgtgtggagattattattagtattgttgaggatatttaatgaaagttgttggttgtaaatagaggtgaagagagaaaaatgattattttggtgttttgtatatatgtggaggtaaaatgtttttaggattttagtagttattgttgttaatattgataagtatttgatggaatttatagttttataattgaaagtttaaaagaaggttatgatattagtaaattgaggggtggggatttttttgttgtttttttgagggtttagattttaaaggttgtgttgtgtttggggttaagggtttattagtattggtttatgttttttgtgttattttttgagtttttttttgagtgattgaaggtttgggaattgtgagtaataatatttaaattttaattggtttggggttgtgtttgagttttggtgtgtggattgtggtgaagtttgggtttgaggttgttgtggtgtttgaggttgaggtgtgggtgaggttgaggttgtgtttgttgtggttttgggtggtgggggggttgggtgtggttggttgtggatatttattatattatgttgtaggtgtttttgttgatgtatgagaggttggtgtagtgtggttttatgttgaatatttgtttgtggattatttttgggtttgtgtttgttgttgttgttgttgttatgttggttgttgggttgttgttgtttttgttgtgttgagtttgatgtttggtggttgttgtttagtttttgttgttttttttgtagggattgtgttgttgttggtgtagttgttgatgttgattgggaggaggaaggaagatgttgagtgggagagttgaagagttgatagttatttggattgattgtttgtttgtttgttagattgatgggtgggttggtgggtgggtggagggaggggtgtgtgttgaggagggtgttggggtggggataagaagtgtgtatgtggattggttttttgtggttgggggtggggttgtgtgggttggtggaagtggtgggttttgggaggggtattgtgatggtgttgattgagggggtgttattaggtgtggttatgtgtatttgtggtgtatttgtgggggtgttggtgtgggttgtgttttttaagatatttagggagatagatgtggggtagaatttatgggttgaagtgagagatggttggggtttaggtgagtgattgagtagggtttgaatagagttagtgagggattttgggttgtgtttgaggtttgatgatgtgttatattttggtagtgttgtagtttaggtttttgtgaatttgtggtttatatgttgataaatttagaggtttttgtattggggtagaaattgaaaggtatgatttagattgagaaagatatttgtatattgagaaagtgtgaaatataattgttgagattaaaaggagatattgagaggatatgttaattaggttagtttagatgtttgttgagtatattttatgtttttggggatttatttttatagaagttattttttagagagaggagatagataaatatgtgtaatgtttaagttgtgataagtatgatgaagaagtataaagtagaagggagggtgtggtgttttatgtttattattttagtattttgggaggttgaggtgggtggattatttgaggttaggagtttgagattaggtttttattaaaaatataaaaattaagtttgggtgaggtggtttatgtttgtaattttagtattttgggaggttgaggtgggtggattatgaggttaggagtttaagattagtttggttaatatggtgaaattttgtttttattaaaaatataaaaattagttgggtgtagtggtgggtgtttgttattttagttatttgggaggttgaggtaggaggataaagtagagagtaagggattagggggtggtgggttgaaatatatgagagatatatttgtgtttagagatagattgagattggtatagataggtagaaatgttgatagagtaggtaatgaaatagaaatgtaaagatagagttattaaaattaaaatattgaggtttagagaaaaagagatatattaggttaagaaatagttataaataatagaggttgaaaaaataaaaattagagttttgaagtaggtggatattaaggaaagttaagataatgagatggataatgatttaggtattgtttttgaatttttttttttgttatgtttggagggagaaggaagagtggtagattttatattttttttgtttaatttttttaagtttaaaattattaatttttgatttttagatattaataaagattaattagttaattttaaaggagaataaataaagttttttgtttgtttgtttgtttaattttttggtggaagttggtgtggtggtttatgtttgtaattttaatttgggtttaagaatttaagattagtttgggtaatatagtaatattttgtttttaaaatagagaaataaataaataaaaaattttgtgggggaaaaaggatgtgatatatgagaaaaggaataaattgttttagttaaaatttatttttttaaaatatatttagtttatgaagtaggatttaattttagaaaatatttaatttttgagttaatgggtgtagtatattagtatggtatatgtatatatatgtaattaattagtatattgtgtatatgtattttaaaatttaaagtataataataataataaaaagaaaatatttaatttttatttttaaaagaggatattgtatatttttttaaaaaataggttaagataaatggagtattatgaaattaaaattataataattggttgggtgtggtggtttatgtttgtaattttagtattttgggaggtggaggagggtagattgtttaagtttagaaattggggattagtttgggtaatatggtgaaattttgtttttattaagatataaaaaattagttgggtttgttggtgtgtttgtagttttagttatttgggaggttgaggtaggagaattgtttgaatttgggaggtagaggttatagtgagttgagattgtgttattgtattttagtttgggttatagagtgagattttgttttaaaaaaaaaaaaaaaaaagaggttgggtgtggtggtttatgtttgtaattttagtattttgggaggttgagatgggtggattataaggttaggagattgagattattttggttaatatggtgaaattttgtttttattaaaaatttaaaaaaaaaaaaaaaaaaaattagttgggtgtggtggtgagtgtttgtagttttatttattttggaggttgagataggagaatggtgttaatttgggaggtggagtttgtagtgagttgaggttatgttattgtattttaatttgggtgatagagtaagattttgttttaaaaaaaaaaaaaaaaaaagtagatttgatgtagaagagtatattagtaatatagaagataaatatgagaaaatttttaagaatatagaataaagtgatggaattttgtaagagaagataatggggatggatagtatttagggattttaattttaggtatttttataggaagatagagtaaattggttagagtgaataattaaaattataataggagaaaagtttttttaggttgtaaaaaggtttgaggtggaggtgggaaatagagtgggtttattgagattgagaaaaattaagaagaaattaataatatataatttgggaaaattattaagttttagggataaagaatagatattaatagatttaattagggaaaaaaatgttatttataaaaaagttggttagtaggtatggtggtttgtgtttgtaattttagtattttgggaggttgaggtgggtggattatgaggttaggagttttagattagtttggttaatatggtgaaattttattttttttaaaaatataaaaattagttgggtgtggtggtgtgtgtttgtaattttagttttttgggaggttgaggtaggagaattgtttgaatttaggaggtggaggttgtagtgagttgagattgtgttattgtattttagtttgggtaatagagtgagattttgtttttgggggaaaaaaagatggttgggtgaggtggtttatatttgtaattttagtattttgggaggttgaggtgggtggattatttgaggttaggagtttgagattagtttggttaatgtggtaaaattttgtttttattgaaaatataaaaattagttgagtatgatggttggtatttgtaattttagttatttgggaggttaaggtaggagaattgtttgaatttggaaggtataggttgtagtgagttgagattgtattattgtattttagtttgggtgataagaatg

SEQ ID NO: 543 - DNA, 6239 bp, Artificial Sequence
  chemically treated genomic DNA (Homo sapiens)
tgtttttattatttagattggagtgtaatggtgtaattttggtttattgtaatttatgttttttgggtttaagtgatttttttgttttagttttttaagtagttaggattataggtgttagttattatgtttggttaatttttgtatttttagtagagataaggttttattatgttggttaggttggttttgaatttttgattttaggtgatttatttgttttagttttttaaagtgttgggattataggtgtgagttattttgtttagttattttttttttttttggagatggaattttattttgttgtttagattggagtgtagtggtatgattttggtttattgtaatttttattttttggatttaagtaatttttttgttttagttttttaagaagttggaattataggtatatattattatatttagttaatttttgtatttttagaagagatggggttttgttatgttggttaggttggtttagaatttttgattttatgatttgtttgttttggttttttaaagtgttgggattataggtatgagttattgtgtttgttggttagtttttttataaataatatttttttttttaattgggtttattagtgtttgttttttatttttgaaatttaatgatttttttagattatgtgttgttggtttttttttaattttttttaattttagtgaatttattttattttttatttttattttagatttttttgtaatttaaggaaattttttttttattgtaattttgattatttgttttaattgatttgttttgtttttttgtggggatgtttagagttagaatttttagatgttgtttatttttattatttttttttataggattttattattttgttttatatttttgaaaatttttttatgtttattttttatattgttgatgtatttttttgtattaagtttattttttttttttttttttttgagatggagttttgttttgttatttaggttggagtgtagtggtgtgattttggtttattgtaagttttgttttttgggttgatgttatttttttgttttagtttttggagtaggtgggattataggtatttgttattatgtttggttaattttttttttttttttttttggatttttagtagagatgaggttttattatgttagttaggatggttttgattttttgattttgtgatttgtttattttggttttttaaagtgttgggattataagtgtgagttattgtatttggttttttttttttttttttttttgagatggagttttattttgtggtttaggttggagtgtagtggtgtgattttagtttattgtaatttttgttttttgagtttaagtaatttttttgttttagttttttgagtagttgggattataggtatattggtaggtttagttaattttttgtattttagtagagatggggttttattatgttgtttaggttggtttttagtttttgagtttgggtaatttgtttttttttgttttttaaagtgttgggattataggtgtgagttattgtgtttggttggttattgtggttttaattttatggtattttatttattttggtttgttttttaaaaaaatatgtaatgtttttttttgagaataagaattaggtattttttttttattattattattatattttaagttttagggtatatgtgtataatgtgttggttagttatatatgtatatatgtgttatgttggtgtgttgtatttattaatttaagaattaggtattttttaaaattgggttttgttttatgggttaaatatattttgaaggagtaaattttggttggagtagtttatttttttttttatgtgttatatttttttttttttataggattttttgtttgtttgtttttttgttttagagatagggtattgttgtgttgtttaggttagttttgaatttttgggtttaagttgggattataggtgtgagttattatattagtttttattagagagttaaataaataaataaataaaaaattttgtttatttttttttgagattgattaattaatttttgttgatgtttagaagttaagagttgatggttttaaatttggaagagttgaataaagaggatatagggtttgttgtttttttttttttttttaaatatggtaggggaaaaggtttagaagtagtgtttgggttattgtttgttttgttgttttagttttttttggtatttatttgttttaggattttaatttttatttttttaatttttgttgtttgtgattgttttttaatttggtgtgtttttttttttttaaattttgatgttttggttttagtgattttatttttgtatttttattttattatttgttttgttagtatttttgtttatttgtattaattttggtttgtttttgaatgtaaatgtattttttatgtgttttgatttattattttttaattttttattttttgttttgtttttttgttttagttttttaagtagttgggatgataggtgtttattattgtgtttggttaatttttgtatttttagtagagatagggttttgttatgttggttaggttggttttgaatttttgattttgtgatttgtttgttttggttttttaaagtgttaggattataggtgtgagttattttgtttggatttaatttttgtatttttagtagagatttggttttaaatttttgattttaagtgatttgtttgttttggttttttaaagtgttgggatgataggtgtgagatattgtgtttttttttttgttttgtatttttttattgtatttattataatttgagtattatatgtatttgtttgttttttttttttaaaaggtaatttttataagggtggatttttaggaatatggagtgtgtttaataaatatttgaattaatttgattggtgtatttttttagtgtttttttttagttttgataattgtgttttatatttttttagtatgtaaatattttttttggtttgggttatgttttttggtttttgttttagtgtagaggtttttaagtttattagtgtgtggattatagatttgtagaggtttgagttgtggtgttgttgggatatggtgtgttgttgggttttaagtatagtttggggttttttgttggttttgtttggattttgtttggttgtttgtttgggttttagttattttttattttagtttatgagttttgttttatgtttgtttttttgggtgttttaagagatgtgatttgtattgatgtttttgtgaatgtattgtgaatgtatgtgattgtgtttagtggtgtttttttagttaatgttgttgtagtgttttttttgaagtttgttgtttttgttggtttgtgtggttttgtttttagttgtgaggaattaatttgtatgtatattttttgtttttgttttggtattttttttggtgtgtgtttttttttttgtttgtttgttggtttgtttgttagtttggtaggtaggtaggtaattggtttgagtggttgttggttttttagtttttttgtttggtgtttttttttttttttttggttagtgttggtggttgtattggtggtggtgtagtttttgtgggaggggtgataagagttgagtggtggttgttgagtgttgagtttagtgtggtggaggtggtggtggtttggtagttaatatggtggtggtggtggtggtgggtgtgggtttggagatggtttgtgggtaggtgtttgatgtggggttgtgttatattaattttttgtatattggtgagggtgtttatggtatggtgtggtgagtgtttgtgattggttatgtttggtttttttattgtttggggttgtagtggatgtagttttggttttgtttgtgttttggttttaggtgttgtggtgattttgaatttggattttattgtggtttgtgtgttagggtttgggtgtggttttgggttggttgaggtttaggtgttgttgtttgtggtttttgggtttttggttgtttgggaaggggtttagggagtggtgtggggggtgtaggttggtattagtggatttttggttttgggtgtagtgtggtttttaaagtttggatttttgggaaggtaatggaagggtttttattttttaatttgttagtattatggtttttttttggatttttgattgtaaaattgtgaattttattagatgtttgttggtgttggtggtggtggttgttgaggttttgaaagtgttttgtttttgtgtgtgtgtagaatattgaaataattgtttttttttttttgtttttgtttgtagttaatggtttttattaaatatttttagtggtgttaatggtggtttttgtgtaggttttttaaaatggattattgatgttagtgttggtggtatatttttgttttgaagtttttatttttaagtggattttaatattgtattgttggtgttttaggaaggataaattaatattatttttttgatttgttaaagatttgtttagagttgggtttaatttgattttttttttagtttttaagtgagtttttttattagtataaatgtttttagatgttttagtttaattgttatggatttttgttaatgatttagtggttattatgtatgtagttttaatggagtttttgtagaattatatgtagatttttttattttgatttaggttttttagaaaagtgaaatgatagtgatggttttttttttttttttgagatggggttttgttttgtttttaggttgaagtgtagtggtgtgattttggtttattttaatttttgttttttgggtttaagtgattttttttttttagttttttgagtagttgggattataggtgtgtgatattatatttggtttatttttgtattttttagtagagatagggttttattatgttggttaggatggtattgatgtattgattttgtgatttgtttgttttggttttttaaagtgttgggattataggtgtgagttattgtgtttggttgatggtagtttttattagagtaaattagtgatagtattttgtgttggtgaggatttgtggaaatagatttttttaaatttgaattttgtgaatgtgttttttgtgttgattgaagaaagtaaattaataatttattgaattttttgtggtaggtattgtgttatatatattattttattttatttgagtagttatattgagggaggaaaagatggtgttatttttttttttaggtgagaaagtattttgaggtgaagttaatttttgaggttatagaattagagttattaagattgtagattgagattttattagatatattgtagttttttttagttgtttttaggaaaatattttgtgttttttagtgtaattaatatttgtagaattttttgtattttattgttataaagtaaatataagtttgttttggaaatgtatttaaattttaattataattttagaaatgttatagaaggtatgttttattaagtattgtagttagatagaaagattagttaaaattttttttaaagagattttaattgaatttttaatgtttttattttgtttaggagtaaaatgttgaatataattgtgaaaattaatgtgaatttataggtttaggagttaagatagaatttaaattaggttgagtttgaaagaaataaggttttaaaaagtaatggagagaaagtattgttagtagtattatttttttattatatattgtattgttgttgtatttattgggaagtgtgttagtgaatatgttttattatgagaggtttagaattttttattatattttttggtttttttaataagattagtttatttaaaatgtggattgaaaaaagtattttatgtttaggatatgttaattgaaaagatatttttatttgataagattttttttgtttgataaggtttttattagtttgaagttgtttagatgtgggaattatttttgttattgttgtaggtttgtttgattttttgattttttatttgaaatgttaagttttttttttgtgattgttgttttttaagtgaaatataaatgtaattggaatttgaatttaagatttagattatagttttttattaggttgatgaaatattttgttgttaattttttttattgtatattattagtatttaataaatattgg

SEQ ID NO: 544 - DNA, 6178 bp, Artificial Sequence
  chemically treated genomic DNA (Homo sapiens)
gatttttttttaatttaaaaggattattttttgtaagattttttttttttatttaatggtgtttatatgtttgttatatattaatgaaaaaatatatgttataaagtgtttatgaatttaatattaatttaaaatgaatatatgttattaattatatagagatttaatgtatgtttaaaatagtatatatatgtgtgtgtgtgtgtgtgtgtgtgtgtgtgtgtgtgtgtgttttagtttatagataatttgatttattaattttttggaaaggaattttagtatattttaaattgggaattgttgatattgttgatgtattaaagtgattttttaattggaaaattttatatgatttggttattttttttttaaattattttatttttaaataagttttgtgtttttaagaggaattatgattatattgtatattatgtatatatatttaaatgaataattaatgaaaattgtttttaattatttaaaaaaaaaaaagaagaagaatattattttgtggaggtagtgtgtgtaaattttttgatgtgttatggtggagttatttttaatatttaatggttagaaaattgagtaaatatagaattaataaagaaaagatttttttatattatataaaattagtttataaaagagtatattgttgtggaaaattttgagataagtatagggattttttttatagtgatgatattttatgtttgtaggtattagttataaagttaaaaaatttttttttatatattaatattatagaagtgattgttgttaattattgttagtatgatttattttttttattatatttttattatttttttttttagtataaaatatattatatttaaagaaataagttattaattaggattaaaaatttttttttttattttttgtaagtatttgatagaaaatgtttttagttgatattttatttgtttgaattttgtttttattttttaaaaatattgggattatttttttttttagatttaatttgtaggataaaagttattatataattataaaagttattttatttttttttaatttatgaaatttgtgatttttattaatgttttataaaattataatttatttttaatattattttttttggttttatttttttttttttaaaataagttattaagtgagaagttatttaatgtttgtttttttgatagatttggaagttagatttaggaatttagtttatttttattttattgtttattgatttatttaatttataaatattgattaattattaagtattattattttaagtattaatgtttgtatataatggtaggtatttttagtgagtattaatttggtattaggtattttattaagtatttttattatttttttatgtgttggatattattattatttttgttttatgtatgaggaaattgagatagattaaataatttgtttaggaatttatatatagatagtttaaattttaatttttgataatatgatgaagtatttgttttttttttttttttttttgagatggagttttgttttgttgtttaggttggagtgtagtggtgtgattttgatttattgtaagttttgttttttgggtttatgttatttttttgttttagttttttgtgtagttgggattataggtgtgtgttattatgtttggttaatttttgtatttttagtagagatggggttttattgtgttatttaggatggttttgattttttgattttgtgatttgtttgttttggttttttaaagtgttgggattataggtgtgagttattgtgtttggttgaagtatttgtttttaataagagtattttggatattaaagggttttagagtatgagagaaaaaagttagaaaaaaaaaaggaatagtaataataattttttaaaaagtagaaataaaaaggtaaggagttaatatttattagattttattttttatttaaatatgtatatttatatatagtattgttgaattgatttatagtttttaggttttatagaggagtgtagtgaaaaggaagataatttatatagtatagagttgaatataggatttataaataaaaaaaaagttaaggaatataaagtagtttttttaggtgtaaagtattgggtttagaattttatgaggttagggagaagataaatgataaaagttataagagattagaatgaaaagagatttataagtttaagaagtttaggtttttgaggagaattatgaatttgagtaggattttattaatttttttaaaaagtagttattgttttaaagtatgattttattagtataggtaggaaagtgggagtgaggaaaggtttagagttttttagtttggttggggttagataatttgtttggggaaatagtgggagttgaggttgaaaagattgattggttttatgtttgtggtaggttttgtttaaaaagtaataggaagttgttgaaaggttttgtgtaggggagtgataggattaaggtattatttagtaggaagttatattaaaagtagtaatttgataaatggtaaatatgatagaaggaaaaaaaataataggaattttttttataatgatttgattttgaggtaataaatgtttgagttatattggaagtaggggttttagaaggaaggtgtagatgggaaaggtttttttgggtggtggtgttttaatgtaaggagggtgtttgaattattgatagattttaagttaagggagtttttgtggttgaggttagtaagttatatgtatagttttttaaaggtatgtatggggaatgttagttttggttaaaagattgatttaagttatgtttgttattttgagtaattaaaattatttattatagggtaggtgattttataaagtaaattaagttatttggtttatgttttttattttttggagggagatggaaaagttttgggagtagtttttggttaattggaaagatatttttttattttttaattattatttttaggtgttttagggagggaggatgattttttgatggtttttttgttgttttttttttgggttaattatgaaattttgggtatttttgattttattttgttagggtttgggaggggttttttagtataaagtttgtagtattagatagttgagtttatttgtttgatatttttagtgttagagggatatagttaatgtggggttttttttaggttgatagttgttttttagttattgttgtgagtttgtttgtttttgttttgtttgtgtattttttgtagttgttttttgttaagttttagtgtttgtttttattgttgatgattgtggggaggaggatggagatgttttgtgttggtagggtttttgtgttgttgttttgtttgggtaagttttttttttttggtttttggttgttttaaagaggagataaataaggaaggtttttgtgtatttgttatttgataagtatggagttgtttttaggtttaagtgtgttttatttaaaattatgttttgttttgtgagtttgtttttttttatggtgggattggggtgggggggattggggattgatgttaaaatgttttttattggtgaattaattattggtatatatgttatgtatggattgaaatatttttttattaaataaaataaaaagttgttgaaaaagttttttttttttttttgaaaagttgttagttttagaaatttaaaggtttggaatgtattgttaatattttatgttttgtttttttttgttggagagtggggaatagaaattagtgtaagaaattttttggaggggggaaaaagttttttttttttgttttgtgtttagttttttaaaatttagtttggtttagtttttttggaggagttggtatgtgttagtgttagttggttgagttttagatataagagaaataaaatattggttgagggtatttggagtagaagggttttgggtaggttttggtgttttttattgttttttgtttttatatttgttgtttgtgtttttttttgtagttttttaagtagtttttggagtaagtgttttgtatttgttgttaattgtattttatagtttgtgattgttgagggtatttaaatgttagtttttttatttgagatgatttagtttaaggggaaaaattttttaaatagtttttttgttaaaaaaaaattatttttttttaattttttaaattttagtttaaggaatttgaaagagtttgaagttgtatatgaatattttaataaaaaaataaaagttattattagttttatattttttttggagttggaatgaggttgattttttagatattttaattttatttgtgaaggatgtgattgttaaattattattttggtatattttattttaggggttgagagatttaatgaaatgtatattatgtataattgaaatttataagtttaagtttaggaatataagtggaaattagatatgtggtttttgttaaaattgagttaagaaagatttgttagaagatttttagtaaataatgtggttttgttgtttttgttttgaaaagaattaaattagaaaggtgatagtttttttagagttagaaattaattttgaggttagaataatttagtatttattattttttttatatgtaaggttgtatttgaataatgtatatgtttgttttgggtgttttattgaatattttaatttgagatagttagagtttgtgaataatttggttattatttattagtgtgtgtgttgtgtgtgtgtttgttgttatgaaagtgtttattttttttattgtattatttaattatagtttatttattttgttagttgttaagtttatttttaaatgagttaggttagtttttgtttttttagtttgtttggatatttttttgttattaggaaagtttttgttttaagttttgtattatatttttaaattttatttagttatgtagagtttatagttttattttggtaagattatttgttatttttgaaattgtttttttttttttaaataaaatattttttaaaaatattttttttaaattttgttttttttttagtaaaaaagagtgagatatttattttaaattttagtatatatgttataattgttttatgtagttatgattagggaataaagttttagtttttatttttaatatatatagatttaaattgttatgtataattatttggttatttttaaattttatatttgtttaatattgaggtttttgttttataaattggggaattgtgatttaagtttatatagaaaaatagtgataaagtgagagtttatatttgggtttgttagtatttttggtttattgaatattaagtagaagagttgaaatattggataatatttttttaaataatttataattttagagtagaattttgttttttttattttgtgatttttttaaagagaggaggataaatttttatgttgaattttgtagttatgtttaggggttttttatttaatattaaatatttttatttatgtttatatgggtttttgaatatgtttttgaatgatatttttaagataatttagttgtattttattaatgagagagaattaagtagaagaaatatttttttttgaaaatatgaggagtataaattttaatgagataataggtttgtttttgattatttttgttgattttgagagtttatgagttatttgagttttggtataatttgagatgataaattttgttagaaaatgtgatgataggttttttttgtttggattttgattaggtatttttattattttttgtatagttttgttatgtgagtagtttgggtaattggggtgtttgatttagtattaagatttaaatttaggagttgagaagaaaattaatagttattaaatgtttattgtgtggtagttatgttgtgtattaggtgttttaaatatattattatttttattttttaaaataattgtgtgaggtagatttgattagtttagtgaagttaagtattttataaagatttagagatagtaaatggttaggttattttgtgataatgaggaaagagttaatgagatttagggttagtaggagtataataaatatagtagattttaatagagaagtttta

SEQ ID NO: 545 - DNA, 6178 bp, Artificial Sequence
  chemically treated genomic DNA (Homo sapiens)
tggaatttttttattagaatttgttatgtttattatgtttttgttaattttgaattttattggttttttttttattattatagagtgatttggttatttattatttttgagtttttgtaaggtatttgattttattgggttaattaaatttattttatatagttattttaagaagtagaggtgatgatgtatttaaagtatttaatatataatatggttgttatatagtaggtatttagtaattgttagttttttttttaatttttggatttgggttttagtgttgaattagatattttaattatttaagttgtttatatggtaagattgtgtagaaggtggtgagggtatttggttaaaatttagataggaaaggtttgttattatgttttttgataagatttgttattttaggttgtgttaagatttaggtaatttataaatttttagagttaatagaaatgattaaagataagtttattgttttattgagatttatgttttttatatttttaaaaaagaatattttttttgtttaatttttttttattgatgaagtatgattaaattattttggagatgttatttaggaatatatttaaaaatttatgtaggtatgaataaaaatgtttgatgttaaatagaaagtttttgaatataattgtagaatttaatataaaaatttatttttttttttttagaaaaattataagataaaaaagataaaattttgttttaaaattatagattatttaaaaaaatgttatttggtattttaatttttttatttaatgtttagtaggttaaaaatgttagtaagtttaagtgtggatttttattttgttattatttttttatgtgaatttgggttatagttttttaatttataaaataagagttttaatattaaataagtgtaaaatttaaaagtaattaaatgattgtgtatagtaatttaaatttgtatgtgttaagggtggaggttggaattttattttttagttataattatataaagtagttataatatgtatgttaaaatttaaaataaatgttttgtttttttttgttgggggaaggataagatttgggaaaagtatttttaggaaatattttgtttgggggaaagaaggtaattttagaaataataggtggttttgttaaaataaggttatgggttttgtataattgaatagagtttagagatataatatagaatttgaaataggaatttttttagtggtagagaaatatttaaataaattgggaaaatagaaattgatttaatttatttggaaatgggtttggtagttgatgaaatagatgaattataattaagtaatgtaatgaaggaggtaagtatttttatgataataaatatatatataatatatatattagtgggtagtaattaggttatttataggttttggttgttttaaattagaatatttaatgaaatatttagaatagatatgtgtattgtttagatgtaattttatatgtggggaaaataataagtgttaagttattttgattttgaggttaatttttaattttaggaagattgttatttttttaatttaattttttttaaaataaagatagtaaagttatattgtttattgagaattttttagtaagttttttttagtttagttttggtagaaattatatatttagtttttatttgtgtttttggatttagatttgtaagttttaattatgtatagtatgtattttattaggttttttaatttttgagataaggtgtgttaaaataataatttaatagttatattttttataggtagagttagagtgtttggggaattagttttattttaattttagggagaatatgagattggtggtaatttttatttttttattaagatatttatatatgattttaaatttttttaaattttttaaattgaagtttaaggaattggaaagaagtaatttttttttaatagaaaggttatttagaaaatttttttttttgaattaaattattttaaataggaagattggtatttaaatatttttagtgattataggttatggagtgtaattagtagtaagtgtagaatgtttgttttagaggttgtttgggaggttgtagggaaaaatgtaagtagtaggtgtaggggtgaagggtggtggggagtgttaggatttgtttagggtttttttgttttagatatttttgattagtgttttattttttttgtgtttggagtttagttaattggtattggtgtatattagtttttttgggaaagttaaattaggttaggttttagaaaattgagtgtaagatagaggagaaaagtttttttttttttttaaaaaattttttatgttagtttttattttttattttttaataaaaaggaataagatatgaaatgttaatagtgtgttttaggtttttagatttttaggattggtaattttttaaaaaaaaaaaaaaagtttttttaataattttttattttgtttaataaggagatattttaatttatgtataatatatatgttaataattaatttattaataaaaagtattttaatattgatttttagttttttttattttagttttattataggggaagatagatttataaaataagatgtaattttaaatagagtatatttgaatttggagataattttgtatttgttgaatgataaatgtataggagttttttttatttgttttttttttggggtggttggaagttagagggggagaatttatttaggtagagtagtagtgtagggattttgttggtatagagtatttttatttttttttttgtggttattggtgatgggagtgggtgttggggtttggtggagggtggttgtggagagtgtatgggtagggtgggagtagatgggtttgtggtagtggttggagagtggttgttagtttagaagggattttatgttggttgtgtttttttgatattggaaatattaggtaagtgagtttaattgtttggtgttgtgaattttatattagggagttttttttgggttttaatggggtgaggttaagagtgtttagagttttataattggtttgagggaggagtggtaggaggattgttaggaagttattttttttttttggagtatttgagagtagtggttgaggaatgaaaaaatgtttttttgattggttggggattatttttgaaatttttttatttttttttgggaggtggggagtgtggattagatggtttggtttgttttgtggggttatttgttttgtagtgggtggttttggttgtttagggtgatggatataatttgaattagttttttagttaaggttggtgttttttatatatgtttttggagagttgtgtgtgtgatttattaattttagttatgaaaatttttttaatttgaagtttgttagtgatttaagtgttttttttgtattgaaatgttattgtttagaaaagttttttttatttgtgttttttttttgagatttttgtttttaatgtggtttaggtatttattattttaaagttgagttattgtgaagaaaatttttgttattttttttttttttgttgtatttgttatttgttaggttgttgtttttgatatgattttttattaagtagtgttttaattttgttgtttttttgtataaaattttttaatgattttttattgttttttggataaggtttgttataaatgtgaagttaattggtttttttaattttagtttttattatttttttaggtaaattgtttgattttagttaggttggaaaattttaagtttttttttatttttatttttttgtttatgttgatggagttgtattttgaggtaatggttattttttaaaggaattagtgaaattttgtttaaatttatggttttttttaagggtttgggttttttaggtttgtggatttttttttattttgattttttatagtttttgttgtttattttttttttagttttatagaattttagatttggtattttatatttgggaaagttattttgtattttttgattttttttttgtttgtaagttttatgtttagttttgtattgtgtaaattgtttttttttttattgtatttttttataggatttaagaattgtgagttaatttagtagtattgtatgtaaatatatatatttgaatagaaaatggaatttaatggatgttaattttttatttttttatttttattttttaaaaaattattattattattttttttttttttttggttttttttttttatattttaaggttttttaatgtttagaatgtttttgttagaaataaatattttggttgggtgtggtggtttatgtttgtaattttagtattttgggaggttgagatgagtggattatgaggttaggagattgagattattttggataatatagtgaaattttgtttttattaaaaatataaaaattagttgggtatggtggtgtgtgtttgtagttttagttatatgggaggttgaggtaggagaatggtgtgaatttgggaggtggagtttgtagtgagttgagattgtgttattgtattttagtttgggtgatagagtgaaattttgttttaaaaaaaaaaaaaaaagaaataaatattttattatgttattaggggttaagatttaaattgtttgtgtgtgaatttttggataagttatttaatttgttttaatttttttatatgtaaaatagggataataatagtatttagtgtataggaaaataatgaaagtgtttagtagagtgtttagtattgagttagtgtttattaaaaatatttattattatatgtaaatgttgatgtttaagatggtggtatttggtagttggttaatatttgtaagttaaatgaattaatgaatagtaggatagaggtaggttgggtttttaagtttagtttttaaatttattaagaaagtaggtattgagtgattttttatttaatagtttattttggaaaagaagaaatggaattaaggaaaatgatattagaaatgggttatagttttatggagtattggtagagattataagttttataaattagaaagaggtaaagtgatttttatggttatataatggtttttgttttataaattggatttggaaaaaaaaatagttttagtgtttttgaggaatggaagtagaatttaaatgaatggaatgttaattgggagtattttttattaggtatttgtaaagagtgagaggaagagtttttaattttgattaatggtttgtttttttaaatatagtgtgttttatgttgaaaagaaagatggtggggatgtgatggggagaatgggttatgttgataataattgataatagttatttttatggtattgatatgtgaagaggaattttttaattttgtaattaatgtttgtaagtatgagatattattattgtgaaaaaaatttttgtgtttgttttaaaattttttatagtaatgtatttttttgtaggttgattttatatgatgtgaagaaattttttttttattagttttatgtttatttaattttttagttattagatattgagaatgattttattatgatatattagaggatttgtatgtattgtttttgtaaaatagtatttttttttttttttttttttaaataattgggaataatttttattaattgtttatttaaatatatatatatagtatgtggtataattataattttttttaaaggtataaagtttatttaaagatagaatggtttgggaagaaaataattgggttatatagaattttttaattaggaagttattttaatatattagtaatgttagtaatttttagtttgagatgtattgggatttttttttaaggggttggtaaattgaattatttatagattaaagtgtgtgtatatatatatatatatatatatatatatatatatatatatattattttaaatatatattaagtttttatgtaattagtaatatgtatttattttaaattgatattgaatttataaatgttttgtggtatgtgtttttttgttgatatataataaatatataagtgttgttaaatggggaagaagagttttgtaaaaaataatttttttaaattaaaagggagtt

SEQ ID NO: 546 - DNA, 6134 bp, Artificial Sequence
  chemically treated genomic DNA (Homo sapiens)
ttttagttagaatgtgagtgttatagatatagttaagtttagtgttgattaatattttgttttagaagaatttttataaggttttttgtagaatgattttgtgtttagtttaggagagttagggttttttttgattttgttttggagtttttttaagtatttaaattatttgatggggataaatggagaggatagatgagggagtagggtggagtgttttagtagaatgttttttatttagaatttgttgttattttgtagttagtaaggatgtggggttaagaattaaggttagggttttataggaaaaaggtaaagggggaggggtgggaatttaagtttatttttttttttaagtatttaaaggttttttggatggagaagagtattggagtaaaaattttagtataaattttattggggatagtgggtaattttgttgggttagtaaaaataaatggtgtgggttttggaaaatgagggttggaggttgtgaataaagtagtggatgtgtttgtttagtatattaatgggaagaagtatttagatgggaggagtattaggggtaggagaaatgttagatagattttagtgttagggtaagaaggaagattattttgtttgtagaatagggagggtatagggatggtgttaatttgtttttgtgatggttttgagtttttatttaataatgagaaagtttgtttttttttttttttttggatgatttaggagttttgggttgggatgtagtgattttatttttagtttttttttttttggtgatgaatttttttatttttatttagaaaatagatttggattagaggtattgtatagtttttttaggattttaaaggaggaagagtttttttttttgtttttaaagttgtttgttggaagaggattttaatagttattttagttggatgtatagtaggattatggaattttttttttgtattatagggatttattttttattttattattgtttataaaaattgatggttttttttttgagatagagttttgttttgttttttaggttggagtgtagtggtgtgattttggtttattgtaatttttgttttttgggtttaagtaattttttgttttagttttttaagtagttgggattataggtgtttgttattataattggttaattttttgtatttttagttgagatggggttttattattttggttaggttggttttgaatttttgattttatgatttatttattttggttttttaaagtgttgggattaaaggtgtgagttattgtatttggtttaaaattgatgtttttttttttttttttaatatataatttgggattttttagttttttattttttttttttttttttttttttttttgagatagagttttgtttttttatttaggttggaatgtagtggtttagttttgatttattgtaatttttgttttttgggtttaagtgatatttttgttttagtttttttagtagttgggattataggtatatattattatggttagataatttttttgtatttttagtatagatggggttttgttatgttggtttggtaggttttgaatttttggttttaagtgatttgtttgttttggttttttaaaatgttgagattataggtatgagttattaagtttagtttttttttttttttttgagatagagttttattttgttatttaggttggagtgtagtggtatgattttggtttattgtaatttttgttttttggttgaagtgatttagttttttaagtagttgggattatagttatatattattatgtttggttaatttttgtatgtttagtagagatagggttttattatgttggttaggttgattttgaatttttgattgtaaatgatttatttgttttggttttttaaagtattggtattagaggtgtgagttattgtatttggtttttttttttatttttgagatagagttttattttgttatttaggttggagtgtagtggtatgattttggtttattgtaatttttgttttttaggtttaagtgatttttttgttttatttttttaagtagttgggattataggtgtgtatttttgtggttagtttttttttttaattggttagtgttttgtggtttttttatttttttatagtggaaaatggtttaggattgattgatatgaagataagtttaggggtttatatttaatttaatttttgtatttaagttttgggttaagattttggtgtgttgagtattatttattttgtaaggaattttgtaaaattttatttgaagtattatttataattttattttttttatttaaataaggatttttgttttatttttgttaggtatattgagttttatagtttttgttttttttttttggtgtttaggtttggttttttgagtttggtggttatattaatggtatttggtatatagttttttgataatggggatatttaggaggttttgagatattttatagttttgggttagtaatttggatttttttttttatttttttaggtattttataatttagttttttttttttttgtgggtaaagtgtttttgaatgtttatggtttaaaataagattttttttttatttatttttaaatttttttttagatttattttagaggaagggaatagaattttttatattttagtagttggtgataggttagaatagggaagaggtgagggtttagttggttttatataggagtgtagatggaggagtaggatttttttttgttttttaagtttttttaaatatattttttaatttttggtgaggatttttttttttttatatttttttttagtttttttaaggagggagtaggagtatttgaatgtggaaattgaggtgttagtttaaattgtttggttggttttagttatagttggataatgtttggtttaggtttattataagttatatagttgttttttttgtgtttaatttgtttgtgatagaaattaagggggttttggtatttagtatttaggtggtggaattggggttttatgtatggttttgtgggtaggtttttggttaggatttgtggggagttatgtagttaggagggtggggttgtttattgatttaggatgtggtaatggattggggagggtggagttttagtgattgtttttttttttgtttgttggtattttttggtttttatttggttttggtgtggtttgtgagttagtgaggtttgtgtggtgaagtattgtttgagttttgagtttgagtttttttggttgtagtagttattgtttgttgtgttgttttaggttattttgaaagaaggtgtttttgttttgtttatagttgtatttgtttgttttttagttttgtgtgtttgtagttgttaattattgttttggttgtgtgtgtgtgtgtatgtgtgttagtgtgtgtgtgtgtttgggttagagttgtgttgtaattgttaagattgaaatgtagattgttgggatttagtttttgttttattggggtaggaatgttggggtggggatatgtatgttttgtttttaggaatgattttattgttttggagttttatttatagattttatttattatagggaatgggggtgggtgttagtgtttgggtaagtgtataagagtggtttttggttggaggtgagggtgggaaggtgtgggaagtgtgtgtgtgtggagtttgggttagtttgggtttgggtttgtttgtagtgggtggagtatttgtggagttggtaatttaggttttttttttagtttttgtgtagaattagtttttttgtgttgttgggaaattggtaattagaatgttttttgtgtgtggtatttaggtagtttttgagaatgtttgtattgtggtttgtttatttttgttttttttatatgtttttggttttgtgtttattatgtttgtgttttgttttattgtgggtttttagtttaggttttggggtttgtaatagtttaggtagatgagtgtgtggtagtggtagtggtaggtgaatttgtaatttgtagagaggtttggtggtgaggtggaggagttttaggttggggaaatgttttggagattgaagggaagttttagggagagggttgttgtttgttaggttttgtaggtttgatttattttagtgggttattttatattgttatgtggattttaatgttggttatttgggtgtttggaaattggttggaaggttataggtagagaggtttgtttaatagttggatttttattgtttagtatagaattttttttttttttattggtaattaaaaaaataataataaaaaattgtgttttgtttttgttatttaggttggagtgtaatggtgtgattttggtttattgtaatttttgttttttgggtttaagtgatttttttgttttagttttttgagtatttaggattataggtgtttgttattatgtttagttaatttttgtatttttagtagagatggggttttattatgttagttaggttggttttaaatttttgattttaggtgatttatttgttttggttttttaaagtgttgggattataggtttgagttattgtatttggttttttattgggaatgtatatggaatatatttgtttatttatttgaaggaaaaattaaatatttttaatttatgtttgttttgtggttgttatttgtttttattttttttagattaagatattggtttttatatattttaattttttgtttttatttttttttttatttattttagttaggtttgtttttttttttaggaaattgtttgggatagggtttttagtgatttgtgtattattaaatggaatttagtgttttattttttatttttatttttttagtattatttgaagtttgttttttttgatttttaggggttatatttttttagttttttttttattttttgtagtttttgtttagtttttttgtagattttgatttaatttttatattttatgatgaagtttgggtttagttttgattattggtttggtttgtttatatttatttgttttagatttatggttgaaatattgatttaaatttttagattagattttttgtgttagtatttttattaggatgtttaaaagatgttttaagtgaatatggttaaaatttaatttttttttttttagttttattgttatatttgtttagttttttttttgtagtaaaaatggttattaggtttttagttattggagataaaagtttaaatttatttttgattttttttttgtttttatttttgataaatatgtttaaattattttgttttttatttttatggttattttatttttttttgagaatgttgtaatgttttagttttgttttttttttttttttttttttttttgagatagagttttattttgttgttaaggttggagggtagtggtatgattttggtttattgtaatttttgttttttgtgtttaagtaatttttttattttagttttttgagtagttgggattataggtatttgttattatgtttggtttatttttttttattttttagtagatatgaggttttattatgttggttaggttggttttgaatttttgattttaggtgatttatttgtttttgttttttgaagtgttgggattataggtatgagttattgtgtttggttttttgtttattttttgtattttgttataattttgtgttttttttagttgaatttgtgatgtttttttgtattggatgagagggtttttatgtatatatagatttgggatattatttatttataagtttttaaataggttagagtagtgatgtttaatttagattttatgttataataatttggggagtttttaaaatttattgatgtttagggtttatttttagtagttgatttaataggtttgtggtgggatttaggttagtggggaggattgtaaaagtatttttggtgattttagttggtgtttatttaggggagagtaatttttgtttgttggtgatttttaggggtgtagaaggattgttgggtgtgtggttgtgtgtatattttagtatttgatttattgggttag

SEQ ID NO: 547 - DNA, 6134 bp, Artificial Sequence
  chemically treated genomic DNA (Homo sapiens)
ttgatttagtgaattagatgttaaaatatgtatgtagttatatatttagtagtttttttgtatttttgggaattgttagtaagtaaaggttgtttttttttgggtagatattagttggaattattaggggtgtttttatagttttttttgttagtttggattttattgtagatttgttgaattaattgttgggagtggattttaggtattagtaaattttaaaaattttttaaattattgtaatatggagtttgggttgagtattattgttttggtttatttaggaatttgtggatggatagtgttttaggtttgtgtgtgtatggagatttttttatttggtataagaggatattataaatttagttggggggagtataaagttgtgatagaatgtaaagaatgaataaggggttgagtgtggtggtttatgtttgtaattttagtattttggaaggtggaggtgggtggattatttgaggttaggagtttaagattagtttggttaatatggtgaaattttatgtttattaaaaaataaaaaaaaatgagttaggtgtagtggtgggtgtttgtaattttagttatttgggaggttgaggtgggagaattgtttgaatataggaggtggaggttgtagtgagttgagattgtgttattgttttttagttttggtgatagagtgagattttgttttaaaaaaaaaaaaaaaaaaaaaaagaataaggttgggatattgtagtgtttttaaagagaaataaagtagttatggagataagaagtaggatgatttgggtatgtttattagaggtagagataagggagaaattaaagataagtttgggtttttgtttttagtaattgggagtttagtggttatttttgttgtaaagaggaagttgggtaagtgtagtagtgaggttgaagaaaagggaattaaattttggttatgtttatttgaaatgttttttagatattttagtgaaggtattggtatggaggatttagtttgagggtttaggttagtgttttagttgtggatttggggtagatgaatgtagatagattaggttagtgattaggattgagtttagattttattgtgagatatggaagttgagttagaatttgtaaaggagttgagtaggagttgtagggggtaggaggaaaattgggagagtgtagtttttgggagttaaagggagtaagttttaaatgatgttgagggggtgagaatggagaatggaatattggattttatttggtagtatatagattgttgaggattttgttttgggtagttttttggaggaagaggtaagtttggttggagtgggtagaggggagagtgaaggtgaaggattagagtgtatagagattagtgttttggtttgaggggagtagagataggtgataattatagggtagatgtaggttaaaggtgtttagttttttttttaagtaaatgggtagatgtattttatatatgtttttagtgaagggttgggtgtggtggtttaagtttgtagttttagtattttggaaggttgaggtgggtggattatttgagattaggagtttgagattagtttggttaatatggtgaaattttgtttttattaaaaatataaaaattagttgggtatggtggtgggtgtttgtaattttaggtatttaggaggttgaggtagaagaattgtttgaatttaggaggtggaggttgtggtgagttgaaattgtgttattgtattttagtttgggtgataaaagtaagatgtagttttttgttgttgtttttttaattgttaatgaggaaaggggaagttttgtgttaggtgatagagatttaattgttgagtaggtttttttgtttgtggttttttggttggtttttagatgtttaggtggttaatattagagtttgtgtagtagtgtgaggtaatttattgagataggttgggtttgtggagtttggtgagtagtggttttttttttggggtttttttttaatttttgggatatttttttgatttggagtttttttgttttattgttaggtttttttgtagattgtaagtttatttgttattattgttgttgtgtgtttgtttgtttggattgttgtgggttttgggatttgggttgggaatttgtggtggagtgggatatgaatgtggtgagtgtggggttgagggtgtatgggaagggtgaggatgggtaggttatagtgtaggtatttttgagggttgtttgggtgttgtgtgtaaggagtgttttaattgttgattttttggtggtatagagaggttaattttgtgtgggggttgggaggggagtttggattgttggttttgtaagtattttatttgttgtaagtggatttgggtttaggttgatttaggttttgtgtatgtgtattttttgtatttttttgtttttgtttttggttagaggttatttttgtgtgtttgtttggatgttggtatttgtttttgttttttgtggtaggtggggtttgtgagtggagttttggagtgatgaggttatttttgggggtgaagtgtgtgtgtttttgttttggtgtttttgttttaatgagataagagttagattttggtgatttatgttttagttttaatggttgtggtgtggttttggtttgggtgtatgtgtatattgatatgtgtatatgtatgtatgtgattggggtggtggttggtggttatggatgtgtaggattgggggatgggtgggtatggttatgggtgaggtggaggtgtttttttttgaaatgatttggagtagtatgatgagtagtggttattgtagttaagaggatttggatttggagtttgagtagtattttattgtgtgaattttgttagtttgtaggttgtgttgggattaggtgggagttagggggtgttggtgggtgggaggggaagtggttgttggagttttgttttttttggtttgttgttgtgttttgggttggtgggtagttttatttttttggttatgtggttttttgtgggttttggttggggatttgtttgtggaattgtgtgtaagattttgattttattgtttagatgttgggtgttggggtttttttggtttttgttatagataggttgaatatggaaaaagtagttgtatggtttgtggtagatttgagttgggtattatttagttatgattaaagttgattgagtagtttggattagtattttgatttttgtgtttgaatgtttttgttttttttttggggagattaggggaggatgtggagagggaagagtttttgttaggaattgagaagtatgtttaggaaaatttgagaggtagagagagattttgtttttttatttgtatttttgtatggagttagttgagtttttattttttttttgttttggtttgttattagttgttggaatgtggaagattttgttttttttttttagggtggatttggagaaagatttgggaatagataggaaagaagttttgttttggattataagtatttaggagtattttatttataggaagggggaaagttagattataaaatgtttaaagaggtggaaaaagagatttaggttattaatttaggattgtaaggtgttttggaattttttaggtatttttattattggagaattgtgtgttagatgttattggtgtgattattaggtttagagaattaggtttaggtattaggaaaaagaaatagggattgtgaagtttagtatgtttggtagaaatggggtggaaatttttatttaagtaaagaaagtggagttgtgagtgatgttttagataaaattttataaaattttttataaaatgggtggtgtttagtatgttaaaattttagtttagagtttgggtgtaagggttgagttgagtgtagatttttgggtttgtttttatgttagttagttttgagttattttttattgtggaaaggtgggaaaattataagatattaattaattgaaaaggagggttagttatggaggtgtatatttgtaattttagttatttgggagggtgaggtagaaggattatttgaatttgggaggtagaggttgtagtgagttaagattgtgttattgtattttagtttgagtgatagagtgagattttgttttaaaaatagaaaaggaagttaagtatggtggtttatatttttaatgttaatgttttgggaggttaaggtaggtggattatttgtaattaggaatttgaggttagtttggttaatatggtgaaattttatttttattaaatatataaaaattagttgggtatggtggtgtgtgattgtagttttagttatttgggagattgaattattttaattgggaggtaaaggttgtagtgagttaagattgtgttattgtattttaatttgggtgatagggtgaggttttgttttaaaaaaaagaaagaaggttgggtttggtgatttatgtttgtaattttagtattttgggaggttaaggtaggtagattatttgaggttaagagtttgagatttgttaggttaatatagtaaaattttgtttgtattgaaaatataaaaaaattatttggttatggtggtgtgtgtttgtaattttagttattggggaggttgaggtaggagtattatttgaatttagaagatagaggttgtagtgagttgagattgggttattgtattttagtttggatgagagagtaagattttgttttaaaaaaaaaaaaaaaaaaaaagaaagaataggaggttgagaagttttaagttatatgttaaaaaaaaagaaaaaaatattagttttaggttaggtgtagtggtttatatttttaattttagtattttggaaagttgaggtgggtggattatgaggttaggagtttaagattagtttggttaaaatggtgaaattttgttttgattaaaaatataaaaaattagttagttgtggtggtaggtatttgtaattttagttatttgggaggttgaagtagagaattgtttgaatttaggaggtagagattgtaatgagttaagattgtattattgtattttagtttggaaaatagagtgagattttgttttaaaaaaaaaattattagtttttatggatagtggtagagtggagggtgggtttttatggtgtagaagggaaattttatggttttgttgtgtatttgattgggatggttgttgaaatttttttttagtaggtagttttggaaatagaaaaagaaatttttttttttttagaattttggaagggttgtgtagtgtttttaatttaagtttgttttttgagtgaagatagggaggtttattattagaagggaaggggttggaaatgaggttattgtattttagtttagggtttttgggttatttaggaagggaagaaggagtaagtttttttattgttaggtaggagtttagagttattataagaataagttagtattatttttgtgttttttttgttttgtaaataaaatgatttttttttttgttttggtattagagtttgtttggtattttttttgtttttagtattttttttatttgggtatttttttttgttggtgtattgaataaatatatttattgttttatttatagtttttagtttttattttttagggtttatattatttgtttttattaatttgataaggttgtttattgtttttagtaaggtttgtattggggtttttattttagtgtttttttttatttaggagatttttggatatttggggaagaaaatgagtttaaatttttatttttttttttttattttttttttgtaaggttttggttttagtttttagttttatatttttgttggttgtagaatagtagtgggttttgggtaaggagtattttgttaaaatgttttattttgtttttttatttgttttttttatttgtttttattagatggtttaagtgtttaaggggattttagggtggagttagggagaattttggtttttttgggttaggtataagattattttataggaaattttgtgggaatttttttgggataaagtattggttagtgttgagtttagttgtgtttgtgatatttgtattttaattaggg

SEQ ID NO: 548 - DNA, 6210 bp, Artificial Sequence
  chemically treated genomic DNA (Homo sapiens)
gggtttgtaatagtttaggtagatgagtgtgtggtagtggtagtggtaggtgaatttgtaatttgtagagaggtttggtggtgaggtggaggagttttaggttggggaaatgttttggagattgaagggaagttttagggagagggttgttgtttgttaggttttgtaggtttgatttattttagtgggttattttatattgttatgtggattttaatgttggttatttgggtgtttggaaattggttggaaggttataggtagagaggtttgtttaatagttggatttttattgtttagtatagaattttttttttttttattggtaattaaaaaaataataataaaaaattgtgttttgtttttgttatttaggttggagtgtaatggtgtgattttggtttattgtaatttttgttttttgggtttaagtgatttttttgttttagttttttgagtatttaggattataggtgtttgttattatgtttagttaatttttgtatttttagtagagatggggttttattatgttagttaggttggttttaaatttttgattttaggtgatttatttgttttggttttttaaagtgttgggattataggtttgagttattgtatttggttttttattgggaatgtatatggaatatatttgtttatttatttgaaggaaaaattaaatatttttaatttatgtttgttttgtggttgttatttgtttttattttttttagattaagatattggtttttatatattttaattttttgtttttatttttttttttatttattttagttaggtttgtttttttttttaggaaattgtttgggatagggtttttagtgatttgtgtattattaaatggaatttagtgttttattttttatttttatttttttagtattatttgaagtttgttttttttgatttttaggggttatatttttttagttttttttttattttttgtagtttttgtttagtttttttgtagattttgatttaatttttatattttatgatgaagtttgggtttagttttgattattggtttggtttgtttatatttatttgttttagatttatggttgaaatattgatttaaatttttagattagattttttgtgttagtatttttattaggatgtttaaaagatgttttaagtgaatatggttaaaatttaatttttttttttttagttttattgttatatttgtttagttttttttttgtagtaaaaatggttattaggtttttagttattggagataaaagtttaaatttatttttgattttttttttgtttttatttttgataaatatgtttaaattattttgttttttatttttatggttattttatttttttttgagaatgttgtaatgttttagttttgttttttttttttttttttttttttttgagatagagttttattttgttgttaaggttggagggtagtggtatgattttggtttattgtaatttttgttttttgtgtttaagtaatttttttattttagttttttgagtagttgggattataggtatttgttattatgtttggtttatttttttttattttttagtagatatgaggttttattatgttggttaggttggttttgaatttttgattttaggtgatttatttgtttttgttttttgaagtgttgggattataggtatgagttattgtgtttggttttttgtttattttttgtattttgttataattttgtgttttttttagttgaatttgtgatgtttttttgtattggatgagagggtttttatgtatatatagatttgggatattatttatttataagtttttaaataggttagagtagtgatgtttaatttagattttatgttataataatttggggagtttttaaaatttattgatgtttagggtttatttttagtagttgatttaataggtttgtggtgggatttaggttagtggggaggattgtaaaagtatttttggtgattttagttggtgtttatttaggggagagtaatttttgtttgttggtgatttttaggggtgtagaaggattgttgggtgtgtggttgtgtgtatattttagtatttgatttattgggttagaaaagggtgtttgttaaataaagatttaataaaatttttgtttgtagggggtttattaaaggttttaaatttttttaggtttttttttataggtggtaatttttttttattttaaaggttttggagggggttatgagtgtttgagaagaggtaagtttgggaagatggattttgaggatagtaggtataaatttttttttaagaagggttaaggtattttaaagataagaaatttaaaattagtgtatttttatatataagtagttatttttgtttatttgtggtttagatatgagtggagtgtgataagggataaattatttttgtgtattttttagtgatggggtgaaagtaatggatttagtttttgggagttgtttttgttgattttttttgttgtgatttgatttgtggtgattgtgttgttttttggttgttttttttgtttttgtaggtgtgtggggttattatttatgtgtgtattgtaggtttttgtgtatgatgttttagatgaagttgttatagaggttgtattatgtgtgtgtggtgggttttgtgggttggaagtggtggttatggttagggattagttgttgtgtggggttgtatgtggtgttttgtgtgatgtgtagtgtgttggtatgttttagttgggtgtggttttttttagtgtgtttagtgggtgttagtttttgtagtttaatgagtttaggtttttttgatatggtttggttgggtttgtgttttgttggttttgggtgttagtaagtgtgggttgggtggggttatagggtgggttttgattttagtgttttttttaggatttagattgggtggtgggaaggagttgaggagagttgtgtaatggaaatttgggtgtagggattgtggggtttgaaggtggggttgggtgtgtttttgtagagttttttttgttttgttttttttttttttttttgttttttttttatattttattttggatggttataatgatggtgattgtaaagtattatgtggagatatttgtgtttttggaggttagttttattgtgttagaggaagagggtttttatatttggttttggtttttttggtttggtttgttgaagtaatatatttggtttatttattgggtggggtaggaagttttgagtttttatttggggtgaggaggagggagattggttagtagttttattgtttgttttgttttttattgtggagattggggttttggtagaggttggattgtgattttgaggtttaggggtgtattttgggtggatttttttggtatgggtggttggtttttagtaattgtagtttttatttggttttgttattttgggttgttaggatataagtttttttatgttttttttagtgtttgatttggtattttttgtaggtaggtgggtattgaggatggtaatgtatgtgggggatgtgggagtagggtttagaggtttaaggttttaggatatttttatttgtagtaatattatttattttggtattgtgagtagtgtttagaagtttttgtattgtagtaagtatagtggggttgttttggagttattgtttttagtatatttagtttgtaggttttagtttatttgggggaaagttaggaaggtttgattggttttggaaggtgggggtattttatttatatttatgttttttgtattttttttattttttttgttatttttataggttttatttttgtgtttgtagttgtaggttttgttttgaggggttgaatatatgttggagttggtgtttggtaattgtttgttatttgtttttgtttttttgttttagttgtttttagatttttgggatttaggagagagaagtggagagtggtaggaaggtgttggtaaagtgggatagtggttttgagtagttaattttttagtgtttatttgttttaatattaggttttttttaggaggttgggttttagttagggttagatgggttaggaaattttgtaagtgggttaggttgggtagttggtttagtagtgtgtttgtgaggaaggtttgaagttgtaagggtgtttagtggaggttagtgtgatgtaggtgttggttagggggttaaggaaaaggaaggggttgggttgggttgagaatgtttgtgggggtttatgttttattagttggtgtgttatttgaggtttaaggattgaaaagagtattggggttgaggtgggtgggtaaagataaatagtagggatgtagttggggtaggatggggagggtggtattggggttgtgggggttggtgtggagggagtttgattttgagtagttgttttttggtaaaatttgtgaggtagtagtgtgtttgagttttagggtttagtagtaggttgtatagggtgatttatatttgtttgtttaatttgtttagtttttgttgttttgagggggttatagtatgttaatggttgtttttgaattgttgtagtttgtttggggagaggaattagtatattgggtgtagatgttgaattttttttaagtgagttagttgtgggggttgggagattgattattgtttgggaatgggagaatttgggttgtaggatttgtttaggttatagggttgttgattttagagtagggtgagttttagtagtggatatatgggtttggtttgttgtagagtttaggtttaggttaattttggttgaggtattttggtatttttagtgggtttggggatagggtttgtttttgtgtgtgtaagttgtttttttttattaaaaagatattttgaagtagtagtttggggtttaggttggtgggggaggattttattttttttttgttggttttagggattatgttttagtagttttattaggaggtagggtaggttgtgtgtgttaagtatatggtttaaggtgttgagagagaggttaggggtagggatgttgtgaaggaggtgagtagaggtaggttataggtttggttttttagttttttatagtaggtttaggtttagttggattgtttatttgtttatatagtttgtgatgtagtgtagtattgagagggtttttagtgtaattttaaattttattagttttgtttgtttttgtagtttttgggaggttatatagtgtttatgttgggttatttttatttgtgtaggttttggggaatttagatttaggtttttataattttaggtaattttaatttatttgtatggggttgttgttttgggattttttttttttaggggggttattatagttattttgggttattagtagggttagtttgtggtggtaatagtttattaagtttaagatagtgttttttgttgatttatatattttttgggaaaaggaggagggaaattttttgtgtttgatgttttttttatatagatataatttttttttttgttaggttttgatttggaattgtggtttatgggtagagatagttttttattttgtggaagaatattgtttttaagaggttgatgatggaggttttgtggtgtatttgttagataaagagaaggatagggtttgaggaagggataggggttattagtttttttttttggtttagagttttttgaaggagtgagaagaggtatgaattaggggtttagtttattattatgtagatggggaaggtgttttggggtttgaagttttttattttgtagaatatagggaatattttttgtttttatatttttattgtgattagtttttttattagtgttgggatttttgaagggtagggtaaaggatagggatgagatgggtttatttttgtttggtaatttttttatttttggtttagtttaattttgatatttttaaatattgttgggtttttaaattattttagatttatgagtattttttttgattttttttttgtattttggatttttattattagttgtttttaatatttttgtggatgttttttatgtttatgtgattggtttttgtttagtttttagattgttttgttttgtttgtatttgtatttttattttttgtttgtttatttaggtattttttttaagtt

SEQ ID NO: 549 - DNA, 6210 bp, Artificial Sequence
  chemically treated genomic DNA (Homo sapiens)
ggtttgaaagggatgtttgaatgggtgggtagaggataagggtgtaggtgtaggtagggtaaggtagtttgggaattgggtaggagttagttatataagtatgagggatatttatagaggtgttgggagtagttggtaatgaaggtttaaggtgtaagagagaagttaggaaggatatttatgggtttggaatagtttaggggtttagtagtgtttggggatattagggttgagttgagttggggatgggagggttgttaggtaaaggtaggtttattttatttttgttttttattttattttttaaaggttttaatattggtggaggagttgattgtagtggagatgtggaagtagaaggtgttttttgtgttttgtagggtggaggattttaagttttagaatattttttttatttatatggtggtgagttgggtttttggtttatatttttttttatttttttagagggttttggattggggaggagagttggtagtttttattttttttttaggttttgtttttttttttatttgataggtgtattatgaggtttttattattaattttttggagatagtgtttttttataaggtgagggattatttttgtttatgggttatagttttgggttagggtttggtaggaagggagattgtgtttgtgtggggaaggtattagatatagaaagtttttttttttttttttttaggaggtgtgtgagttagtagaagatattgttttggatttggtagattattgttattgtaaattgattttgttggtggtttagagtggttgtggtggtttttttgagggggagggattttaggatagtaattttatgtaggtgggttgaggttatttagggttgtgaaagtttaggtttgggttttttaaggtttgtgtaggtgagggtggtttagtgtgaatattgtgtgattttttaggagttgtagaagtaggtagagttgatggaatttgagattgtattgaaggtttttttagtattatgttatattatagattgtgtggataggtgagtagtttgattgggtttgggtttattgtggagggttggaagattgggtttgtagtttgtttttatttattttttttataatgtttttgtttttagttttttttttagtattttgagttgtatgtttagtatatataatttgttttgttttttggtggaattgttggagtatagtttttggagttggtgggaaggaggtagggtttttttttattagtttaagttttaggttattgttttagggtatttttttgatagaggggggtagtttgtatatatgaagataaattttgtttttaagtttattgaggatattaggatgttttagttaaggttggtttagatttgagttttgtagtaggttaggtttatgtgtttattattgaggtttattttgttttggggttagtagttttatagtttgggtaagttttgtagtttaggtttttttatttttaggtagtggttagttttttagtttttatagttggtttatttgaagagaatttaatgtttgtatttagtgtgttggtttttttttttaggtaagttgtagtagtttgagggtagttgttggtatattgtggtttttttagagtagtaaaagttgagtaagttggatgggtaagtgtggattgttttgtataatttgttgttaagttttgaggtttaggtgtgttattgttttataagttttgttaagggatggttatttaaggttagattttttttgtattagtttttatagttttagtattgttttttttattttattttgattgtgtttttgttgtttatttttgtttatttattttaattttagtgttttttttagtttttgggttttaggtgatatattagttagtgggatatgggtttttataggtatttttagtttaatttagttttttttttttttttggttttttggttagtatttgtattatattggtttttattggatatttttgtagttttgggttttttttatagatatattgttggattagttgtttaatttggtttatttgtagagttttttggtttatttgattttaattgaaatttagttttttaagaaggatttggtgttggaataggtaggtattggaaagttagttgtttaggattattgttttattttattagtatttttttgttattttttattttttttttttagattttagaaatttgggagtggttggagtgagaaaatagaggtaagtggtaggtaattgttaagtattagttttagtatgtgtttagttttttagagtaggatttgtggttgtaggtgtgaaggtaaggtttgtggaaatggtagggagggtggaggggatgtaggaggtatggatgtgggtggggtgtttttattttttagggttagttagatttttttgatttttttttaggtgggttgagatttataggttggatgtgttagaggtagtggttttagagtggttttgttgtgtttattgtagtgtagaggtttttaagtgttgtttatgatgttagaatgagtggtattgttgtaggtgagggtattttagaattttggatttttaagttttatttttatattttttatatgtattgttatttttaatatttatttgtttgtagggagtgttaagttaagtattgggaaaagtatggaaagatttgtgttttggtagtttagggtgatagagttaaatgagggttgtagttgttgagggttgattatttatgttaagggaatttatttagaatgtatttttgaattttaagattatggtttagtttttgttggagttttagtttttgtagtggagagtagagtgggtggtaaagttgttgattgattttttttttttttattttaagtgaaggtttgagattttttgttttatttagtgggtaggttaagtgtgttgttttagtaaattggattaggagggttagggttggatgtggggattttttttttttagtatagtaaagttggtttttagaaatatgggtatttttgtgtggtgttttgtggttgttgttgttgtggttgtttggggtggggtgtgaggaggggatgaaggagggaaggaagggtaaggtggggggggttttgtgagagtgtgtttagttttgtttttgggttttatagtttttgtatttaggtttttattgtgtggttttttttagtttttttttgttgtttagtttggattttgggggaggtgttgaagttggggtttgttttgtggttttgtttggtttgtgtttgttagtgtttaaagttagtgaagtatgggtttaattgggttatgttgggggagtttgagtttattgagttgtgggagttggtatttgttgggtgtgttgggaagggttgtatttggttggagtgtgttaatgtgttgtgtattgtgtggggtattgtgtgtaattttatatggtagttggtttttggttgtggttattgtttttagtttgtggggtttgttatgtatatgtggtgtgatttttgtggtgattttatttggggtgttgtgtgtaaaggtttgtagtgtgtgtgtgagtagtggttttgtgtgtttatgagagtggaaggggtagttaaggggtagtgtagttgttgtgggttaagttgtggtagagggggttggtggggatagtttttgaggattaggtttgttatttttgttttattgttgaagagtgtgtgaaaatggtttattttttgttgtattttatttgtatttgggttatagatgagtagaggtggttgtttatatgtaaaaatatgttgattttaagttttttatttttaaaatgttttggttttttttgagaaagggtttgtgtttattgtttttggagtttatttttttaggtttgtttttttttaaatatttatgattttttttagaatttttagggtgaagggaaattattatttatgggagggagtttggaaaaatttagaatttttggtgggttttttgtaagtaggagttttgttgagtttttatttagtaaatatttttttttgatttagtgaattagatgttaaaatatgtatgtagttatatatttagtagtttttttgtatttttgggaattgttagtaagtaaaggttgtttttttttgggtagatattagttggaattattaggggtgtttttatagttttttttgttagtttggattttattgtagatttgttgaattaattgttgggagtggattttaggtattagtaaattttaaaaattttttaaattattgtaatatggagtttgggttgagtattattgttttggtttatttaggaatttgtggatggatagtgttttaggtttgtgtgtgtatggagatttttttatttggtataagaggatattataaatttagttggggggagtataaagttgtgatagaatgtaaagaatgaataaggggttgagtgtggtggtttatgtttgtaattttagtattttggaaggtggaggtgggtggattatttgaggttaggagtttaagattagtttggttaatatggtgaaattttatgtttattaaaaaataaaaaaaaatgagttaggtgtagtggtgggtgtttgtaattttagttatttgggaggttgaggtgggagaattgtttgaatataggaggtggaggttgtagtgagttgagattgtgttattgttttttagttttggtgatagagtgagattttgttttaaaaaaaaaaaaaaaaaaaaaaagaataaggttgggatattgtagtgtttttaaagagaaataaagtagttatggagataagaagtaggatgatttgggtatgtttattagaggtagagataagggagaaattaaagataagtttgggtttttgtttttagtaattgggagtttagtggttatttttgttgtaaagaggaagttgggtaagtgtagtagtgaggttgaagaaaagggaattaaattttggttatgtttatttgaaatgttttttagatattttagtgaaggtattggtatggaggatttagtttgagggtttaggttagtgttttagttgtggatttggggtagatgaatgtagatagattaggttagtgattaggattgagtttagattttattgtgagatatggaagttgagttagaatttgtaaaggagttgagtaggagttgtagggggtaggaggaaaattgggagagtgtagtttttgggagttaaagggagtaagttttaaatgatgttgagggggtgagaatggagaatggaatattggattttatttggtagtatatagattgttgaggattttgttttgggtagttttttggaggaagaggtaagtttggttggagtgggtagaggggagagtgaaggtgaaggattagagtgtatagagattagtgttttggtttgaggggagtagagataggtgataattatagggtagatgtaggttaaaggtgtttagttttttttttaagtaaatgggtagatgtattttatatatgtttttagtgaagggttgggtgtggtggtttaagtttgtagttttagtattttggaaggttgaggtgggtggattatttgagattaggagtttgagattagtttggttaatatggtgaaattttgtttttattaaaaatataaaaattagttgggtatggtggtgggtgtttgtaattttaggtatttaggaggttgaggtagaagaattgtttgaatttaggaggtggaggttgtggtgagttgaaattgtgttattgtattttagtttgggtgataaaagtaagatgtagttttttgttgttgtttttttaattgttaatgaggaaaggggaagttttgtgttaggtgatagagatttaattgttgagtaggtttttttgtttgtggttttttggttggtttttagatgtttaggtggttaatattagagtttgtgtagtagtgtgaggtaatttattgagataggttgggtttgtggagtttggtgagtagtggttttttttttggggtttttttttaatttttgggatatttttttgatttggagtttttttgttttattgttaggtttttttgtagattgtaagtttatttgttattattgttgttgtgtgtttgtttgtttggattgttgtgggttt

SEQ ID NO: 550 - DNA, 6155 bp, Artificial Sequence
  chemically treated genomic DNA (Homo sapiens)
gtttgggaagttgaggttgtagtgttttgttattgtattattgtattttaatttggattatagagtgagattttgttttaaggggaaaaaaaaaaaaaaatttaatttttaaaagtattttttgaatgtaaaggtagtaagttaagaaataattaggaaattatatttattgaataatttatttaagtaatttttttttttaggaaataatgataattttagtgtatgtatattttaaagatgtgtagataggtttttgttttttatttttttttaatttttatttaattatggaaggaatttagtggggagttttgttttaagttgtggtttgaaaaataagtatggtattgataggtagtttatgaatggtttgattattattttgataagggttttatttttatttttttttagtttttataggttttataatgtttgggttttattgatattggtattttggtttttagtttttttaatgattgtaaaaaatgtttgtgtttattgtaaaaagataattttgttttttaaagtgattagttaaatatatagaattttagtgtgtttgttatttatttgttaaatttttggtttataatttatgtttttttttgtgggggagaagaatgttttgtttagaaggtatttttggtgtggttttgttttttgttagtgaaattagtttatgaaaagaggtttggttttgggtgtagatggaagtttggtttgattaattggtttttattggtagtttagaggtttttttattaataaggagattttgttttgtaattaatttaggtatttggaagtagtttgatatttgggggtgtattgttgtagttttttttggagttggagaaatttatgagtaagaatgggtttatgatatatttatttttattttatttttttttttgttgtatgattgtatggagtttttttgatttttagtagtgttatttgtagtttggtagtgagaaatagtaggtatggatggggtttatttttagtaatagtagtgttagttgggttatattttggtattgttttttaggaaatatattttgtgttgtattgattagatttgggattatttggataatgttttatgttgtttttttaggatagttgtgtgtttaggagggagtttttattgaaaggaaagaattgttgatttataagtttttgttattggtttggtggttattaatgtgtttagaggtttgaagatgggtgtgtgaggagtttgatttagttttagaggttttgttttttgatttatttgtgtgtttattgtatttttgtgttggtaggattttaatttttatttttagtatttgtgtggatagagagtttagtgtttaggaaagggttgggttttaggtttgtgatgtagattttgtggtggttttgtgattttttttggttgtttttaaagtagatagggagtttagatgttatttgtgtattttttttgttgttttatgagtgagtaaatagggttatagatagtattaagggatttgtgtatggttgtgtagtttatttatggtatttttggttttgggttttagtttttgaatttttttttggtttgatgtttttttgtgaatgtttaggaaaatgttatagggttgtttggtagtattgtaattataatttgtgttttattgtaaatgagaattaggttgaggattgattagttggttagaggttttggtttgggtgtaaatgaagatttttattagatgtagagagatttttaatggatatagtttttagggtagatgaagttttaggggttttgttttgttttggttatgttggttttgtagggagggttggggtttttttttttttgtgtgtttatatattagatttgtgagtggattttagaagttatttaaagtattgtattgatttttaaatttagtaagaagtagagtaggaagaggagaagaaggatttatggtttatggggattaggtttattagtatagaggatttagaagttaattttggtattgtttgttgtttttttggggaagttagagagaaaggtttattgtggggatttttttttagatttaagttgtagttgtttgtttttttgtttttttagggatggatttgttttgttatttgggtagttagatagaatggttttttgtgttggttggatttgttatttgtgtgtatattttttggggtagaagttatgtttggtttggtgggttttggttttttattattttattggaatttagttttttttagattgttggttttttatgtgtggtttagggattatagtaggggttagtattatttgggatttgtgataaatgtagattttttgtttattttagttgaattagaagttttgggggtggggtttagttttttgtaaataagttttgtgtatattgaatttggagaattattgtgttggattttgagtttttttgtttggatgagaggtttaagagtattgtatgttagtggttttttttttttttttatatttttagggattggagttggggttgtttagaatgaaagatgaatgggggagggagaaggtttagggttgattttttataagtttgtttttttgttttatgttgttttttattttattatgttgttgattgggtaggatttatttttatggataatgggagattttagagtaaagtgtatgttgttttgattgggtagtagagtatgtttgtttttttatggattgtttttaagtatgttgtatatatttggttgagaaaaataattaaaggtattttttgggaatgattttagtaatattttttggtataagaagtattatttgatggtaatagtggttatagaattaattagtattttattgattttgatatgttatttttgaattatgttgttgttattgttaatagtaattgtttgtttttttatagtgttaataattaaattttttattggtaaaggaaatgtattgtggagtaggtggtaaagaggatttgtgttatgtggttagtaggttagaggggattgtggttaagggtaggtgtgttaatattgatttttgtgtttttaggaattattttttttatgtttttgataattagaatttgtagtaattgtgggattgggattattgtaatttgattattaaagtagggaaaatgtattttgtttttaattttaaattatgtgtttttgaaatttattgtatggaggaagtgatggggattaaagggtgttaaagtaaaggggatataaatattaggaataatggggagagagttttttgtgagtgatagtatttaaaatattgtgggtttaattattatgataatagtagattttttttttatgtgtgatggtagtttttttttgtggttttttttggttttatatgggggattattagattattttaattagtattttgtttttatttatatgttattataattagtagtgggtagatatgtgatgtatttgtatttataaattttgtatatttttgtgagtgtgtgaaatatttataagtaggtttttaaattttaaagtgttgtttatagaatgtatagttaaatgtttttttatatataggtgtatagttagatatttttttttttttttttttttttttttttttttttttttttttttttttttttttttttgagatggagttttattttgttatttaggttggggtgtagtggtatgattttggtttattgtaatttttattttggtttaagtggtttttatgttttagttttttgagtagttgagattatagatatttgttattatgtttagttaatttttggatttttagtagagatgggattttattatgttggttaggttggttttaaatttttgattttaaatgatttatgtgttttagttttttaaagtgttgggattataggtttgagttattatgttttgtttgattattttttagggaagagttagtgtgttttagttttatgagttttatttttttgtttttatagaagggaagtataggtttgtggggtggagggggttttgttttaagtgtagtttttgtgggttatgggttttttgttttttatatttggttgttttgttttttttattttaatatgaaaaagatggagtgagtttgtagttttgagttgatattgttttttaaattgagaataatataattatagttttgtattgtttataaaattttaaggttttatattagagatatagtagtgttttttttatttaattttgtgtagaatatggttgttgagaatggtgtggttttttggttggatagggttataaaagtaaattgtttttttatttttggtttttaataagggaagggtattagaaaaaaagtaatttgtatgatgaagggtgatttgtgtgtgtgtgtagatagatatatatgtagggaggtaaattagaattgatgtgtgtttggttttggtttgttttgttggtgtttggatttatttggtgatatttgttgttttgggggattttagagggaagtatgttgattgatttagggttgaatagtaggttgatgattagtgttgttttttgttttttgtttattttatttttgtaaagtttttgttttgttttttgtttagattatagtaaaattggatgtatttgagtattttagagtgtttgtttttttagagttagttagtttgatttgttagattataatatatagtagttgtttatttttttttgaaagtaaaattatggttttttttttaaataatattttagtaggaattgtgatattttttaattttagttgtgtatattttgttttaaagattttttagtttttttattgtttttagtttttttgttttattttttgagtgtgtagtgggatttaggtagataagagggtgaaaggataatttgttagagagttttgggtttttatgagggtgggtagttattagtttttttttggtttttattgtagtttgaatttggtttaaggaataagagagatatttggtatagtttttttgttatatttgttagttaggttattttttatagagtatgttaggtttggttaagtgagatttttttgttagtgtttaatttagttttttgttgtttgttagttttagttggaggttttataggagtttttgtgtttttttagtttgatattaagtttagattaagaaaagtttttttttgtggtatatttgtagttttttatttgtttttggtggttgtatatgaataggtagatatttataattgtagaataagtgttattgttttttttaagaagttttagggtagtttaaaggtttatttttattttattaggtttttttttatagttaggattttagggatggagaagaaagataagtttattttgtttattgaagttgttttttgtttttaggttaggaaatttaggtttatgtttaagtttttgggtaagtagttagtgtaattgattgatttaaaataaaggatggagtttttggagttttgtatagtgaaatgtatgattttttagtggaaaatgagaaagttattgaggaagtttagaagggaatttagtatatatagttagttttggggaagggggaagtagtgttaagtaagataggtgttttttagagatatatgaatttttgttatttatggatgtattttttgttttaggtgaaagtgatgttttgtattttatttttattattatgttgaagaattgtattattataatttggtattggtattggttttttgattatagggattttattagttttattgtttattataaggaagtgtgagtttttgttttgggtgatgttattttgttgatagggttatgaatgggagaggttagttttttgatttttgaatgggttggttgaatatagggggttagtagagtttttagggagagttatgttaaatatttttattttatttttatgtatttttttgggttgtttttgtgatgttagttatagttagtgatagttatgattgggaaagtgttagtttgaggtttgttattttttagtgagtgattagaggtgtttgaataaaataaatttaaaatggggaaagtttgttttttt

SEQ ID NO: 551 - DNA, 6155 bp, Artificial Sequence
  chemically treated genomic DNA (Homo sapiens)
gaaaaagtaagttttttttattttgggtttattttatttaaatatttttaattatttattaaagaatgataggttttgagttaatatttttttaattatggttgttattggttgtgattgatattatagggatagtttgagagggtgtatgaggatgaagtagggatgtttggtgtggttttttttggggattttgttgattttttgtatttagttagtttatttaaggattgaaagattggttttttttatttgtagttttgttaatagaatggtattatttaaagtagaaatttatgtttttttgtagtaaatggtgaagttgatgagatttttgtagttagggggttggtattggtgttaggttatgatgatgtgattttttgatgtggtggtggaggtgaaatgtaggatgttatttttatttggggtaaagagtatatttgtgagtgatagagatttatgtgtttttgaaaagtatttgttttgtttggtattgttttttttttttttaaagttggttgtatatgttaagtttttttttgggtttttttagtggtttttttgttttttattaagaaattatatattttattatgtagagttttaagggttttattttttgttttaggttaattagttatgttggttatttgtttagggatttggatatgaatttgggttttttaatttgaaaataaggggtgattttagtgaatgaggtgaatttattttttttttttatttttaagattttggttatgaaagggggtttggtagggtgaaggtgagtttttaggttgttttgaaattttttaagagagatgatgatatttgttttgtagttgtggatatttgtttgtttgtgtataattattaaagataggtaagagattataggtgtgttatagaaaggaattttttttggtttaaatttggtattaaattggaaggatataggaatttttgtgaggtttttagttagggttgataaataatgggaggttggattaagtattgataagaagattttatttggttaagtttaatgtgttttatgggaagtagtttggttggtgggtatggtagggaagttgtgttaagtgttttttttattttttggattaaatttaaattatgataaggattagggaaagattgatgattgtttatttttatggagatttagagttttttgatgaattgtttttttgtttttttatttgtttgaattttattatatatttaagaggtgaagtagagggattgaagatagtaaaagagttaagaagtttttaggataaaatgtgtgtaattgagattgggaaatgttatagtttttgttgaagtgttatttagagaggaaattatgattttgtttttaaaagaaaataaatggttattatgtattatgatttgataggttagattggttgattttaaggagataagtattttgaaatatttggatatatttgattttattatgatttgaatagggagtaaggtaggggttttgtagggatagagtgagtagggggtgggaggtggtgttggttgttagtttgttgtttagttttaggttagttagtgtgtttttttttaagattttttagagtaataagtgttgttaggtaaatttagatattagtgaaataagttaaagttaaatatgtattggttttgatttgtttttttgtatgtgtgtttgtttgtatatatgtataaattattttttattatataaattattttttttttaatattttttttttattaaaagttaaaggtgaaaagatgatttatttttataattttatttagttagagagttatgttatttttaatagttgtattttatatagggttagatgagaaaggtattgttgtatttttgatatgagattttaaagttttataaatagtataaggttgtaattatattgtttttaatttaaaaagtaatattaatttagggttgtaggtttattttattttttttatgttggggtgggagaaataaggtggttgagtgtaagggataggaaatttgtggtttataggggttgtgtttagggtagagttttttttattttataggtttgtgttttttttttgtgggagtagaagggtagagtttatagggttgaagtatattggtttttttttgaaaaataattggatagggtatggtggtttaagtttgtaattttagtattttgggaggttgaggtatgtggattatttgaggttaggagtttgaggttagtttggttaatatgatgaaattttgtttttattaaaaatttaaaaattagttgggtatggtggtaggtgtttgtaattttagttgtttgggaggttgaggtatgagaattgtttgaattgaggtggaggttatagtgagttaagattatgttattgtattttagtttgggtgatagagtgagattttattttaaaaaaaaaaaaaaaaaagaaaaaaaaagaaaaaaaagaaaagaaaaaagaaagagaaatatttaattgtgtatttgtgtataaaaggatatttaattgtgtattttgtaagtagtattttaaagtttgagaatttatttataagtgttttatatatttatagagatgtatagaatttataaatatgaatatattatgtatttgtttattattgattgtgatgatatataagtaggagtaaagtgttagttaagatggtttagtggttttttatgtgaaattaggaggggttgtagaggaaagttgttattatatatgggaggagggtttgttgttattatgatggttgggtttatggtgttttggatgttgttatttataggaggttttttttttgttgtttttggtgtttatgttttttttgttttggtgttttttagtttttgttattttttttatgtggtaaattttggaaatatataatttgggattgaaagtaaagtatattttttttgttttgatggttaggttgtggtggttttagttttatagttgttgtaagttttggttgttgaggatgtagaaggagtaatttttagaagtatagaaattgatgttagtgtatttgtttttggttatagttttttttagtttgttggttatgtaatataggttttttttgttatttgttttataatatattttttttgttaataagagatttagttattaatattataggagaatagatagttgttgttaataatggtagtaatatgatttaaggataatatattaaaattggtaagatgttaattaattttatgattattattattattaaataatgttttttgtattagaggatgttattagaattatttttaagaaatgtttttggttattttttttagttaagtatgtataatgtgtttgaaagtagtttatgagagaatagatatgttttgttatttaattggaatagtgtatattttgttttaaagttttttattatttatggaagtaaattttgtttaattagtagtatgatgggataggagatagtatgagatagggagataagtttgtggggggttaattttgggtttttttttttttttatttattttttattttgagtagttttagttttagtttttggaggtgtgggggaggaggaagagttattaatatgtagtgtttttgggttttttatttaggtaagaggatttggagtttaatatagtggttttttaagtttagtgtgtataaagtttgtttgtaaagggttgggttttatttttagagtttttgatttagttggggtgggtaaagaatttgtatttattataaattttaggtggtgttgatttttgttgtggtttttggattatatgtggagaattagtaatttaggagaggttgagttttagtgaggtggtggaggattaaagtttattaaattagatgtggtttttgttttagagggtgtgtatatgagtagtagatttaattagtataggaagttgttttatttggttatttaggtggtaggataagtttatttttggagaggtaagaaagtagatagttatggtttaggtttagagaaagatttttgtagtgggtttttttttttggtttttttaggaaggtagtagataatgttagggttgatttttgagttttttgtgttgatgggtttgatttttatggattgtgaatttttttttttttttttttgttttgttttttattaagtttgggaattagtgtagtattttgagtgatttttaagatttatttatagatttaatgtataaatatataaaggagaaagaattttagttttttttgtagagttagtgtagttaggataaaatagaatttttaaggttttgtttgttttggaggttatgtttattggggatttttttgtatttggtgagggtttttatttatatttaaattaggatttttaattagttggttaatttttagtttgatttttatttatagtaaagtataaattatggttataatgttgttaagtagttttgtgatatttttttgaatatttataaagggatgttagattaggaaggagtttagagattgggatttaggattagaaatgttatgaatgagttgtatagttatgtgtagattttttagtgttatttgtagttttgtttatttatttgtaggataataaggggaatgtataggtgatatttaagttttttgtttattttaagaatgattagaaggagttatagagttattatggaatttgtattataagtttgaagtttaatttttttttgagtattgggttttttgtttatataagtgttgggggtggaggttggagttttgttagtataggggtgtagtgagtatataagtgagttgaaagatagagtttttgaagttaagttaggttttttatatgtttatttttaggtttttggatatattagtgattattaaattggtagtaaaaatttgtaagttaatagttttttttttttagtaagggtttttttttgaatatatagttattttggaaaagtagtataagatattgtttaaatgattttagatttggttaatgtaatataaggtgtgttttttggggagtagtgttaggatatggtttagttggtgttattgttgttgggggtagattttatttatatttgttgttttttattattaggttgtaggtgatattgttggaggttagaggggttttatgtagttatataatggaaggagggatggagtggaaatggatgtgttataagtttatttttgtttataggtttttttagttttaaaggagattgtagtgatgtatttttaaatgttgggttgtttttaggtatttgagttagttataggataaaatttttttgttgatgaagaaatttttgggttgttggtaaggattaattaattaggttaaatttttatttatatttagaattaggtttttttttataaattaattttattagtagggaatggaattatattaaaaatattttttgaataaaatattttttttttttatgggaggaagtatgaattataaattaggaatttgataaatgaatggtaggtatattgaaattttgtgtatttgattaattattttgaaaagtaagattatttttttatagtaaatataaatattttttataattattgaagaggttgggagttaggatattaatattaataaaatttaggtattatggagtttgtggaagttaaagaaaaataaaaataaaatttttgttaaaataataattaagttatttatgagttgtttgttaatattatgtttgttttttgagttatagtttggggtaaggttttttgttaaattttttttatgattaggtgagaattaagagaaggtaaaaggtagagatttgtttgtatatttttaaaatatgtatatgttaaagttattattgttttttgaagaaaaagattatttaagtaaattatttagtaaatgtgattttttaattgttttttagtttattgtttttatatttaaagaatgtttttaaaaattaggtttttttttttttttttttttgagatagggttttattttgtaatttaggttggggtgtagtggtgtaatgatagagtattgtagttttaattttttaggt

SEQ ID NO: 552 - DNA, 6155 bp, Artificial Sequence; identical to SEQ ID NO: 550
  chemically treated genomic DNA (Homo sapiens)

SEQ ID NO: 553 - DNA, 6155 bp, Artificial Sequence; identical to SEQ ID NO: 551
  chemically treated genomic DNA (Homo sapiens)

SEQ ID NO: 554 - DNA, 6000 bp, Artificial Sequence
  chemically treated genomic DNA (Homo sapiens)
taatttataaatatgttattaaaatatttttttagaaaaatattttttaagtgtttgatgatttttagattttttattaaagatgattggttttattttttttttttttttttttttttttgatagattttggttgtgttatttaggttggagtgtagtggtataattatagtttattgtagttttaaatttttgggtttaagtgatttttttgttttagttttttaaagtgttgggattatagatgtgagttattgtatttagttttagatttttttatttgagtgaaagatggagagaaattaaatatatatttatggtataatttagtagttgtaattttggatatttattatagagaaatgaaatttatgttaatataaaaatatgtatattattgtttatagtagttttatttgtaataattttaaattggaaattatttagatgttttatgatagatagttagttaaattgtgggatatttatattatggaatattattatttagtaataaaaaggaataaattattgaagtatattatttggatggattttaaggatattatgttttgtgaaaaagttaattttaaaagattatatattgtataattttatttatgtaatatttttaaaatgatagattatagttaggtatggtggtttatgtttgtgattttagtaatttgggaggttgaggtgggtggattatttgaggttaagagtttgagattagtttggttaatatggtgaaattgtgtttttattaaaattataaagtttggttagttatagtggtttatatttattttagtattttgggaggttgaggtaggtagattgtttgaggttaggaggttaatatggtgaaattttatttttattaaaaatataaaaattagttgggtttggtgatgggtgtttgtatttttagttatttaggaggttgaggtaggagaattatttgaatttaggaggtggaggttgtagtgagttgagattatgttgttgtattgtagtttgggtgatagagtgagattttgttttaaaaaaaaaaaaaaagatagattgtagatatggaaaatagattagtggttgttaggtgttagggatattggggattaggttgggtagggtagtgagtatgaataggtggtattagggagagtttggtggtgatggaatagttttgtattttgattgtagttgtgattatataaatttatataagtgattagtgatatagtattatatatatatatatatatatatatatatatatatatatatatatagagttaatttttaggtttgatatttatattatgtaagatgtagtaaatattggaggaagttggatgaaggttatgtgggatttttttgtaatttttttgtaaatttttgtagttttttgtgattttataattattttaaaataaaatttttttttttaaatggaaagtttatagggtatgtagataaattagaaataatagaaggttaagtaaaaaagtgttgaaggaagtttttatttaggttggaaatgagaatgttgaatgtaatggtagaggaaggattttttttatttgtgggtgggtttagtttttgtaggatttttggggaagttatgatttttatttttttaaatatataataggaaaatattagagaagttttgtttatttgttagtttttaaataaaatagaattttgtatttttgttttagatataaaataatttttatgggtagggggaagggatattaataaaaagagttataatttatattgttttttttgaatgtttttattttatgaaatttgagagatgatttaagaataataatgtatatataatggttttttagtttattattttattatatatatattgtataagtttgtattatttgttttgtttggaaattagtttaattttttgatttttgttttatatataattatagattttaaaggtttagttgttgggttagtattttgtttgttattttttaaataatggtaggtaagtaggaaaagtgttagttttatttgtttttgatttttggtggtttgtggtatgtttaggatagtatttgaaataagagtttattataaagtaatggaaattttttgtttttattgtgtatgtagtaaaagtaatatttggattaatttataagtttttgtaaaatattgttaagaaataattttggttgtgttttagtaagaaaataatggatttgtgttatattatatgttttttggtattttttattgggttttgttaaaatattgattgtaggagttagattattgttaggtagagatattgtattttttttgttgtttttgtttttttttttagtgatttttttaggtatataggttagggttatagtattagaaagtagttttgtttttttttagaattttttaagttttttttttgtagtattgttttttttatatggaattagttggtttattagttaatagtttatgatatataaatgttttgaggatgtagtatgtattttgtttggaagtaagtaatatgttttttttttgtaggttgtttttttttttgtttgtaatgtgagtggtttattttgggtgggtttgggggtgagatattatgtgattatatgaatattttaaaatagttgttttttttaatgtatgttgtaataataatgaaaagtatatttttatggtttttttaatgtaagaagatagatttaattatgtgtgtttttgatttttttttttttttttaatagtatgtattgtattttttgtgaaggtttttgtttgaaggtttgtgaggaagaaaagaaaataaagattattgattttgttatttttgtttagatgttttaaggatgtattatttttaagggtaatttgtttattaatatttgatgggggagtaagtattttatttttttggaaaaatggttagattttatggtttttttttgttgatgttttttatgtttttgtttttgagttattattaaaatatgggtttagataaataatatggtgtgtaagttttatgtatgatgttttttttttgagtttttttgaaagataaagaatagattgaaaggtaatttgttttttagttattggtatgttatttatttttgtaaagagggttattgtttatttttttgttagttatattttgtataggagaggtaagttttgatatatataaattttagaagagattattggattagatgtgtgatttagtagattttagttgtagttaaatttatatattttttaagtttaaagagttttggttatttgaatttattgagaagattgagtaaagggaagtttagtgatattatgttaaaattttatgaagtttaaaagaatgttagatttttaaatttatttgtgagagataaaaggatataagtgtgtgttattgtgtatataaagttttggttttatttttgtataatgatttttatttgtaatagatggtatttttggtaagttgtttttgagttggatttgtgtaaaggattttttattgatttagtttatgatttttttatttttttggttttttgtgtgtttgttttttggttttgttttgagatagggttttattgtattatttaggttggagtgtaatggtataattatagtttattgtaatttggaatttttagttttaaataatttttttgtttagttttttatgttgttgggattataggtatatattattatgtttggataattttaaaaatttttttatttttgattttttattgttaagggtttttagtaatggtgttttaaattttttgttattgggattatttggttaaggtattgatagttttataagttagaataaatattgtaaaatggttttgaagttgaaaggaattttggggggggaatttttttatgaagaatttttttttttttttatagtttgagaggaaaaataatgtattttgagaatgtgttttttttaatatttgttaaatgagtagattgtatttttaaggtttagaaaggatagaaataagtttgtgtttagtttttttgaattagttgatattttttgttgttgtttataatatatttatttttagttttttgtgatggagataattttgttttttataattagggtttgtttatttttatggtatttttgatgtttaatttttttggttgtgtttgtatttttttatttatttttaatttgtttatttttagaatatattttttgagtgtttaaatttttttatttttttgttttgaagataaaaatttaatttgtgaattaaatttatggagaagtattatttatgaagggattggtatatattgatgtatgatgatgaaatgtgttttttggtttatgtttattgtaggaaatagattggatttaggatgatgggatattttattagaggggaaattttttgattttgattaaggtatgttttttgttttatgtttaaaatttaggattttttttttaaaatattaattgtatgtaattttttatttttttaatttgaatttttttttaattttttttggaaagttattaaattaaattagatgtagggttttattttttagtatttttattattttatttgtattaatttaaagtaaaatagagtattttattaaatatgtttttataaattatgtatagtaaaattttattaattggattatatttagtttattatagtgtttattataattttagtattagttgaattgaaaattggtttttgtttattatgagaaaaaggtagattaaataagatgaaatttgttgtttgtatattatgtttgtatatttttattagtaattatttttttaattatttttaattatttttttaattattttttagttataaaagtaatatataaatattatagaaaatttagtaatgtagaaatgaatttttaaaaattttttatagatagttattgttaatattttggtgtattttttttaagttttagtaaaatggaatttttaaatatagatttttgtattttaggaattagaaaggtagtaaaggtagtttttaatgagatggagaaaatgttgatttagttatgtttttgtattgtgggggttatattgtttgttgatagagtatattaaaagatgttttttatatttgttagttttagttaattggtagtttggtatttatgattttatattttgttaattagtttgggagttgtagtattttttagttttttagaaatttggttttttttgtttgggaggttttgttttaggagttgttgttgagagttaagttagggaagtgtgtttttgttagggagtagttagttttgtgttgggagtattttagggggtatttgttgttgaattgtttttatttgtgtttgtaagaatttaagtatgttatttttatattaagtgagtatatagtgatataatttttttttaatgtagataatattgttttagagttggagaattttatggggtttattgaggtggtgatgggttatgtgaagatttgttatttttatgttttggtttttttgttttttttaaaaaatttttgttttattttaggagaggagtagttagaagggtaagtgttttaaattttatgagttgatgttttattataaaataagtagtgtgtttatgaaattgtgttgttgaggtaagagttttttttgttttgttaaagagaagaaaggaggaagttgtagtattgtttgtgttgtttgagtaggttttgggtggagttatggttttttatttttaggaggttgttgtttggaaaatagagatgttattatttttattggattttgttttattagttaagggttgtgtgtttgattgtgattagtgagatggtagatgggggtgtgtttagggtttttttgttaagaatgatagtagttggtttggagtgtttatttttttgtgaaatt

SEQ ID NO: 555 - DNA, 6000 bp, Artificial Sequence
  chemically treated genomic DNA (Homo sapiens)
gattttatagggaggtgagtattttagattaattgttgttatttttggtagaaaagttttaagtgtatttttgtttgttgttttattggttatagttagatatgtaatttttgattgatgaggtaaaatttagtaagggtgataatatttttgttttttaaatagtaattttttaagaatggagaattatgattttatttaagatttatttgagtagtataggtaatattgtggttttttttttttttttttttaataaggtagggagggtttttattttagtaatatagttttataagtatgttgtttattttgtaatagaatgttagtttatgaaatttggggtatttatttttttagttgttttttttttaggatgaggtgaaggttttttaggaaggataaggagattaaggtatgagaatggtggatttttatgtagtttgttattattttgatgagttttatgaagttttttagttttgaagtaatgttatttatattgaaaggggattgtgttattgtgtgtttatttggtgtaagggtgatatatttggatttttataaatataagtgagaataatttaatggtaggtgttttttgagatgtttttagtataggattggttgttttttgataaaaatatatttttttggtttgatttttaataatgatttttggaatgaggttttttaggtaggggaagttaagtttttaggaggttggggggtattgtagtttttaagttgattaataaaatataaaattataaatattagattgttaattagttaaggttgatgaatgtagggaatgttttttaatatgttttgttaatagatagtatggtttttatagtataagggtatgattaaattaatattttttttattttattaggaattgtttttgttgtttttttaatttttaagatatagggatttatatttaaaggttttattttattaagatttgaagaaaatatattaaaatgttaataatggttatttatgagggatttttaaaaatttatttttgtattgttaaattttttatagtatttatgtattgtttttataattagaaaatagttggaaaaatagttgaaaatagttggaaaaatagttgttaataaagatgtataaatataatatgtaaataataggttttattttgtttagtttattttttttttatagtaaataaaaattaatttttagtttaattaatgttaaaattataataaatattataatgaattgggtgtggtttaattaatgggattttattgtgtgtaatttatgaagatatatttaataaaatgttttattttgttttgagttgatataaataaaataataagggtattaaaggataaagttttatatttaatttaatttaatagttttttaagaaaaattaaagggaagtttaagttggaaagatgagaggttgtgtgtagttgatgttttaaggaagagattttgaattttaaatgtggggtaggaagtatgttttagttaagattaggaaattttttttttaatgagatgttttattattttaaatttaatttattttttgtaatggatataaattagaagatatattttattattatgtattaatatgtattaatttttttataaatgatatttttttatgggtttaatttatagattaaatttttgtttttaggataggaagataaaaaagtttaggtatttaaaaggtatgttttagggataagtaaattaaaagtaaatgaggaaatgtagatatagttaaaagaattaaatattagaagtattatgagagtgggtaagttttagttgtggggaatagagttatttttattatggagggttgggagtgggtgtattgtgaatagtaataagggatattaattaatttagaagaattaagtataaatttgtttttgttttttttaaattttaagaatatagtttatttatttaataaatattaaggaaaatatatttttaaaatatattatttttttttttaaattgtaaaaaaaaaaaaaaattttttataaaaggattttttttttaaaattttttttaattttaaagttattttatgatatttattttagtttataaaattattagtattttgattaagtggttttagtggtagagaatttaaggtattattattagaagtttttggtaatgaaaaattagaagtgaaaagatttttaaaattatttagatatggtagtgtgtgtttgtggttttagtaatgtgggaggttgagtagaaggattgtttgagattaggagttttaggttatagtgagttatgattatgttattgtattttagtttgggtgatatagtgagattttgttttaaaataaaattaaaaaataaatatataaaaaattaaagaagtgaagagattataggttaagttagtgggaaattttttgtataaatttaatttagaagtaatttattaggaatgttatttattgtaaataaaggttattgtataggggtgagattgaaattttatgtatataatgatatatatttgtatttttttgttttttataagtaaatttggaaatttagtatttttttggattttataaaattttaatgtgatattattaaatttttttttgtttagtttttttagtaaatttaagtaattaaaattttttagatttgaaagatgtgtggatttggttatagttggagtttgttgagttatatgtttgatttaatggttttttttggggtttgtatgtgttagggtttgttttttttatgtaagatgtgattaataaaaagatgagtgatgattttttttataggaataaatgatgtgttaatggttaaaagatagattgttttttaatttgttttttattttttagggaaatttaaagaagagatgttatgtgtgaggtttatatattatgttgtttatttaagtttatattttagtggtgatttagggatgggagtatgaaaagtattaataaaagaaaattatgagatttagttgtttttttagggggatggaatatttatttttttgttggatgttaatgagtaaattgtttttgaagatggtgtatttttggagtatttgagtagaagtaatagaattaatggtttttgttttttttttttttttatagatttttgggtaaggatttttataagggatgtagtatatgttgttgaagaagaaaaaaaaaattaaaaatatatataattgagtttgtttttttgtattaaaaaaattataaggatatgttttttattgttattatagtatgtattagaaaaagtaattgttttgaagtgtttatgtggttatatggtattttatttttaagtttatttaagataagttatttatattgtaagtaaaaggagaaatagtttataaaggaagagtgtgttgtttgtttttagataaaatatatgttgtatttttaaggtatttgtgtgttataggttgttgattggtgagttagttggttttatgtgggagagatagtgttgtagaaaggaagtttggggggttttggaggaaaatagagttgttttttgatattgtgattttggtttgtgtatttggaggagttgttaggagagaaggtagggatagtaaagggagtgtagtgtttttgtttaatagtagtttagtttttgtagttagtgttttggtaaagtttagtgagggatattaaaaggtatgtggtatagtatagatttattatttttttgttaaagtataattgaaattattttttgatggtgttttgtagaaatttgtaaattgatttaaatgttgtttttgttgtatatataataaaagtaaggggtttttattattttgtaatgagtttttgttttaaatattattttgaatatgttatgaattattaagagttagggataagtaagattggtattttttttgtttatttattattatttaggaaatagtagataaaatgttagtttagtagttgaatttttgggatttatagttatatatagaataagggttagaaagttggattgatttttaaataagataaataatatgaatttatgtgatgtgtgtgtaataggatggtaagttggggagttattatatgtatattattgtttttaaattattttttaaattttgtgaagtaaaaatatttaagaaaaataatgtaaattatagttttttttattaatgttttttttttttatttatgaaggttattttgtatttaagataaagatgtagggttttgttttgtttaaaagttaataggtaaataaaatttttttggtatttttttattgtgtgtttgggagaatgggggttatggtttttttaagggttttataggaattggatttatttatagatggggagagttttttttttattattgtatttaatatttttatttttagtttgggtagaggttttttttagtatttttttatttggttttttgttgtttttaatttatttatatattttataaattttttatttaaaaaaaaaaattttattttaaaataattatagagttataaaaagttgtaaagatttatgagaaagttatagagagattttatatagtttttatttaattttttttaatgtttattatattttatatgatataagtattaaatttggaaattaattttgtgtgtgtgtgtgtgtgtgtgtgtgtgtgtgtgtgtgtgtgtgtggtgttgtgttattgattatttgtgtagatttgtgtaattataattataattaagatatagaattgttttgttattattaagttttttttaatgttatttgtttatatttattgttttgtttaatttagtttttaatgtttttaatatttggtaattattaatttgttttttatgtttataatttgtttttttttttttttttgagatagggttttattttgttgtttaggttatagtgtagtggtatgattttagtttattgtaatttttattttttgggtttaagtgatttttttgttttagttttttgagtagttggaaatataggtatttattattaggtttggttaatttttgtatttttagtagagatggggttttattatgttggttttttgattttaagtaatttgtttgttttagttttttaaggtgttgagataggtatgagttattgtgattggttaaattttgtaattttagtagagatatggttttattatgttggttaggttggttttaaatttttgattttaggtgatttatttattttagttttttaaattgttgggattataggtgtgagttgttgtgtttggttataatttgttattttgaggatgttgtataaatggaattatatagtatgtgattttttgaggttggtttttttatagagtataatgtttttgagatttatttaagtagtgtattttaatggtttgtttttttttattgttgagtaataatattttatggtgtggatgttttatagtttaattaattatttattataggatatttgagtaatttttaatttggggttattataaataaagttgttatggatgatggtgtatatatttttgtgttgatataaattttatttttttgtgataaatatttagggttataattgttgggttgtattataagtgtatgtttagtttttttttattttttatttaaatagaaaaatttgaagttgggtatagtggtttatatttgtaattttagtattttgggaggttgaggtaggaggattatttgagtttaggagtttgaggttgtagtgagttatgattgtgttattgtattttagtttgggtgatatagttagagtttattaaagagaaaagaaaagaaaaaaaaaatggaattaattatttttggtaaaaagtttaggagttattaagtatttaaaaaatgtttttttaaggaagtgttttgataatatgtttatagatta

SEQ ID NO: 556 - DNA, 6192 bp, Artificial Sequence
  chemically treated genomic DNA (Homo sapiens)
ggaggatttgggagtatagaatagatttttaaagttgtgttagtagttttgaaatagaaagaaaatttaataatttttaaatttaaaataataagaaaatataatattttgtgtaagaaatagattggttttaaggtattattttttagaaattataatataagtagttgtagaatggaaaaattgtttattttaaatggtttttaattaaaaagaaaaaataattttagtttaggtataatttgtatgaatggatagtttttttagaattttttaaatttttttttttatgtaattttttttttttttttttttttttttttttttttttttttttttttttttttttatttttttttttttttttttttttttttttttttttttttttttttttttttttttttttttttttttttattttttttttttttttttttttttttttttttttttttttaggtttggttgtttttggtgtttttattatttagtgtattgtttaatgagttaatagtttttaatttagtatttattgttttaatttttaaaaaatattttttgtagataattttgtgtttagtttgaatttattttagattaatttattttaaattaaaaggttatgaaatttttatgtttttattttgttatatgatgttatgtaattttattgttatgaatttaaaaggtttatagaaatagaatattaaaatattattaatattagaaataatatgattgtataatgttatagattattgagttaaatggtggatatggaaaggtgtttgaattgtataaaggtaggttatttgttaaggtagtttatttggattattttgattagaaaaattatttattgtttttatattgaaaattaagtgaagtttggatttaattttgatggagtaaaaaagttagttgatagtgtggagggggataggaattttaggagaatgtatttggattattttttagtttggttttgatatatggggtgtgttgtaagtaatttattattaatagtgaaagtattaaatttgtatatgatttgttttttaaaaatatatatatttgagtgtagttaaggttattttaatgatattattgtttttatgtttttataagtatgtttttttaagtgagagagaaagattggtgttagtaaaagtagtatagaatgttatataattaatagtttgtttattaatatttttagaaatattgtagagagtaagtttaattagtatatagttaatatatgtggtaattaaaaatgattataatgttttatttttaggaaaaatgtatttgagttttgtgaaaattatggtatattagtgagagtgtgttatttgtgagattattattaataatatgttgtgatatgaaaaattgtgagtgtttaaagtttttattatggttagaaaagggaattttgaatagagttaggtaaatattttggttttggggaaattttaaaaaaatttaaggaaaaaaattgttttgatttatgaaattgagttttaaataagattatggttaatgaagggagattttttaaaattaagaaataatttaaataaaatgggagatagtttaggaaagttgaattgttgtttatttattttaaattttaaatgatatgtttataagatataagaagggagagtaattaaaggtgaatagggaaatgtagtaaatttattataaaagttttataaagtaagatttaaatgaatagaggattttaaaaaaggtaaatgtggtttttttttgagaaaaaaaaaaggtaaagatgattttgaggaaaaaaaaaaggtaaaggtgatttttttttgaggaaaaaaaaaaaaggtaataatgattaaaaggagttatgaggttttattttattttatttatttatttttttagagatagggttttattgtattgtttaggttgtagtgtagtggtatgattatggtttattgtagttttaattttttggtttaaagttgtttttttattttgattttttaaagggttgtgattatagttattagttattgtattagatggatgttttttttagttaaaaagaataaggaggggagagtgataatagtaagatgttgaatgggaaggttttagattttatgtttttttaataaaatatttaattaataattatttatagataagaatttatgtgaaaaaatttttaaattgggaatgagtttgatattagtgtggattatagaattggataaaaattatattaaaatggtaagagaaatggttttattttgattgtatttttttttttttttttttaagttggtagagggttatatagatagaatttttttgggttttatgattttattttatttatttttgagttataatattttattggtagattagggaagagttaggagtaagtgtttttttttttttatttttttatttaggagatattttttaaaggagagtagaagtttaggagtttgtttttttagaggattttggaggtggataggttattgtagtgttttttttggtttttgagtaggttgaggtaggtggtgagtttttgttttagttataatttgatgtttatgagtagttggtatttttgattttgttttttattgttagtttgtatattgtttagttgagttttaatattgttgattagtgtttggatttgtgttagttgtggtttaaagtgtgttggtgattttttaaggtggtttttatgttaagttgttattgtagtttaattttaagattttggaggttgtattgtaggttggtgatttgggatttgtttatttggagttgttttatgtggttaataattttttagtttagttttttagtgtagttggtgaattagtgtttagtatttttttggttttgtttggtatgattttatattggttttgtatgttatttaggatattggtggtattagtgtttagagttgaatttatttttatattgatttggttttttatttggttttttagggtattaattttttttttatggtttttttttaggtaggttagttttttttttagttttttggtttgtatttttaggttggttttggttagggttagtttaattagtattttgtgtaggttattatgttagtttttatatttatgagtagagtttgtttttttttatatttagtttagaagttatttgtagttagataggtattgttgatttgtaggataattttggaatttttaatgatgttattaagaattttgtagtataggtatttgatggttttgtagtagtggttgtagttatgggagggtttggggtatatgattttaaaatgggaaaataataagagatagatatttagtttttttagtattttgaggtgtatttttggaagtttagattagttttgttttatgggggatattgggagtaatggtatggttagattgtgtggggttagttagaaataaaaaaaggaggtagagtttatagtgattagtgtgtagattttggtagtagttttgtgtttttgttagttgtggtgtttagttagagatattagttaatagtatagtttaagtttaaagttggattgattatttttagaattatggtgggaagtttaagttggttttagattttagatatttagtatttatgattagttttagagtttattttaaggttttgtttatttagggagatgtttataatattgtatttttttaaagtataggtgttaaatttgtttgatatgggaggttaaaaagtggtttgatttggttttagagtttatattaaggtattatttaggtagggtaataagttttaattgtgtatttttatggagtatagtttttgattttatttgttttgaatggtaattttgttagtattaaaatttagtttgtagttttgtttagttgtggaatttaaatagtgatattatttagttagggatatattttgttatttggttgattagggattattatgttgtttggttattagttttatttgatagtagagtttagttagtggttttattttatagtagagtttagttagtagttttagataattttagagtaatggtagtggtttaattaattagagaatttaatagtaattttatttattgtggttattattagttgatttatttagaattatagggtagattaaatagtgaaagtttatttttgttaaagaatatttgtagattgtaagaggtggttgtttttttaaatatatagatattaatttaggatataaggattatgaagaattagaaaattatgatatttttaaaagaaattaataaagttttaatgatggattataaaataagggagttttataaaatgattgatagagaatttagaataatttttttaaagaagtttagtgaattatataaatatattgatagaaaattaaatgaaatttagaaaataaatatgaataaaatgagatgtttgataaaaaaataaagaaataggtatttttaaaaaaattagaaattttagagatgaggaatataattattggattgaaaatattgtatagaaaattttattagtagatttagttaagataaagaattagtgattttaaagatagaatattttaaattatttagttagaggagaaaaaagaataaagaatgtttataggaattatgtaatattattaatagaattaatatgtatataataggaatttaagaagaagagagaaaaaaagtgttagaaagtatatttaaagaaatggtgtttgaaaattttttaaatttgggagaaaagatatttaggtatagtaagtgtaggagtttgtaattaattttaatttaaagaagagttaattaagatatgtaataattaaattattaaaaattaaagattaattaaaaattttgagagtagtataagataaatatattatatataaggtagttttaatgttagtggattttttagtagaaatgagggagaaataaaagtttttttagataaagaaaagttaagagagtttattattataagttaagggagtttataagggtataaagttttagttaaataggaggaaggaattattttagatatagtgtatagtatggtaattatatttaataataatgtatattttaaaattgttaagataatatattttaaatgtttttgttataaaaaagataagtattgaagtgatggatatattaattagtttgatttagttattttatgttgtatatatatgttataatattattttgtattttgtatatatatatatatatgtgtatatatatatgtgtatatatatatatataaatatatatatatatatatatatatataaggtaaatatatatatatatatatataaggtatatatgtgtatgtatatatatatatataaggtatatgtatatatatatatataaggtatatgtgtgtgtatatatatatatatatatatatataattataatttgttaatttatgattttaaaaagaataaggaaataagtttattttttagagatgatagtagaaggtatattagagataagatagtattatttaattttttttttttttttttttttttttagattggggtttaaattgaatatggagaataaattatgaaaagtagaaattgtagtttaagataaaagagggattggtaagttaattttaagatgtttaaaatgagattagataaattatgtattagggtgtaaatagaatttttagttataaattgtttggtagtttttgaaaagttatggtaaataggagaggtgttataagattatagatgggtatattttatgtttatttttaagagaggaatagaaaggatttaggaaattatagataatttgatttatatttgtagatttaataatagattgttaaaaatgttttagtttttgagtatttagaaatgaatgttaaggttattagtaattaataaatgtgaagtaaggataagtttgatatatttatttgatttattttttatgaggatattaagtatatagattaatggattttttgaaaattaaattgaaatagttagtaattggtattattgtgatggagtaatatgggattgtttttttttaagagtgtttattaatggttttatagtttttagtag

SEQ ID NO: 557 - DNA, 6192 bp, Artificial Sequence
  chemically treated genomic DNA (Homo sapiens)
ttattagagattataaagttattaatagatatttttgaaaagagataattttatattgttttattatggtgatattaattgttagttgttttaatttgatttttaagaaatttgttgatttatgtgtttagtatttttataaaaaataaattagatgagtgtattaaatttgtttttattttatatttgttggttattaatgattttaatatttatttttgaatgtttaaaaattagagtatttttaataatttgttgttaaatttgtaaatatgaattaagttgtttataattttttgaattttttttgttttttttttaaaaataaatatgaaatgtatttatttgtggttttgtggtattttttttatttgttatgattttttaaagattattaaatagtttatagttggaaattttatttgtattttggtatataatttatttggttttattttaaatattttggagttagtttgttaattttttttttattttgggttgtaatttttattttttatagtttattttttatatttaatttaaattttaatttagaaaagagaggagaaaaaaaaagaattgaatgatgttgttttgtttttgatatattttttgttattatttttaagaagtagatttatttttttgttttttttgaaattatggattgataaattgtaattgtgtgtgtgtgtgtgtgtgtatatatatatatatatattttgtgtgtatatatatatatatattttgtgtgtgtgtatatatatatatatatatattttgtgtgtgtgtatatatgtatttattttgtgtgtgtgtatgtatgtgtgtgtgtttatatatatatatatatatatatatatatatatatatgtatatatatatatagggtataaagtaatgttatgatatatgtatataatatgaaatgattaaattaagttaattaatatatttattattttaatatttattttttttgtggtaagaatatttaaaatatattgttttagtaattttgaaatatatattattattaaatatagttattatgttatatattatatttaaaataattttttttttttgtttaattgaaattttgtatttttatgagtttttttagtttatggtaatgagtttttttagtttttttttgtttaggaaagtttttattttttttttatttttgttgagaaatttattgatattgagattattttgtatgtgatatgtttattttgtgttgtttttagaatttttaattagtttttgatttttgatagtttgattattatatgttttggttaatttttttttgagttgaaattgattgtaaatttttgtatttattgtatttaggtatttttttttttaaatttggggagtttttaggtattatttttttaaatatgttttttgatatttttttttttttttttttttgaatttttattatatgtatgttagttttattgatggtgttgtataatttttgtaggtattttttattttttttttttttttgattgaataatttaaaatgttttgtttttgagattattggttttttattttgattgagtttgttgatgaagttttttatgtagtgtttttagtttagtaattgtattttttatttttaggatttttaatttttttaaaagtatttatttttttatttttttgttaaatattttattttgtttatgtttgttttttaaattttatttaattttttgttaatatatttgtgtagtttattgagtttttttaaaagaattattttgagttttttgttagttattttatagaatttttttattttatggtttattattggagttttattagttttttttggaggtgttatgattttttgattttttataatttttgtgttttgggttggtgtttgtgtatttgaggagatagttattttttatagtttataggtgttttttggtagggatagatttttattatttagtttattttgtgattttggatagattagttagtaatggttatagtaggtagagttgttgttgggttttttggttggttgggttattgttgttgttttgaggttgtttgagattgttggttgggttttgttgtgaagtgagattattggttgggttttgttattaggtgaagttgatggttaagtaatatgatggtttttgattagttaggtaatagggtatatttttggttgggtggtattattgtttgggttttatagttgggtagggttgtaggttgggttttgatgttagtagagttgttatttgggataaatgggattagaggttatattttatagaaatgtatagttgaggtttgttgttttgtttgggtggtgttttgatgtgggttttggggttagattaagttattttttggttttttatgttaggtaggtttggtatttgtgttttgaagaaatgtaatgttgtgggtatttttttgagtaggtagggttttgaaataggttttgaggttggttgtggatgttggatgtttagagtttaaagttagtttgaattttttattatgattttgggagtgattagtttagttttggatttgggttgtgttgttggttggtatttttgattaggtattatagttggtaggaatatagagttattgttaagatttgtatattggttattgtgagttttgttttttttttttgtttttaattgattttatatagtttaattatgttattatttttagtgttttttataaggtaagattggtttgagtttttaggaatgtattttagaatgttagggaagttggatgtttgttttttgttgtttttttattttaaaattatgtgttttaggtttttttatgattatagttattattatgggattattgagtatttgtgttataagatttttggtgatattattgagaattttaggattgttttgtagattaataatgtttgtttggttgtagatgatttttgaattaagtatgagagggagtagattttgtttgtgagtgtggaggttgatataatggtttgtatggggtgttggttgagttgattttggttaggattgatttggagatgtagattgaagggttgaaggaagagttggtttatttgaagaagaattatgagggggaaattaatgttttgaggggttaggtgggaggttagattagtgtggaagtggatttggttttgggtgttgatgttattaatattttgagtgatatgtagagttaatatgaggttatgttaagtagaattgaaaggatgttgaatgttggtttattagttgtattgaggaattgaattgggaagttgttggttatatggagtagttttagatgaataggttttaggttattgatttgtggtgtaatttttagggttttgagattgagttgtagtggtagtttagtatgaaagttgttttggaaggttattagtatgttttggattatagttggtgtagatttaggtgttgattagtagtattgaagtttagttgggtgatgtgtgagttgatagtgagaggtagaattaggagtattagttgtttatggatattaagttgtggttggagtaggagtttgttatttattttagtttgtttgagggttaggaagagtattataatagtttgtttatttttaagattttttaaggaggtaggtttttgggtttttgtttttttttagagggtgttttttgggtaggaggatgggaaggaagggatatttatttttggtttttttttgatttattaataaaatgttatggtttaaggataaataaaatagaattatgggatttaggggaattttgtttgtgtggttttttgttaatttggggggaagggaggagagatgtggttaaaataagattattttttttattattttaatgtggtttttatttagttttgtggtttatattagtgttaggtttatttttaatttaggggtttttttatataagtttttgtttgtggatagttgttagttggatattttgttgaagggatgtgaagtttgggatttttttatttaatattttgttgttgttatttttttttttttgttttttttgattaaaagaagtatttgtttggtgtagtggttaatggttataattatagttttttgggaggttagggtgagaggatagttttaggttaggaggttgaggttgtagtgagttatgattatgttattgtattatagtttggataatatagtgagattttatttttagaaaaataaataaataaaataaaataaagttttatggttttttttggttattgttattttttttttttttttttaaaaaaaggttatttttattttttttttttttttaaaattatttttatttttttttttttttaaaaaaaggttatatttattttttttaaaattttttatttatttgggttttattttatagaatttttatagtagatttgttatatttttttatttatttttggttattttttttttttatattttataaatatgttatttaaaatttgagataaatagataatgatttaatttttttgagttgttttttattttatttgaattattttttggttttaaaaaatttttttttattagttataattttatttgagatttaattttatgggttaaaataatttttttttttgaatttttttaaagtttttttaaagttagggtatttgtttgattttatttagggtttttttttttggttatgataagagttttgaatgtttatagttttttatgttatagtatattattgataatagttttataggtgatatatttttattggtatattataatttttataaaatttaaatatattttttttgaaaataaaatgttgtaattatttttaattgttatatatattggttatatattagttaggtttgttttttataatgtttttggggatattgataaataagttattgattatgtggtattttgtgttatttttgttaatattaattttttttttttatttaagaaaatatatttgtaagaatatgagagtaatgatattattgagataattttgattatatttaaatgtatgtatttttagaaggtagattatgtgtaaatttagtgtttttattattagtaataaattatttgtaatatattttatgtgttaaaattaagttgagaaatagtttaggtgtgtttttttgaggtttttatttttttttatattattaattagtttttttattttgttaaaattaagtttaggttttgtttgatttttaatatgaggatagtgagtaatttttttgattaggatggtttaagtaaattgttttgataaataatttgtttttgtataatttaggtatttttttatatttattatttggtttggtagtttgtaatattatatagttatattatttttaatattggtagtattttagtattttgtttttatgagttttttaaatttatggtaatgaaattgtatgatattatatagtagagtaaagatataaaagttttgtaattttttaatttaaaataagttgatttaaaataaatttaagttaaatataaaattgtttgtgaaaggtattttttaaaaattgaaataatgaatattgaattgaaaattgttagtttattagataatgtattgagtgatgaaagtattaaggataattaggtttgaaagaaaggaaaggagaggggaggggaggagaggagagatgaggggagggaaggagaggagagaggaggggaggggaggggaggggaggggagggaaaaaggaaaggaataaaaggaaaagaaaggaaaggaagggagggggaaggaaaggaaaggaaagaaaattatataagaaggggaatttggggagttttgagaaggttatttatttatatagattatgtttaaattagaattattttttttttttaattaagaattatttagaatgaataatttttttattttatagttgtttgtattataatttttagaaagtggtattttaaagttaatttattttttatataaaatattgtatttttttattattttaaatttaaaaattattaaattttttttttattttaggattgttgatatagttttagaaatttattttatatttttaaatttttt

SEQ ID NO: 558 - DNA, 6192 bp, Artificial Sequence; identical to SEQ ID NO: 556
  chemically treated genomic DNA (Homo sapiens)

SEQ ID NO: 559 - DNA, 6192 bp, Artificial Sequence; identical to SEQ ID NO: 557
  chemically treated genomic DNA (Homo sapiens)

SEQ ID NO: 560 - DNA, 6000 bp, Artificial Sequence
  chemically treated genomic DNA (Homo sapiens)
ttgtatttaatattaatgataatattagtttaggtgatatgtaattaagaaagtaaatttttttttaattaaaaataatatgagagattttaaatttaaatagaatagagttgtggattattttatgtttgtttttatattattttttttattttattttattgatatagtgtgatgtttgattgttttttaagttttttttattgttgttatttgggatgttggtaatgtattgtgttgaaagggaagtttattaataaagttagtaatttgaagagttagtgtaggttatttgtaggatgtttattatgagttttgagtttgatttagtttagaaagtaatggaatattttgtataattatttaaaggattttttttttttttttttttagggtttgttttttttgtaagggtttagagttgtttggtagaggttggttgaaataggagaaattttgatttaagttgttttaggaaagtgatttagtttttggagaataattaggatataattaagtatgagtaaaaggtttagagttagtttgtttttttttgtaatggggtgtttattagtgtgatagttgtttttgtgattattgtttttatgtatatttttgattagtatttggaatattattttagggtaatttaaatgaaagtttattttttaggatggagtaaattgatagaaatttttattgtgtattaaatttgttataagttgtttgttttttgggtatttttgggttttagttgtatttttgaagaaataattattgttgttttaagtagaaagtggttgaggagatagttaatagatatgtttagtttttattttttattatagagatgtgaaaaaaaaaaagtttaaattattttagaaggaaaagtatttttttgtgttggatttttagtgttttttagttttgtattgttagtttattttttttaatgtttttataataataatttatttttttttttgtatttttggttttttgtgatgttttattatgtttatgttgaaagaaaaggtgtttgtttatattgtatttttttatttggttttagggatttttttttgatttggaaagaataattttttaaattttgttataaattatataggagaaagagaaaaataagataaagtttttggaatgtgtattggtattgatattttgtttaaataatgggttgaaggtgaattatttttattattgtttatgtgaatgattaattattattaatttaaattattaatagtgttgtttattattgatttatattgtatggtttaattttgtttttatttttttagatattaaaatatagttaatatttagtagtttttgttatttattatgagtatttttatagtttttaattttttttttttagttttgtttaggatatttatggtgagtagtgagttattttttttttggtagttatttttgtttttttgtgtggaggaattgtttatatttgtatttgtaaatagaggtttatttaagtgttattaaaggaaaggaggtggagtttgaagagttttaaaaagtaaagttgagttattttattttttaaaaagagaaattgttgggagaggaattgtatttttatatttttttttttagttttaatttaagggttgtagttggaattttttattagtttttttttttttttttttttttaagtttttgttttgttttgttatagtgaagttagttagagtagggttgttaaattttgtgaaatttgttataagggtgttaggtattttttattggtttttaaagaaatatagataaagaaattttttttgtggttttttttggtaggttgtatttagaaggttttttagttgaagaaagagtttggaggataatagtataataggagagtaaaagatgttttagggttgaggtttttgtttaggtagttgtatttggggttaattatatttattttgtttgggttatgttttagtaaaattaagttgtttttttttgaaagtttaaatttattaagattatgttgtttatttttattattttgttgttagtagttttaaaatttagttttgttagttttttagtattgtagtattggagttgttttgaaggtatttttgtaggaaatgggaattttatttgtgtgggtaagtattttaatgaaaaggtgttttaggtttttgggaaattgtttttatatttttgttggtttaatttggtatatttgggtatttaataaagtttgtttttgggtatgtatagttgtttaatttttgttttttgatgtatgtttatttttttattggttattagagttaatttgttattaattataaaattttataatttttaaattgtatttttgtgtataagtgaatgaatatgttttattttaaattagtagaatattttatggaagttttagtttttattttgataagaggagtaattaatatttggttaattgtttggaaattagggaaatagatggttgattttttgtttgtttgtttgaaatttttaagttataaagaaaaaaatttttttttttgataatttgtaagaatttagaagttttaaaaattagtgaaaaatggaaagggaattgtgaataaaggtagttgtgaaaattaatttaaattttaattttaattttttttattttttttttatttttattgtttttgaggttttgatataattttggagttttagtaataggtgtattgtaattttaagaattgttaaatatgataatgggtaaataagttatattgtttttttatattaaatgaattttttgttaaggggaaatgggagtttgattgaatgtgaattataattttgttaaaggatattgtttgaaaaatattttttttttaattgttaatttatttatttaatttttgggtgagtttttaatttgttgtttagatatggtagttgtttttgttgatgagaggttatagttgttttgatattttatttttattagtttgtttttttgagatggtgtttggtttttaaaaagaggtagattgagggggaaaatatagtatagtttttagaagagatatttatggaagatagtatataataggtaatagtttgaataaagagagtagaatggagttaaattgttaaagttaggttgttgttttggtttttttattaaggaagtttttgatgaggaaattaggtgtttttgtttagaatttttggattttgtttttaggtagtattttttgtaataggtgagtagaattttagggtatttgaaataaagatttaattttagtgatttttatgtttttagtatttaggatatttttgtttttatagtgtgtatttagtaaatttttgtgtatgaatgaggtgtttttttttgatttgttaatgatatagttttagagaatagtaataaaaagagggtgataaatgataaaaatggttttatgaattttagatttagttgttggagatagaagtaaaatttttgtatatagttatgttaaatggattggattttttttggggtgggagaattttttgtggagtagttggtaaatatttagagttgggtattgttatttgtatgggatgtgaggggtgatggttgggttgatttattaggtagttagaagttaggaaagaagaatttaggttgttgaagtagaatttaagaaattataaaaatgagtttttatggatggttttaggattttagaatagtttgatttttgttggtaagtaagtttatgttttgttttttttgttatttttggtggtttagaagtgtttttattgaggtaggttgtatttaataaatatgaaatttaggatagaaataataagttggggagattgtgttatagagtggaaggaattataggttttagaaataaataagttttattttatatttatgttattaatttaatagttgagttattttagagtatttttgggaaataatatttttgtttattgtttttaggatttttttgtggggaattatatgagataatttagtatgtattaaagtatggtgtttagtagagtatgtttaataaatgtttttttgggttttatgttttggttaaatttttgattaagttatatgatgagatgttgtatttgaatagtgtagtgatatggtatagatttatggagtgtggaatgtgtggatggtattttgggattttttgtttttttgttattttattttttgtaagttattggtttaaattttgtattttatgtttttggttttatgttagttgataattgtttgggttattttttgttagttattgtgtgtattttagaggatagtattttttttttttttttaaatagatatggtgttattatttattttttttttatttaaattttatttgttttattttttgtttttggtattgagatagattatttttgtagttatttgatttagtaggaagaatgttttatggtttaatagtatttaggtaaatttatgtaagattgttatttatgtgattgttagttggataaattaagtgatagtaatataattaggtttttttttatttttttttttttttttttttttaattgagtattttgttagtgtttatttgagttatagtaggtgaggatagtaggaaagaaaattgttggtaagtggtttttgaatttttaagtttatttattttggaggataaataatagttgaaaaagaaattgtttttgtttggtttttgtatttgtattatttatatgaatttttttggtaataaagggtaaggaagaagtatagttttttagttgtgggagggattttggggtggtattaagttattatttttagtagtaaatagtgaaattagtgattttagtattggttaaggtgtggttagtattttagttatgtgtaaattagagtaattttgagattagaagtttgtttgtttttttagttagggttatgtgattttttttttttttttttaatagtagtgaaattaatttttaaatatttagtggtgtttggttattgagtttagtggtaaagaagtataaattttggagatagattttttgtttggatttaaattttatttttgttgtttgtgaattgtttgttttattttttttattttaaaatgaagataattgtatttttttttgaggatttttgttagtattgtgttaatgtatttatttttagtgttggttgtgtattagaattattaatgtttgggtggttattttgggtagtttggattagagttttttttgggagtggaatttaggttttatttttttttaatgtggtgattttaattaatagtttgggttagaattattgagttaatatatgtaaagtgtataaaatagagtttggtatataataaatatttgataagtttgagattttattaatgttttgttgttttaaaaattatttttatgaatgtaatggtattttttaaatgtggtttggttttgtttataattattgaatattttttatatatgataaaatgttatagtgaaaaatttaataatagttttataatattaaaaattatagttaaaataatttaaaaatatataatttatatttttgtaattagaagaaatgtttattaaaaatataagaatatgttaatttgatttgagtaagtatttttgtgaaattgtggttttggtgtttgttttttttttatattaattgataaaaaattttatttattgtaaattaattttgtttgttgggttttttattggtaataattttattttaatagtagtaaaaataagttatttgaaagtgatagtgattattttagttttttgtatatttttgtttatgtgtggaattttttttttgtggatttttaaagttattaaaagtatataaaaatggtaaattagtttttttagttaatttatattttggggttaatttgagtttgttaaaatatttgatat

SEQ ID NO: 561 - DNA, 6000 bp, Artificial Sequence
  chemically treated genomic DNA (Homo sapiens)
atgttaaatattttgataagtttaaattagttttaaaatgtaaattaattgagaaaattaatttattatttttatatgtttttaatagttttaaaaatttataagggaagggttttatatatgggtaaaaatatgtaaaaaattgaaataattgttattatttttaagtggtttgtttttgttgttgttaaaataagattattattggtaagaaatttgatgaatagagttaatttgtaatgaatgaaattttttattagttggtataagaaaaagataaatattagagttatagttttataaaggtatttatttaaattaagttgatatgtttttgtatttttaataaatattttttttgattataaaaatatgagttatgtatttttaaattattttgattataatttttaatgttgtagaattattattgggttttttattatggtattttgttatgtataaaaaatgtttgatgattataggtgaaattaagttatatttagaaaatattattatatttataaaaataatttttaaaataataaaatattaatagaattttgggtttattgagtgtttattgtatgttaagttttgttttgtgtattttatatatattaatttagtggttttaatttaggttgttggttagaattattatattaaaaaaaaataaggtttagattttatttttagaagagattttgatttagattgtttggggtggttatttagatattagtgattttaatgtatagttagtattgaaaatgaatatattaatgtaatattgataagagtttttggaagagggtataattatttttattttagggtaaggaaaatgagataaatagtttataagtagtagaaatgggatttgaatttaggtaagaaatttgtttttaaaatttatgtttttttattattaagtttaatgattaaatattattgaatatttggaggttagttttattgttgttagaaaaaaagaaaaaaaattgtataattttggttgaaaaaatagataagtttttggttttagaattattttggtttgtatatgattgggatgttgattatgttttagttggtattgaaattattgattttattgtttattattaaaagtgataatttagtgttattttaggattttttttgtagttgggaggttgtattttttttttattttttattattaaaaaagtttatataaataatgtaggtatagaagttaaataggaataattttttttttaattgttatttgttttttagggtaaatagatttgaaggtttagaaattatttgttagtagtttttttttttgttgtttttatttgttgtagtttaagtagatgttaatagaatatttagttaaaaggagggagagggaggggaatagaaagaaatttaattgtgttgttattatttggtttatttggttagtagttatatgagtaataattttgtataagtttatttgaatattgttagattataaagtattttttttgttgggttaggtggttgtagaggtgatttgttttaatgttaagggtaagaaataaggtaagtagaatttaaatgagggaaaaatagatgatggtattatatttatttagagaggagaaagaaatattattttttgaaatgtatatagtgattgataaagggtgatttaggtagttattagttaatatgagattaggagtgtaaagtatgggatttaaattagtgatttgtaagaaatgaggtagtagagaggtagggaattttaaagtgttatttatatattttatattttatggatttgtgttgtgttattgtattgtttaaatatggtattttattgtatgatttgattagagatttagttaagatgtggagtttaggaggatatttattgagtatattttgttaagtattatgttttggtatatgttaggttattttatgtgattttttataaaaaaattttaaaagtagtgggtgagggtattattttttagagatattttaaagtaatttagttattaagttggtagtatggatatgaaatgaggtttgtttgtttttaaaatttgtggttttttttattttgtgatatagtttttttaatttattgtttttattttgggttttatgtttattgggtataatttattttaatgaaggtatttttgagttattagaggtggtaaggaaaataaggtatagatttgtttgttagtaggaattagattattttgagattttagagttatttataaaagtttatttttgtaattttttgggttttgttttagtaatttgggttttttttttttagtttttggttgtttgatagattggtttaattattattttttatattttatgtaaatgatagtgtttaattttagatatttgttaattattttatggaaaatttttttattttaaagagagtttagtttatttgatataattgtatatagaagttttatttttgtttttaatagttgagtttgaggtttatggggttatttttgttatttgttattttttttttgttgttgttttttaggattatgttattagtagattagagaaagatgttttatttatatataagaatttgttgagtatatattgtggaagtaggaatgttttaggtgttgggaatatagagattattaggattaagtttttattttaaatattttagagttttgtttatttgttataaggagtgttatttgagaatagagtttagagattttgagtaaaagtatttgatttttttattgggaatttttttaatgggagagttaggatagtagtttagttttggtagtttggttttattttgttttttttatttaaattattgtttattgtgtattgttttttataggtgttttttttggaaattgtattgtgtttttttttttaatttatttttttttaaaagttagatgttattttaaaagggtaagttgataaaaatggaatgttggggtagttataattttttattaataaaggtggttgttgtgtttaagtagtaggttggaggtttatttaaggattaaataaatgaattaatagttagagagagaatgttttttaggtaatattttttggtaggattgtaatttgtatttagttaagtttttatttttttttggtaaaaaatttatttaatatgagaggatagtgtggtttatttatttattattatatttggtagtttttaaagttgtaatgtatttgttattaaaattttggagttgtgttagagttttagaaatagtaagagtggggagaaagtgaaggaggttgaaattgaaatttaggttaatttttataattatttttgtttatagttttttttttattttttattaatttttagaatttttgaatttttataagttattagaaggaaggatttttttttttgtggtttaagagttttaaatagataaataaaaaattaattatttgtttttttaatttttaagtaattagttaggtgttaattattttttttgttagagtaaaagttgaagtttttatgaaatgttttgttagtttaaaatgaggtatatttatttatttatatatagaagtatagtttgagagttatgaagttttatagttggtagtagattagttttaatggttagtaagaaaataaatatgtattagaaaataaaaattaagtaattatatatatttaaagataaattttgttaaatgtttaagtatattagattgaattaatagggatgtgggggtagttttttggagatttggagtatttttttattggagtatttatttatataagtagaatttttattttttgtgagagtatttttaggatagttttagtgttgtggtgttgagagattaataaaattaaattttgaaattattggtaatagaatgataagagtgagtagtataattttgatgagtttgaatttttaaaagaaaatagtttgattttgttggagtatggtttgggtaaggtgagtatgattgattttagatgtggttgtttgagtggaggttttagttttggggtattttttatttttttgttgtgttgttgttttttaagttttttttttaattgagagattttttgaatgtagtttgttaagggaagttataggaaagatttttttatttatgtttttttggaagttagtaagaaatatttgatatttttatgataaattttatagagtttaatagttttgttttggttgattttattgtgatagagtaaggtaaaggtttagagaggaaaaagaaaggaagaattgatggaaagttttagttataatttttggattggggttgaaagaagaaatatggagatatgattttttttttaatagtttttttttttgaaaagtggaatgatttagttttgttttttaaagttttttaggttttatttttttttttttagtgatatttgagtgagtttttgtttgtaaatgtgaatgtgggtaatttttttatataggaaagtagggatgattgttaaagaggagataatttgttatttattataaatattttgggtagaattgggagagaggagttgggggttgtggaggtgtttatggtgaatggtgggaattgttaaatattggttatgttttaatgtttggaaggatggagataaaattaaattatgtagtataaattaataataagtagtattgttgatagtttggattgataataattgattatttatatgagtaatagtaaagatagtttatttttagtttattatttgaatgaaatgttaatattagtgtatattttaggagttttattttattttttttttttttttgtatagtttatagtggaatttgaaagattattttttttaaattaaagggaaatttttgaggttaaatgaagagatatagtatggatagatatttttttttttagtatgagtatgataaaatattatgaggggttaggagtgtagagaaaggagtggattgttattatagggatattggaaaaaataagttaatagtgtaaagttgggaagtattggaaatttagtatagaggaatgtttttttttttaagataatttaggtttttttttttttatatttttgtgatagaaaataagaattggatgtatttgttagttgtttttttaattattttttatttggagtaatagtggttatttttttaggagtataattagggtttaaaaatatttagaaggtaaataatttatagtagatttgatgtatgatggaaatttttgttagtttattttattttggaaaatggatttttatttaagttattttgaggtagtgttttaagtgttggttaaaaatgtatgtaaaagtaatagttataaaaataattgttatattagtgaatattttattatagaggagaatagattaattttaagttttttatttatatttaattatgttttgattattttttaaagattggattatttttttgaaatagtttaagttaggattttttttattttagttagtttttgttaggtagttttgaatttttataggagaaatagattttggggaagggggaaagagaagttttttaggtggttatgtggaatattttattgttttttggattgagttagatttaagatttataatgagtattttataaataatttgtattgattttttgagttattaattttattaataagttttttttttagtataatatattgttagtattttagatgatagtaatggaaggggtttagaggataattaagtattatgttgtgttagtggagtggagtggagagaatgatatgaagataaatatgaaatgatttatagttttgttttgtttggatttggaattttttatattatttttggttggaaaaaggtttgtttttttaattatatgttatttgggttaatgttgttattaatgttgagtataa

SEQ ID NO: 562 - DNA, 6196 bp, Artificial Sequence
  chemically treated genomic DNA (Homo sapiens)
tatttatagatggtatatgtatttattattgagtagaatatttttaattaaaatattattttttatttttgattaaaaataatttattatggttaaaaaatggtttttgataatattatatattattatagggttttgtttttgttttgtttttttaatatgagagagagagagagagagagagagagagagagattgattttttatttggggtatattagtagttgatataattataaatagaagaaaataatagaaatagaaaaaaatatgagaattgaagaatgaaattggtttaaatagaaattatttttgtattttaaagtttttggttttaagtttaatattaaattaatatgtgttgagaattttttttgtgtatagggtattgggtttaaattggtaaaaattttttattttatttttagttataggaattatggttttattttttggagggatttatgtgttattgtatttattttatagtaaaatatattaagggatttttggttggtatgatttagttaatgatagattgttaaatggtagttttgttaaaagtagtagttttgtggtttaagtttttatttttattttaagtagtagaaattatgttaagatgattattaagtttttttatattgttatttgtggtataaagatgtggttttttttaagaagttttttaaggtgagtggttttattttttttagatgtatttatttttagtattatgggaagagtttttgatagggtgttaggtgaggggtgttattaaaagggttgtggagttatgttggaagttataattataagaagagtattttttttgaattttagagtagtggtaggtttatttaattttattatttttggagaaatagttatttattttttgattattttttttgttttttatggatttttaatttagtggttttatattagtggtaaaattttttttattattttaatgatgatttttattttttgtagttagatttttattttagtaattgaggaaaaaaaaaaaaaattaaaatttttgttttttgttaataaaatataaatatttagttaatggttgtaaagtagttgaagatgaaaagtgttttttatttgtaaatgattataaataatggatataaaatagaagaggaggtaaaagtttaattgaatatttattgtattttttttaataagatttttgtatggaaattttttattttttatatagtttaaaatattgggattggaagaagtatgttattatttagtttttatttttttttttttttggttgtaaaattagtggggtttttttgtttaatatttttattggaaattttaataaatttaatttatttggattttgtggtattttttaaaagaataaatttgtgattgattttgtagagtatatttttatattgtgggaatgggttagttttagaaagtatgttattttattgaattttatttttttattttttttttttttgttgtgtttatagtaatgttgaaggttaagtatttgtaattgtagatgtttttaagttttttagtttttgtgaaatttagggaaaaaaattatttaagttatagttttagtgaattttaaattttattagatgttaaaattatatttttaatagttttagtataatatatttaagtgtagtgatatatataagtttttggaatttaagaatttaagattttttttaaatagatttttttttttttttttttttttttttgttgagttatattgttagataaattttagtatttatagttttaggataagatagaatttttagtgtatttttttttagtgtagggaatagtttagtatatttatagagaattagagaattttatgtttttataaatgaaaataatattgaatttgtttaggagtttaaagtgtgaaataagtggttttatatgtttattatttttttggttttttattttgttaaatataaaagaaattaatagagagaaaggaaagatatgatagaaaaaaaagggaagaattagaaagatatgagaaaaaaagaaaaaaaaattagaaaatatttttttaaaaattatttataaatttaaattttaaaagtttttttttttttaattttagataaatggaatattaattgattttagatgtttgggttataatgaaaatgttttgtaaaatttgagggtaatagttataagaaaatatttattgtaggtgtaattatttttgtttgttttaggttttttatagtaggttagggtgggtattatgaggttgatgtgaatagaaaattgaagttttaaaaatatgtgttgttttgtgggtggggtttgtgaaagtatttagttatatttggatatttaggtaggtatgttattatgagtttgggtaaattgttttttgtttattgaaataatgaataaattgtatagttgggatttaagttaattttttttttttagttaagttatttatttttattgtatgtttattgtagtagtttagatagtgatttaagttttagtttatttttttattttttttttttgatttatttatttggaaatattttgagagttagagtataattagttggtgagttttgtttttgggtaggatatttttatttattgaattatatgtgaaagattatgtagtttttttaaattattttttgttttaagtatagaaaaaagtaataatttattaagagttttatttttgaagtgtttagtatatatagtatgaaaagtgtatttggaaataatttttttaatttgtaattaatgtagagataatgttttatagttttttttatgattttttaagtaaggagataaaaattttagttgttagattatatagtatgtatgtatagtgatgttatttttttgaaagtaaggtggtttgtatgtgttggtattttaggaatagtagaattaggtgtttgataagggtgtatttttaatttttggagttatttatttgattagggaaagttgtagtggtgaagtgtttgaaagtagtaattgaatgttgtattaagtggtagagatgttttatgaattgagtttttaggtaattgaattggtggagttagtgatagtagtttaaaagtgtttgtaaattgaaaaaaaaatataagttttgaaggatataattttgttgagaatggaaattagaattatggttagtaattggaaatgagaagttggtgtattgatagtagtagttagatttatttaaagggattttatgatattgaatataaaattagagttttataatatagaattttaagtttaaattttgtttatgaaagtttttttttaaatagaaaagttgggtaagtagtttttagaaagtttttgttttttatatatagtatgtatttgtttaaattatataaatatgtaaggttagtaagagttgttaaggagtttttttttggaagaataaattatattttattttaattttaatattttttttgggtataagtgtagagttttgggattttagttttaaagattatatttaaaagttttaatattatttaaaatataattttttatatatagtatgttttgtaaataaagttttgatgagttatatatatagagatatatatatatagagatatatatatatatgtaaaagaatatggttttaaaaataaaatatttgtatttgtaaaagaaaaaaaaaatttttaagtttatatttatgttttatagtttttagttatagagaggatttaaaggaattttttgtaatgatattatggaagttttgtagaagtggaggatttagtataagtattttgtaatagtttttatttatatagatatttgtgtaaatgtatttatttttttgagttattttttagattttatagaattgtatatttagtaatttataaataatttttggttttgaaataatgaaaattttaaagtgaagaatagttttaggtagaagtaaatagtatataatttaaatagaattttttaatgattttaaagagtaagaaatatttatttttaagaaattataaaagtagtatttaaataattgggttggaagattgttgattttttttattgtttttgaagtataaagtttgaaaatgaattggttagtaggaataatgaagtaaaaagaaatttagagagatgggagatgttgagagtaatgttatattttaattttgaggattttattttattgtgtaggttttatttgttttgaatttagtagtgatagtgagatttagtaaatagaagagggatttagagaaaatttttatatttatttataaaatatagatattgtagataggaaatagttgggggaatatttgtttttttttttttttttttttttggtaaagttattgagtaaggatttttttgggtatggtgataaataatattatatttttgtattttaaaattagagtatagaagtattttttttttttaaaagaatgtgtgttagtgatagggtttgtagatattaaaatatttatgttgttatagaaaataaggatttgttttttgattaattttttgttgggtatgaagatataaatgtttgttaatatattttattagtattaaaggaatatgggggatgggagagtaattttagattttagagtaaatgtattatttaaaataaaaaaagaaagaaaggatgataagattttttttagtaaattttataattttaattttgaagtgattggggtaaagtagattggaagatagtatttgggtgattttttgttttagttgttaagtgagaggtgtgattttattttttagaatttatggaggggtaggtagtattggattggtttttttagggtattgttttatatttttttttttgtgatgaggtaaagattatgttgagttgtaaaatttaattgaaatagaatatttttttttatttttttattaggttgtttgttattgttttttttttattttattattttgggagaagggtatttggggggtaaataatttttttgttgtttgaattttttatataatttaaatttgtgtgtgtgtgtgtgtgtgtgtgtgtgtgtgtgtgtgtgtatgatagagggagtttgtgtgttagagtgtgttttttttttttgatttttgtgtattttaaataatattagttggttagtaatatttttttgagggttatgatgttatttaaattttttaattgggtgattggttggtaatatggtttaagttagttgttttgttatttataatgtatatttgtttttgttattgagaatttagttttgattttttgttgatatagtttgtatttatttttttttggttttgtgaagtagtagataagaaagtgaattataaaataaggttgtaaaagtttagagtagatatatttttttttttagagagttttttaggtttggttttttaggagtggtggaaataatttggattttgaattttttttttttttttttttttatatgatttttaggggattgatatattaattgaaaatatagttttgtttgaaattttattttggttttttgtgttattttggggttagaaatttgtttgtagaagtgggtgttttaataaaaaataaataaatttgttttgtttggaagggggttgggtttgtttgagttttttgtgtggttaatatattgtagtaatgtttattttttagaaattaaagttagaaatttggaattatgttgtgttaatggtgtattatgtttagtaatattttgtgagttttattatgtgtttaattataatatttttaggaaaataaagaggaataagatatggttaagtttttttaggggtttttagttgaatgttagagataaagaggaaaattttatagttatatgatgggtatgtgtttttttaaaaatatgaatagtgtataatgagagggagtgatatattttttgggaagataggggagtaaaattttttggaaaatttaaaatgagggaggtagattgtgttatgagaggttttggggtattatgttgggaaattttagtgggtgggatttgatttaaagagtatattaagaggtattattaagaggtggtttagtaggtggttttggattatttttaatgtagggattatttat

SEQ ID NO: 563 - DNA, 6196 bp, Artificial Sequence
  chemically treated genomic DNA (Homo sapiens)
gtggataatttttgtattaagaataatttagggttatttattaggttattttttgatgatattttttagtgtgttttttgggttaaattttatttattgaaattttttaatatggtattttaaagttttttatgatataatttgttttttttattttggattttttaaaagattttatttttttgtttttttagagaatgtgttatttttttttattgtgtattgtttatgtttttaaaagagtatatgtttattatatgattgtgaagtttttttttttgtttttgatatttagttgaaagtttttgaagggatttgattatattttatttttttttgtttttttagggatgttgtagttgggtatatagtagagtttataaaatgttgttgaatatagtgtattattgatataatataattttagatttttaattttgatttttgaaaggtaaatattgttataatgtattaattatatagaagatttaaataaatttaatttttttttaaataaagtaggtttgtttgttttttgttagggtatttatttttataaataaatttttggttttaggataatataaagagttagagtaggattttaagtagaattgtgtttttagttgatgtgttagttttttgagagttatgtggaaaaaaaaaaaaagaaaaaatttaaggtttaggttatttttattatttttgggaaattaggtttggagagttttttagggaaagaggtatgtttgttttgggtttttgtaattttattttataatttatttttttatttattgttttataaaattaaagggaaataggtataaattgtattgataaaagattagaattgaatttttaatggtaaaggtaagtgtatattataaatagtaaaatagttggtttggattatgttgttggttagttatttagttgagggatttgaatgatattataatttttgagagggtattgttagttagttggtgttatttagaatatataaaaattagagaaagaaaatatattttggtatatagattttttttgttatatatatatatatatatatatatatatatatatatatatataggtttgagttatatggaaaatttaaataataggaaaattgtttgttttttaggtattttttttttagagtggtggggtggggaggggatagtgataggtagtttagtagaagaataaagaaaaatgttttattttagttgggttttatagtttggtatagtttttgttttattgtaggagaaaaagtatgagatagtgttttaaagggattaatttaatgttgtttgtttttttataggttttaggaaatgagattatattttttatttggtaattgggataaggggttatttgagtgttgttttttaatttattttattttagttattttagggttaaaattgtagagtttgttggagagggttttattgttttttttttttttttttgttttaaataatgtatttgttttagaatttaaaattgtttttttattttttatatttttttaatattggtaaggtgtattagtagatgtttgtgtttttatgtttagtagaaagttaattagaaaatagatttttattttttatggtagtataagtattttaatgtttgtgaattttgttattaatatatatttttttaagggaaaaaaatgtttttgtgttttagttttaaaatgtaaaggtatgatgttatttgttattatgtttaaaaaagtttttatttaataattttgttagaagagggagagagagagaaggtaaatgtttttttagttgttttttgtttatagtgtttgtgttttgtagataaatgtgaggattttttttaaattttttttttgtttgttaaattttattgttattgttaaatttagagtagatagagtttgtgtaatggaataaagtttttaaaattgaaatgtgatattgtttttaatattttttatttttttggatttttttttgttttattatttttgttaattaatttatttttagattttgtattttagaagtaatgggaaaaattagtagttttttaatttaattatttaagtgttgtttttgtgattttttgaaggtaaatattttttattttttgaagttattggggaattttatttaaattgtgtattgtttgtttttgtttagaattgttttttattttaaaatttttattgttttggaattgagagttatttataaattgttgaatatgtaattttgtggaatttgaaaaatagtttggggagatggatgtatttgtatagatatttgtatgagtagaaattattgtaaggtatttatgttaaattttttatttttgtagggtttttgtggtgttattatagaagatttttttaaattttttttatggttaagggttatagagtatggatatgaatttggggatttttttttttttttgtaggtgtagatgttttatttttaagattatgtttttttgtatgtgtgtatgtgtttttgtgtgtatgtgtttttgtgtgtgtaatttattaggattttatttataaggtatgttatatatgaagggttgtattttagatgatattaaagtttttaaatatgatttttggagttaaggttttggaattttgtatttatgtttagagagagtgttaaagttagagtaaagtgtaatttgtttttttaaaaaagaattttttgataatttttgttgattttgtatatttgtataatttaaataaatatatattgtatatggaaagtagaaattttttaagagttgtttgtttaatttttttgtttagaagaggatttttatgggtaaagtttggatttggggttttgtgttataaaattttgattttatatttagtgttgtgaagtttttttaggtaaatttggttgttgttgttagtgtattgattttttgtttttgattgttggttgtagttttagtttttatttttagtaaaattatattttttaagatttgtgttttttttttaatttgtaagtgtttttaagttgttgttattggttttattgatttaattgtttgagggtttaatttataagatgtttttgttatttagtgtagtatttagttgttgtttttaaatattttattattatgattttttttagttaagtaagtggttttaggagttaaagatatatttttgttaggtatttgattttgttgtttttgagatgttaatatatgtaggttattttgtttttaaagaaatgatgttattgtgtatatatattatgtgatttagtagttggagtttttgtttttttatttaggggattataaaagaggttgtggagtgttatttttgtattaattataagttaagaaaattgtttttaaatgtattttttatgttgtgtatgttgaatattttagaagtggagtttttaataagttgttatttttttttgtatttgaagtaggaagtggtttgagggagttgtgtggttttttatatgtaatttagtgggtaaaggtgttttgtttagaggtagagtttattagttgattgtattttgatttttaaggtatttttaagtgagtgagttgggggaagggagtaagggagtggattggagtttgggttattatttgggttgttataataggtatataatggaaataggtggtttgattggggggaaaagattgatttaaattttagttgtgtaatttgtttattgttttaatggataaaaggtagtttatttaggtttataatagtatatttgtttgggtgtttaaatgtaattagatgtttttataaattttatttataaagtagtatatgtttttaagattttagttttttatttatattggttttataatatttattttgatttgttgtaaaagatttggaataaataaaaatgattatatttatagtgagtatttttttatgattgttgtttttaaattttatagggtatttttattgtggtttagatatttggaattaattaatattttatttatttaagattaaaaaaaaaagaatttttaaaatttgggtttgtgaatgatttttgagaaagtgttttttgattttttttttttttttttttatgtttttttgattttttttttttttttttattatattttttttttttttttattgattttttttgtgtttggtaaaataaaaggttaaggaaataatgaatatatgggattatttgttttatattttaaatttttaagtaagtttggtattgtttttatttgtgggaatataaaattttttggttttttgtgggtgtattggattgttttttatattaaaggaaaatgtattagaggttttgttttgttttagaattgtaagtattgagatttatttgataatataatttagtaaaaaaaaaaaaaaagaaaaagagaaatttatttaaaaaaaattttaaatttttaagttttagagatttatatgtattgttgtatttaaatgtgttatattagaattattaaaaatatagttttgatatttaatgaagtttgaaatttattaaggttataatttgagtaatttttttttttggattttataaaaattgaagaatttgaaggtatttatagttgtaggtgtttagtttttagtattgttatgaatgtaataaagaagggaggggtggagaaataggatttggtagaataatatattttttagaattggtttatttttgtagtgtgggggtatgttttgtaagattaattataggtttgtttttttgaaaaatgttatgaggtttaggtgggttggatttgttgaggtttttaatggaaatattgaataggaaaattttattaattttataattaaaaaaaaaaaaaaatgagaattggatgataatatgttttttttagttttagtgttttgggttatgtagggggtggaagatttttatgtggagattttgttgagaaaaatgtagtaaatgtttagttgagtttttatttttttttttattttatgtttattatttatgattatttgtaaatagagggtgttttttatttttaattgttttataattattaattgaatatttatattttgttaatgagagataggggttttggttttttttttttttttttagttgttgaggtgaaggtttgattataaaaaatggaaattattattagaatgatggggaaaattttgttattgatatagagttattaaattgagagtttatggagggtaaggagggtagttagaaaataaatgattgtttttttaaaagtgatggggttgaatggatttgttattattttgaggtttaaaaaaaatgttttttttataattatagtttttagtatgattttataatttttttaatagtgttttttatttaatattttgttagggattttttttatgatgttgaaagtagatgtatttgagagaagtgaagttatttattttgagaggttttttggaaaaagttatatttttgtgttataagtaataatatggaaaaatttaatgattattttagtatggtttttattatttagagtgaggatgaagatttgagttataggattgttgtttttggtaaggttgttgtttggtagtttattattgattaagttatgttaattaggggttttttggtatattttgttataaaatagatatagtgatatataagtttttttaagagatgaagttataatttttgtgattaaaaataaaataaaagatttttgttagtttgagtttagtgttttatatatagaagggatttttaatatgtgttgatttgatattggatttgaggttagggattttagaatataggagtggtttttatttgagttaattttattttttgatttttatatttttttttgtttttgttatttttttttatttgtggttgtgttaattgttgatatgttttaggtaaggaattagttttttttttttttttttttttttttttttttttatattgaggaaataaaataaaaataaaattttgtgatgatatatagtattgttaaaagttattttttggttatagtaaattatttttagttaaaaatagggaatgatgttttggttaaaaatattttgtttaataatgaatgtatatattatttatggatg

SEQ ID NO: 564 - DNA, 6196 bp, Artificial Sequence; identical to SEQ ID NO: 562
  chemically treated genomic DNA (Homo sapiens)

SEQ ID NO: 565 - DNA, 6196 bp, Artificial Sequence; identical to SEQ ID NO: 563
  chemically treated genomic DNA (Homo sapiens)

SEQ ID NO: 566 - DNA, 6000 bp, Artificial Sequence
  chemically treated genomic DNA (Homo sapiens)
taaagattatgtgtttagagttgatttttttatatatagtaaattttagtggatgaaaaggaaattgaatgaaatttgttgataataattgatgtttgtaggaataattggtttagatataaaatagatattaatgtagtttggggatgattaaaatgtagtagtttttaagttattgttagtatatatttttttagtttaaaaaaaaataaaagtagttttattaaataattagataattatgaggtgagaagtattgtttatagtatttgataattttaatttttgatggtttttaagattaagattttaaataagtaattttattttatttgattggatttaattagatttaatttaatttaatttaattttgttagtttaataattaaatatgggtagttattatagtatttaggttatgagttagatatttggatttaaatgtaaataaatatgttttttggtattaagaagtttattgatagggtattatttttggtagggtagattaaaatatttaagaaaaatataaaggatataatttattttttatggttattttttttttatgataataatatttagttgtattttttttttattatttaattgtaagttttttgaaaataaggttaattttttatttatttttaggtattttatttatattttatttaatgtttatatataatagatgttttattaatgttttgaattatatgaaaataatttaaatggattaattttttttgggtaaataagattgtttagttgattagaaagttagtaagaatatttttgggtatgaaggtatgttggatatttttgtgtatgagggtatgttggattaatataagttatggaattttataaggtaaaatttatgatatatatatttttaatgataatattgataagaatatatgatttataaagttattttttagttaaagttatatagtaagaattaagatttgttatatataatattttttttttaagttattgagatataatttttaaaaatttgttgaaatttgattgttgtagtaatagaataagagaatttggaaattggtttttattttagttgtttaatatttttaagtgtttgtgtaaatatttataagtattatatagttatttaggaataattattttttttattttaattttttattatttaatgtaaatattataggtatagaaagatttagtttttatgtattgtgtatggaaattttggagtaatgttgtgttgaatattataatttaatttggtatgtaatagaggatatttttaggtttggtaattatttagtgaattggattaaaggaaattgtataaatggattattaaggaaaaaaaaagtttttttgggtataataagtgagaattatttttttatttttttaaaaaatgaggattagtagttgtaaattatagaataattatgatttattgttggattatgtgatgttttatagttattttttataggatattttaaaggtaaaataagtttgttattggaaaattatttatttaatgtatttatttatttgttttgtaatagagaattggatagaattgttttattgttagaaaaataaatgagtttgtttaattaaaggattggttggaagtaaatagtgggaatttgtttatttaaatagtagaaggtatttttgattttttgttattagtgatttaaaaattatttgttgttaaatttattgtaagtattgattgttaatatttttataagtttttttttttttattttttttattgatttttagattggtatatataggttattttttattttgttagttatatatatatatattttatttgtttagagagaggttgatatttgggaaggatgagagagattttaagtgtgtgagttattataggagttatttaaagtatagtgggtaattgaggtaagttgtttatattggagtgatatgaatttttaagaatgatttatgtttagttttttggaattttttaaaattttaaagaattataaggaataagtatttggttttaaatttttttttgttttataatatatagtgagatagatgtatgggagttagattttttaagtgattagtttttataggaattattgatttttgtttgtgtgtattatttatatgttttgatttggttgtttattttttattggttgttgattttttaattatttaagagttatttaagagataagtgattttgtatttgttagagatttttttttagatggtgatattattgatgggttttggagaagaattatgttaaaagagagtaataataaaaaaattaaggttaagtggtatagagggtaaattagtatggtattttagtttgtatttagagatagtttgtgtatttgtaaataggtttgtttttaaggggagttaattttttgtttgtttatggtgattttatattgaatggagatatttaggatatgttttttaatatttttttttttagatttatatgattggagagtttttattattttattttaaattatatagtatttaaagtagttttgtatgtgttttatatgtttatatgtgtgtttataggttttgaaaataaaaatattaatattttagggttattttgttttgtttttttattgaaaggaatggaatagtgaggtggattataatagttgaaagaaggtttagtaggaagtagttaaagatgaattgttaaggaggaaaattttattttagatttgtaaaatttgttaaagttttgttaaaatattatgtttattttaaggtgaggaattttagaggtttaggatggttgttagatatgggtatttatttagttatttatatattttttgtggttgtaaatttatagagttgtatattttagatttgagtagtatattgagagggagggttatttattgaaataaaagtttttgtttttatatatgaattgaagagtatttattagtttagttttgtagagtgtttttggtttagttgtggtagagttggtgaaggtgagtaggtatagtgttaggtagaagagatgtgaggaggatatggtgtgtatttttatttgtttaagaaatagagggagggttaggttttttttttgatttttgtaaggggagtggggtgggatagaagtgtattgatttttatgattttatgattgttattaattaggattatttagtatagaagttaatagagtatatgagaatttagagggagttgtggatggagtgtgttttggtatttaataatttgtgtttatttttttggttattgtggatttttggaggagttttttttgaattttttttttatgggtttttattttaatgaattgagataaaatatttagaaatgtttattatggaaatgaaagatgttattattatagtgggattttatattattttgagattttggtagaatttttgaattattaaaggttaaattgtgtttagtatagatttggggttaaataagttttgttaatttaaatttttttaatattggttatttatagatggtatatgtatttattattgagtagaatatttttaattaaaatattattttttatttttgattaaaaataatttattatggttaaaaaatggtttttgataatattatatattattatagggttttgtttttgttttgtttttttaatatgagagagagagagagagagagagagagagagagattgattttttatttggggtatattagtagttgatataattataaatagaagaaaataatagaaatagaaaaaaatatgagaattgaagaatgaaattggtttaaatagaaattatttttgtattttaaagtttttggttttaagtttaatattaaattaatatgtgttgagaattttttttgtgtatagggtattgggtttaaattggtaaaaattttttattttatttttagttataggaattatggttttattttttggagggatttatgtgttattgtatttattttatagtaaaatatattaagggatttttggttggtatgatttagttaatgatagattgttaaatggtagttttgttaaaagtagtagttttgtggtttaagtttttatttttattttaagtagtagaaattatgttaagatgattattaagtttttttatattgttatttgtggtataaagatgtggttttttttaagaagttttttaaggtgagtggttttattttttttagatgtatttatttttagtattatgggaagagtttttgatagggtgttaggtgaggggtgttattaaaagggttgtggagttatgttggaagttataattataagaagagtattttttttgaattttagagtagtggtaggtttatttaattttattatttttggagaaatagttatttattttttgattattttttttgttttttatggatttttaatttagtggttttatattagtggtaaaattttttttattattttaatgatgatttttattttttgtagttagatttttattttagtaattgaggaaaaaaaaaaaaaattaaaatttttgttttttgttaataaaatataaatatttagttaatggttgtaaagtagttgaagatgaaaagtgttttttatttgtaaatgattataaataatggatataaaatagaagaggaggtaaaagtttaattgaatatttattgtattttttttaataagatttttgtatggaaattttttattttttatatagtttaaaatattgggattggaagaagtatgttattatttagtttttatttttttttttttttggttgtaaaattagtggggtttttttgtttaatatttttattggaaattttaataaatttaatttatttggattttgtggtattttttaaaagaataaatttgtgattgattttgtagagtatatttttatattgtgggaatgggttagttttagaaagtatgttattttattgaattttatttttttattttttttttttttgttgtgtttatagtaatgttgaaggttaagtatttgtaattgtagatgtttttaagttttttagtttttgtgaaatttagggaaaaaaattatttaagttatagttttagtgaattttaaattttattagatgttaaaattatatttttaatagttttagtataatatatttaagtgtagtgatatatataagtttttggaatttaagaatttaagattttttttaaatagatttttttttttttttttttttttttttgttgagttatattgttagataaattttagtatttatagttttaggataagatagaatttttagtgtatttttttttagtgtagggaatagtttagtatatttatagagaattagagaattttatgtttttataaatgaaaataatattgaatttgtttaggagtttaaagtgtgaaataagtggttttatatgtttattatttttttggttttttattttgttaaatataaaagaaattaatagagagaaaggaaagatatgatagaaaaaaaagggaagaattagaaagatatgagaaaaaaagaaaaaaaaattagaaaatatttttttaaaaattatttataaatttaaattttaaaagtttttttttttttaattttagataaatggaatattaattgattttagatgtttgggttataatgaaaatgttttgtaaaatttgagggtaatagttataagaaaatatttattgtaggtgtaattatttttgtttgttttaggttttttatagtaggttagggtgggtattatgaggttgatgtgaatagaaaattgaagttttaaaaatatgtgttgttttgtgggtggggtttgtgaaagtatttagttatatttggatatttaggtaggtatgttattatgagtttgggtaaattgttttttgttta

SEQ ID NO: 567 - DNA, 6000 bp, Artificial Sequence
  chemically treated genomic DNA (Homo sapiens)
tggataaaaggtagtttatttaggtttataatagtatatttgtttgggtgtttaaatgtaattagatgtttttataaattttatttataaagtagtatatgtttttaagattttagttttttatttatattggttttataatatttattttgatttgttgtaaaagatttggaataaataaaaatgattatatttatagtgagtatttttttatgattgttgtttttaaattttatagggtatttttattgtggtttagatatttggaattaattaatattttatttatttaagattaaaaaaaaaagaatttttaaaatttgggtttgtgaatgatttttgagaaagtgttttttgattttttttttttttttttttatgtttttttgattttttttttttttttttattatattttttttttttttttattgattttttttgtgtttggtaaaataaaaggttaaggaaataatgaatatatgggattatttgttttatattttaaatttttaagtaagtttggtattgtttttatttgtgggaatataaaattttttggttttttgtgggtgtattggattgttttttatattaaaggaaaatgtattagaggttttgttttgttttagaattgtaagtattgagatttatttgataatataatttagtaaaaaaaaaaaaaaagaaaaagagaaatttatttaaaaaaaattttaaatttttaagttttagagatttatatgtattgttgtatttaaatgtgttatattagaattattaaaaatatagttttgatatttaatgaagtttgaaatttattaaggttataatttgagtaatttttttttttggattttataaaaattgaagaatttgaaggtatttatagttgtaggtgtttagtttttagtattgttatgaatgtaataaagaagggaggggtggagaaataggatttggtagaataatatattttttagaattggtttatttttgtagtgtgggggtatgttttgtaagattaattataggtttgtttttttgaaaaatgttatgaggtttaggtgggttggatttgttgaggtttttaatggaaatattgaataggaaaattttattaattttataattaaaaaaaaaaaaaaatgagaattggatgataatatgttttttttagttttagtgttttgggttatgtagggggtggaagatttttatgtggagattttgttgagaaaaatgtagtaaatgtttagttgagtttttatttttttttttattttatgtttattatttatgattatttgtaaatagagggtgttttttatttttaattgttttataattattaattgaatatttatattttgttaatgagagataggggttttggttttttttttttttttttagttgttgaggtgaaggtttgattataaaaaatggaaattattattagaatgatggggaaaattttgttattgatatagagttattaaattgagagtttatggagggtaaggagggtagttagaaaataaatgattgtttttttaaaagtgatggggttgaatggatttgttattattttgaggtttaaaaaaaatgttttttttataattatagtttttagtatgattttataatttttttaatagtgttttttatttaatattttgttagggattttttttatgatgttgaaagtagatgtatttgagagaagtgaagttatttattttgagaggttttttggaaaaagttatatttttgtgttataagtaataatatggaaaaatttaatgattattttagtatggtttttattatttagagtgaggatgaagatttgagttataggattgttgtttttggtaaggttgttgtttggtagtttattattgattaagttatgttaattaggggttttttggtatattttgttataaaatagatatagtgatatataagtttttttaagagatgaagttataatttttgtgattaaaaataaaataaaagatttttgttagtttgagtttagtgttttatatatagaagggatttttaatatgtgttgatttgatattggatttgaggttagggattttagaatataggagtggtttttatttgagttaattttattttttgatttttatatttttttttgtttttgttatttttttttatttgtggttgtgttaattgttgatatgttttaggtaaggaattagttttttttttttttttttttttttttttttttttatattgaggaaataaaataaaaataaaattttgtgatgatatatagtattgttaaaagttattttttggttatagtaaattatttttagttaaaaatagggaatgatgttttggttaaaaatattttgtttaataatgaatgtatatattatttatggatggttaatattgagagaatttaaattaataaaatttatttggttttaaatttgtattgagtataatttaatttttgataatttaaaagttttattagggttttagagtgatatgggattttattgtaataatagtattttttatttttgtagtaaatgtttttagatattttgttttaatttattgaaataggaatttataaagaaagggtttagggaggatttttttaaagatttatagtagttaggggaataaatataggttgttggatgttgagatatgttttatttataattttttttgggtttttatgtattttattggtttttgtgttgggtagttttgattaatgatagttgtggaattgtgggagttaatgtatttttgttttattttattttttttgtaaggattaaggaggaaatttgattttttttttgttttttgggtaggtgaagatgtatattatgttttttttgtattttttttatttggtgttgtgtttgtttatttttattagttttgttatggttggattggagatgttttgtggggttgagttggtggatgttttttagtttgtgtgtggagataggggtttttattttagtaagtagtttttttttttaatgtgttgtttaagtttaaagtgtatagttttgtggatttataattgtagggagtgtgtgaataattgaatgagtgtttgtatttggtagttattttaggtttttgagattttttattttaaagtaagtatagtgttttggtgggattttggtaggttttgtagatttaggatggaatttttttttttaataatttgtttttaattattttttgttaagtttttttttaattattatgatttattttattattttattttttttaatgaaaggataggataaaataattttgaggtattgatgtttttgtttttaaaatttatgggtgtatatataaatatatggaatatatgtagggttgttttaagtgttatgtgatttggagtaaaatagtaaggattttttagttatgtggatttgggaaaaaaaatattaaagggtatattttagatgtttttatttaatatgaaattattatgaatagatagaaggttaattttttttaaaggtaggtttgtttgtaaatatatagattgtttttaaatgtaaattgaaatgttatattgatttgttttttatgttatttgattttgatttttttgttgttgtttttttttggtatagtttttttttgggatttattaatgatattattatttggaaaagggtttttgataagtatagaattatttattttttaaatagtttttaggtgattagaaagttaatagttagtaaaaagtagatagttaagttaaggtgtataaataatatatataagtaaaagttaatgatttttgtgggaattgattatttaaagaatttagtttttatgtatttattttattgtatattataggatagagaaagatttaaagttagatgtttgttttttataattttttggagttttagagagttttaggaaattgagtatgagttatttttaaaggtttatattattttagtgtagatagtttattttagttatttattatgttttgaatagtttttgtgatgatttatatatttgaagttttttttattttttttaaatgttagtttttttttaggtaggtggggtatgtgtgtgtatgattggtagggtagagggtggtttgtgtatattagtttggagattagtaagggagatgggaagaaagaggtttgtgagggtattggtgattagtatttatagtggatttggtaataaatagtttttaaattattagtgataaagaattagaagtgttttttattatttgaataggtaaatttttattatttgtttttagttagttttttaattgaatgaatttatttatttttttggtaataaagtaattttatttagttttttgttgtagagtagatgaatgagtgtattgggtgagtgattttttaatagtagatttgttttatttttaaaatattttgtggaagataattgtgggatattatatgatttaatagtgggttataattattttataatttgtagttattgatttttattttttaaagaaatgaaaaagtggtttttatttattatgtttaaggggattttttttttttttgataatttatttgtgtaattttttttgatttagtttattaggtaattgttaagtttagaagtgttttttgttatgtgttaggttgaattgtgatgtttaatatgatattgttttagaatttttatgtatagtgtatgaaaattggatttttttatgtttatgatgtttgtattaaatgatgaaaaattagaatggaaaaaatgattgtttttaagtaattgtatgatatttataagtgtttgtatagatatttaaggatattggataattaaaatggaaattaatttttaggtttttttattttgttattgtaataattaaattttagtaaatttttaaaaattgtattttaataatttgaaaaggaaatgttatatatagtaaattttgatttttattatatgattttagttagaaagtggttttgtaaattatatgtttttgttagtattgttattgaaaatatgtgtgttatgagttttgttttatagaattttatgatttatgttaatttgatatatttttatgtatagaagtgtttaatatatttttatgtttaaaagtatttttgttaattttttagttaattggataattttatttgtttaaaagaaattagtttatttagattatttttatgtaatttaaaatattgatggagtatttgttatgtgtaagtattgaatgagatatgaatgagatgtttagaaatgaatgagagattgattttgtttttaaggggtttatagttgagtggtaaaagaaaaatgtaattaagtattattgttataagagaaaaataattatggagaataaattatattttttatgttttttttgaatattttggtttattttgttaagaataatattttgttaatgggttttttgatgttaaaggatatatttatttatatttgaatttaagtgtttagtttatagtttggatgttatagtagttgtttatatttgattgttgaattgataggattgaattgaattgaattgagtttagttgaatttaattgaatagaatggaattatttgtttgggattttggttttaagaattattaagaattaaggttgttaagtattgtggataatattttttattttatggttatttagttatttaataaaattgtttttatttttttttgaattgaaaaaatatatattaataatgatttagaggttgttgtattttggttatttttaggttatattgatgtttgttttgtgtttgagttaattatttttataggtattaattgttgttaataaattttatttagttttttttttatttgttgagatttattgtgtgtggagaagttagttttaagtatatagtttttg

SEQ ID NO: 568 - DNA, 6157 bp, Artificial Sequence
  chemically treated genomic DNA (Homo sapiens)
tttaagtagttgggattataggtttatattattaaatttgttaaattttttgtatttttagtagagttagggttttgttatgttggttagattggttttatatttttggttttaggtgatttgtttgttttgattttttaaagtgttgggattataggtgttaattattgtgtttggttttaattggataattttttttttttttgagattaagtgttattttgttgtttaggttggagtgtagtggtgtgattttggtttattgtaattttttttttttaggtttaaatgattttttttttttagttttttattaattggataatatttaaaataataaatgtaattatttgtattggatttaaaagagtaataaatgatagggtatattgttattagtaattaattagaagtaataggtaaggtgaaattttttatttgttatttttgaattggtgtatagataaaggagagttaaggatagtgaggaatttagaaaatattattatatgatgagtaattgatgtgaagttattggagtaatttataagtttatatgatgttatagtagaaagatttaagaattattttatattttttatttggaggaattgtattttgtttggagaaaagatagtattatttttattttttatttattgttttttttatatttaaattatttagttttatttatttagtttatttgttttgttgtataaagtattttaaagtaatttatagtagaaatatttataataattagataaagaatatagtatagtttgtaaattagggtaaaaagatattagttatgtagtttttattatatgaaattgaaattaagaaggtttttttgattaatgatttttaataatggttagattattttttgttttgttatttttttattttgtagtagatgtgatattgtgatatttagagtttaggttttaagaggttttatatattttgtttttaaaattttgtttagtttttatgagaagtttggttagtttgtaggagtatgagagattatatagattatagttgaattatagtagttgtttaagtttagattttagatttatgagagaatttaggtaagataaagtgggggtttgatttaggtgaattgaattttttagtatattttagatttataagtattgataaatggttgatgttttattaaagttttgggaatagttttgtttgttatgtagtaatagattatttataaagaatttatgaaatgaagtaaaatattttataattgaattttaaaataagtaagtggaatttaattaagtggaataggtttattgttttttttaattatgggaattttttttggagttttttatttttaaggaatattttatttgtgtttttattatatttttattaaaaaaaatttattggttttgtgttttttttatagttttgatttattttaaaatgatagttataaatttgatgaattaatttgtagtaatatgttttaattttttttttttttttagttattattttgtattttagttatattgttttaatgtttttaataatgttataagttaaatatttgatagtaggaatttttaaaaattttagttaatgtttttttatttttttttttttttgtaaggtttgttattatattgtgaatgttattttattagtgtaaattgtatttgtttatttgtaatataatagaattgaaataaaagatttttattattttttgtagttttttggatttgggttttgtatagttatttatttgttttggtgtgtgtattttttttttagttaataagtataagaggttttttatatagtagttggttaaaatgtagggatgtatattatggtttgaataaaattgtaatatgtatatgatatattttattttaatatggaggaaagttatgaatatttttaggaaaatggttatatgtaagtaagttgtgttttttatatgaaggaaaaataatatattgattagaattatattgatgattataatgtagggaatataatttttttttggaagtttttataatatttttgaatttatagaaatttgttataaggaagtgattagatatagatgaaagatttatgtagaatgatgtttatagtagttttattagtaatagtgaaaaattagaaattgaattttttaattgttagttaaagtataatttatatagtagaatattaaagttaggtttttaaagattatttaattttatattggaaaatatttatgtataaaattaaatgaaaatgaaggaaagaaaatatagatagtattattttattattgtaataatatatagaaatgtaaataaatggaaatagagagggagaaggaaaaatattttaaaatgttaatgtgtttgggtagtaagatatgtttatgtaatttatttttagtgtttattatgagtattattatatttgtggttaaaaattgtttaggaatgttttggagttttagttttttgagtgtaggtagagtagtttgggtttgtttatgtttttggttttgtgtggtgtagtttgaattgttttggaaatagttggtttggtgtgtgtggtgggagggatgtgagtgtttggaagagttgttttatgtgtttttggggaaattgtttgggagtgagaaggattgggattgagaggaaattgaaaagtgaaagttagagtttgtgggagtagtatgtaggtgtagtatgtaggtgtagtggggtttttttgtagtttgtttttttttaatggtttttttttggtggtgggtgtattgtttgtatgtttgttttggggttgtagattggtttgtgggatggggttttagagaggttggtttatgtggtttgtatgtgtgagtgttagttttgtatatgatggaaggtggaggtgtgggtggttgttgttttattttagagggagggagggaaatgtgttttgatttttgtatttaaggtgttggaaattttatttttgtatttttattgtttttttttttgttttgaaaaggttttttttatttgttttattttgttatttatatagtttgtatttgtattgatttagattttgttttgtttggtaagttgtgatttttagttagtttgggtagttgtttttgaattagaggttggggtttggtagtttttataggtgtttttaggtttggtttgtaaggggtttgttttttttttttggggtttttttgtttttatgtttttttagttgtggtgattatattagaaggaatgtgggagaagtataatggagaatgtttagttattggataatgattttgaaagtttggttggttgaggaaataagagttttgtgtaatgtttgtgatttatttaatggttttaggaggtatgagattgagtttttttgggttttgtttgtttatttttaaggggttttatttttttagggtgaatttggtatttatttagaatttttagtgtgtgaaagggtttatttattttattgggttttaatttttagttttttgtgagagtgatgattagttttaaaatggttgtatataaataagattttaaggtatagagttttattatgtaaatagatgtttatttttttttgttagaataatataggattagttatgtaatttgtagggagggtttgttgtaaaatgaaaatgtggggttttttatttaaaattaatgaagaattttaagaaggtaataggagagtatgaagttaagtgtggagtttttttgagtgtttgttttgtggaagttagatttaggtggggaatttgggggtattttttgtatagtaattttgtttgatgtttatttaaatgaagaaataaattttataatattatttatttgtttaaaagtttttgttggttttaatttgtaataagaatttagggtttgttaatttgggtttatttattttttttatttattttattttattttatattttattaggttttttttaatttttttagtttttttttgttttttagatattttaagtttttatttgtttgagttttatgtatatatatattggttttttgggatgttgtttttttgattgtgtttatggattgttttttttttattttttaggttttagtttagttattatttttttaaagatatttttattgattgttttttttagtgattgtattatatttgtaatttttataatatttgttaaatttatttttgtttattatttgtttgtttttatttttttttgttagtgtgtaagtttataataggagggagtttgttttgtgttaatagttttttttatttagtattttatgagataatttagtttaattttttagggtatttatgtgtgtaatgaattttttgtttttttgtatatttagaatgttattgtatgttatttttgggagaattgagaaaattgttaagtaaattattttttgtgttttgtggtttagaaattttggttaagtaaagtaatgtttgatataggtatttttaaatattttaaaaatattttttgaatgaataaatgaatgttattgattaatattgagattaggaattataggttaatttagttatttagattttagtattggttttaagatttattgagttataattgaggggggaagagaataatgagtatgtatagtgtaaaaaatttttttaaaggatttttaatgagagttttatttttttatattttttttaattttttttttttttttgttttttttggatggtagagttttttttgtttgtggtagtttattagtttgtgagatgtttaagaagatgattgttaagtttgatataagagtgttgtggaggattttttttttttttgagttggagttttgttttgttgtttagattgtagtgtagtggtgttattttggtttattgtaagttttgttttttgggtttatgttattttttgtggaggatttttattaggggtagaagtagtaatgtttttgagtgtaatggagagtttaggggaaattttaggaatatttggtttatttatgagtaggtagatgtttaggatgttaggtatgtatgagataatatttagtattaaagggaagttagagtgagtttataaattgtaattttagataatgtttattggaagtttagggtgaggtagggaggaagttttttttgtgtgattaaaagtaagtgtgttttggttaattaggatgaagtataatattgggggttgttttatgattttagagtttggagttgttaggaagagaattttagtttagttttgtaggtagtttaaggagtaaaggaaaggaaggaattaatgattgtttttgatgtgtttaaatattaaattattaataaatatttatttagggttagattgtattagattttagggatataattgtgagtagggttgttttggtttatgtatatatagagtttgtttagagtttattgaggaaaatagatgatattatttatattaaaggagataagtattgtgttggggatgtagaggatgttatggaggaagtgtggtatgatttgagttatgtgtatatatgtgtgtgtgtgtgtgtgtgtatgtatgtgtgtgtgtttggtaggaaggttttttagagtttgaagaatgtgtaaatattatttaggtgtagggatatatgggatggggttggagaattgagaggatgtggtaggggaaatagagagaatatgggttattaaagaaattgaaagtagtttagttagttttgtgtgtagatgttttggtggataagaagttgttggggaggagtgaagagagatgagttgaagattaagaggggattaaataatatgtgattttggaaagatttgttgtgaattgtggtttttatttaaagttgggatttttaattagtttttgtgatatggatttttttggtagtttgatgaaatttgtaagttttttagaaaataatgtttttagttgaataagataagatgtataagatttaaaagaaaattaattatattgaaatattgatattgggttaattttgtgatatattaaaattaattttgtgatatagtaatataaatgatttttttttttttttttttttgagatagag

SEQ ID NO: 569 - DNA, 6157 bp, Artificial Sequence
  chemically treated genomic DNA (Homo sapiens)
ttttgttttaaaaaaaagaaaaaaaaagaattatttatattattatgttataaagttggttttaatatattataaagttggtttgatattagtattttaatgtaattggtttttttttgaattttatgtattttattttatttaattaaaaatattattttttgaaaaatttataggttttattagattgttaaagaggtttatgttataaaaattagttaagaattttagttttggataaagattataatttgtaatagatttttttaaagttatgtattatttagtttttttttagtttttaatttatttttttttatttttttttaatagttttttatttattaaaatatttgtatataagattgattgaattatttttagtttttttgatggtttatgttttttttgttttttttgttatatttttttaattttttaattttattttatatatttttgtatttggataatgtttatgtattttttaggttttggaaagtttttttgttaaatatatatatatatatatatatatatatatatatgtatgtgtgtgtatggtttaggttatgttatgttttttttatagtattttttatatttttggtatagtgtttattttttttggtgtaaatgatattatttattttttttaatagattttaagtaagttttgtatgtatatggattaagatagttttgtttatagttatatttttggaatttagtataatttggttttgaataaatatttattaatgatttggtgtttggatatattaagaatagttattagttttttttttttttttgttttttgggttgtttgtaaaattaagttgaaattttttttttaatagttttaaattttaaaattatgaaatagtttttaatgttatgttttattttgattaattaaaatatatttgtttttgattatatagagaggattttttttttattttattttgaatttttaatagatattgtttagaattatagtttataagtttattttaatttttttttgatgttaggtattattttatgtatgtttaatattttagatatttatttatttatagatgaattaagtgtttttgaaattttttttaaattttttattatatttaagggtattattatttttgtttttagtaaaagttttttataaagaatggtatgaatttgggaggtagagtttgtagtgagttgagatggtattattgtattatagtttgggtgatagagtaagattttgatttaaaaaaaaaaaaagttttttataatatttttatgttaggtttgatagttatttttttagatattttatagattgatagattgttgtaaatggaaagaattttgttgtttagagagggtagagagaggggagaggttggaaggggtgtgaaggagtagagtttttattaaaagttttttagggaagttttttgtgttatgtatgtttattatttttttttttttttaattgtggtttgataggttttagagttagtgttgagatttgaatggttgaattaatttgtgatttttgattttagtgttggttagtgatgtttatttatttatttaaaaaatatttttgaaatatttgaaaatgtttgtattaggtattgttttgtttaattagggtttttgaattataagatatagaaagtgatttgtttgatgatttttttagtttttttagggatggtatatagtgatattttagatatataggagagtagggaatttattatatatatagatattttgggggattagattgaattgttttatggaatattggatggaaaaggttgttaatatagaataaatttttttttgttgtgaatttatatgttggtgaggagagatgaaaatagataaataataaatagggataggtttaataagtgttatgaggattgtaagtgtgatatagttattggaagaagtaattaatgagggtgtttttgaggagatgatgattgaattgagatttagagaatgggaaggaggtagtttatgaatatagttaggaaaatagtattttaaaagattagtgtatgtatgtatagggtttaggtaggtaaaaatttggggtatttgaggaatagaaagaggttaaggggattgaggggagtttagtgaagtatggggtgagataagatgagtaagaggggtaggtgagtttaaattggtgggttttggatttttattgtaaattgaagttagtagaggtttttaaataggtgagtggtgttataaaatttgtttttttatttaagtgaatattgaataaggttgttatataagaaatgtttttaaattttttatttaggtttggtttttatagggtaggtatttagaagggttttatgtttggttttatgtttttttgttgtttttttgaaattttttattaattttgagtaagggattttatatttttattttgtaatgggttttttttgtaaattatatagttggttttgtgttgttttaataggggaaaataaatgtttatttgtatagtaggattttgtattttagggttttgtttgtgtgtagttattttggggttggttgttatttttataagaggttggaggttggggtttaatgaggtaggtaggtttttttatatattggaggttttaggtgggtgttgagtttattttaagaaggtagagttttttaagagtaggtgagtagagtttaaagaaatttagttttgtgttttttagaattattgagtaagttatagatattatataaaatttttgtttttttagttagttgaatttttgaaattattgtttagtgattaagtattttttattatattttttttatgttttttttggtataattattataattgagaaggtatgggggtgagaagattttagaagaaagaggtaagttttttgtagattgagtttgaggatgtttatagaaattgttagattttaatttttggtttaagggtagttatttaggttggttgagggttatagtttattagataggataagatttgagttagtgtaagtgtaaattgtgtagatagtgaagtgaagtgggtaaaagagatttttttaggataaggaaagaaatggtggaagtgtaagggtaaggtttttagtattttaggtgtagaaattaggatatgtttttttttttttttttaaggtgaaatggtagttatttgtgtttttgttttttgttgtgtgtagagttaatatttgtgtgtgtgggttgtgtggattggtttttttgggattttgttttgtaagttgatttgtagttttagggtgagtgtgtgagtagtgtgtttgttgttagggagaaattgttgggaggaagtgggttgtgggaaagttttgttgtgtttgtgtgttgtgtttgtgtattgtttttgtaggttttaatttttgttttttggtttttttttaattttagttttttttgtttttgggtagtttttttgaaagtatgtggggtggtttttttgagtatttgtgttttttttgttgtgtgtgttgggttagttgtttttgaagtggtttaaattgtattgtgtaaagttaggggtgtgggtgggtttgggttgttttatttgtgtttggaaagttagggttttaaagtgtttttgagtggtttttgattgtgaatgtgatagtgtttatggtaaatattgaaaataaattatatagatatattttattatttagatatattaatattttagagtatttttttttttttttttttgtttttatttatttatatttttatatattattataataataggataatattgtttatgtttttttttttttatttttatttaattttatatgtggatattttttaatgtgaaattaaatagtttttgagagtttaattttgatattttattatatgaattgtgttttaattgatagttggaaaatttagtttttgattttttattgttattaatgaagttgttatgaatattattttgtataaattttttatttatatttgattatttttttatagtagatttttgtaagtttaagaatattataaaaatttttaaaaaaagattgtgttttttatattataattgttaatataattttggttgatgtgttattttttttttatgtaaagaatatagtttgtttgtatatggttatttttttaaaagtatttatagtttttttttatattgggatgaaatatgttatgtatatattgtagttttgtttaaattgtgatatgtatttttgtattttaattagttgttatgtaggaggttttttgtatttattaattggaaagaaaatatatatattaagataggtaagtgattgtataaaatttaaatttagagaattataagaaatgatagaaattttttattttaattttattatattatagatgaataaatatagtttatattgatgaagtgatatttatagtataatagtaagttttatagaaaggaggagaggtgaagaggtattgattggaatttttagaaatttttattattagatatttagtttataatattattagaaatattgggataatatagttgaaatgtaaaatggtagttggaaggagagggaaagttaaaatatattattatagattggtttattagatttgtagttgttattttgaaatagattaaggttgtaaagaaagtatagagttagtaagttttttttaataggaatgtggtaaggatatagataaagtattttttaaggatgagagattttaggggaaatttttatggttgggaagggtaatggatttgttttatttaattaagttttatttatttgttttagaatttagttgtaggatgttttgttttattttataaattttttatgagtgatttattgttgtataatagatgaaattatttttaaaattttggtaaaatattaattatttattagtgtttgtgagtttagggtatgttggggagtttagtttatttgggttaggtttttattttattttgtttgggtttttttataaatttgaggtttaaatttgaataattattgtgatttaattgtggtttgtgtggttttttatgtttttgtaagttagttggattttttatggaggttgggtagggttttgagagtggagtgtgtaaggttttttgaggtttagattttaaatgttataatgttatatttgttgtaaggtggggaaataatagagtagggaataatttggttattattgaaaattattgattaggagagtttttttagttttagttttatataatgaaaattatgtaattgatatttttttgttttggtttgtaggttgtattgtattttttatttagttattgtagatatttttgttataagttgttttaaaatgttttgtgtaataaggtagataaattaagtaaatagaattggatgatttgggtataaaagaaatagtgagtgaagaataggaatgatattgttttttttttaagtaaaatatagtttttttaaatgggaagtgtggagtagtttttaagtttttttattgtaatattatgtgaatttatgagttattttggtgattttatattagttatttattatataatagtattttttggattttttattgtttttgatttttttttgtttgtatattagtttaggggtggtaaataggaaattttattttatttgttgtttttgattgattgttggtgatagtgtattttgttatttgttgtttttttaaatttaatataagtagttgtatttattgttttaaatgttgtttagttgatgggaggttgagggaggagaattgtttgaatttaggagggggaggttgtagtgagttaagattgtgttattgtattttagtttgggtgatagagtgatatttggttttaaaaaaaaaaaaagttatttagttgaggttaggtatagtggttgatatttgtaattttagtattttgggaggttaaggtagatagattatttgaggttgggagtgtgagattagtttggttaatatggtaaaattttgattttattaaaaatataaaaaatttgatgggtttggtgatgtaggtttataattttagttatttggg

SEQ ID NO: 570 - DNA, 6157 bp, Artificial Sequence; identical to SEQ ID NO: 568
  chemically treated genomic DNA (Homo sapiens)

SEQ ID NO: 571 - DNA, 6157 bp, Artificial Sequence; identical to SEQ ID NO: 569
  chemically treated genomic DNA (Homo sapiens)

SEQ ID NO: 572 - DNA, 6000 bp, Artificial Sequence
  chemically treated genomic DNA (Homo sapiens)
tttttgttttatatttatgatttatatggtaaaatttattattttttttatatatatttaaaaagatatatttttttttttgtttattataaataataaatttggtataaagaagtaatgatttttaaagattaaaatattattaaatgtaatttaaaaggataaagtaatatttagttttttggataattgttaagtttatttttatatagtgattttaaagatttaaaattataataaaaatttgatataagtaagttttaaaatttattaggaaaatggagagttttttatgattattatgtaatttaggatttatattagtatataggtggtaatatgtagagtagatataagtgaattttgttttgttagatttttggggaaggagtttggatttttaagtagggtatggaagagtgtgtatgtatatttgtagttgagtatatgtatgtaggtatgaggttatgtttattttataaatgtttttttaaaggagtgtgaggaaatgtttggtttataaagttagttatttttatatatattagtagaaatggatttaagtttagttttttggtatttttgttgaagtaatttgattttttagtttagttttattttatttgagtggaaaaatttgtggttgtttttttttttgtttggtaattaataaggatttatttaaagtagatatgttggattgttaggtaatgggagttgtaatgttttttattagttaagtgaatttaggtaatttatttttttattaataaggtgtgtgtgtgtgtgtttagtagataggaatttgttttgttatttaggttggagtgtagtggtagtggagtgtagtttattgtagtttttaatttttggattagagtaatttttttattttagttttttaaggagtttagattgtaagtgatatggtttggttttatgtttttatttaaattttattttgaattgtaatataatttttatgtgttaagggtgggattagtggaggtaattgaattatgggggtagttttttttatgttgtttttgtgataatgagtgagttttatgatatttgatggttttataagttattggtattttttttgtttgtatttatttttttttttgttgttttgtgaagagatgttttttgttatgtagaattgtgagttaattaaatttttttattttataaattatttagttttgggtagttttttatagtagtatgagaatagattaatataataaatatgagttaagaagtttggttaatttttaaattttttgtagagatagttttttgttatgtttttgaggttggttttaaatatttgattttaggtaatttttttattttagttttttaaagtgttgggattataggtgtgagtttttgtattttgttatagttggtttttaaggttggttgagttagtatatatgtagtatttggtatagaagaggtgaattaataagtttatgtttgggttggttaggtggtttatgtttgtaattttagtatttttggaggttaaggtgggtggattgtttgagttttggagtttaagattagtttgggtaatatggtgaaattttgtttttattaaaatataaaaaaaaattagtagggtatggtggtgtgtatttgtagttttaattatttgtgaggttgaggtaggggaattgtttgaatttaggaggtggaggttgtagtgagttgagattgtgttattgtattttagtttgggagatagagagagattttgtttttaaaaaaaaaaaataatgaataaataagtttatgtttataaatttggagttagttttatttatttataaaatttgttattaatttagggagtggtatggttattttttagttattgagtttaaattttagatttagggttgattttttttattttattttaagatttgtttttttttgtttttaatattttatttttttagtttagtttttgttgtttatagattggattatattaattttttgtgtaaaaattttatgatttgtttatttttaggtagatttttattttattttatttttatttattaataaagtaatttagttattaaattatttattgttttttaattgtgtttaatatttttgttttgttttagttatttgtttttggaaatagtttttttataaatttttgtgtttttaaattttatagtatttaaagttatgtataaaagtttttttttttataaagttgtttgagatttatttataattaagttttttttgatttgtgttttattgaattttgtatttttattagagtattggttttagttttttttgtaaagttttgtgatgtttttagagtttttggtgggggaaggtgggtggggagggggtagagtagtggggtattttgttttttaatattttatggattttggatagtgttttgtatatattatgtgtttgaaatagtttgttgaattgaaattatgtatattttagatggaattagaaagtaaaaagtaaattatattatgattttataagtgtgagtttagtatttttattaagtaatggttgtataatggattgtgttggaggtttaagttttgtttttgttttatgaaaataattttttatttatataaataatatttaaagtataattaattatatttttgtatatttattatagaattttttagtattggttagaaatttttttaagattatattattttggggtggggggtttgtaaaaattaaatattatttttaaattttaggaagatattaagtttttttatttttgaatatagaaatataattaagattttgaagttatgtatttatttatttgattttatgaatatttattgatttgttattttgtgttttaataagggtttggggatttaattaaaggagtagttatgtatagtatgttaggtgttaagattgttgaggttatatatatagagtgtgaatgttaatttagatagtttttgaggatggtatatagtaaatgaaattttttgtgaaaagaagaaaatgtgattgatggaaaggggtggaaatgggagaaagtgatggtaaatgggaaggtgtagtgttttttagaggaaaattatattttataagttttttttattgttagagtatgattggtaaggataattgtgttgagtagtgttatttttgagaataggtggtattgtttgtatttggaatatttaggatgtgttttttttttgggattattatttgtgggttagtatagatggtttgtttttgtttggtgtttaattgtatggtttgaggattttgtttttgtgtgttttatttttggtatttggaattttatggttatttattttgtgtgtaggatttggaagggttaggtgggggtgtggtggtgtagttttttttgagtgtgttgggttgtttttgtttggtttggggtttgttaggtgtgatttttttggtgtagttgagtttttttgtagattttgtgtaggaaagtgaaattatttggtaggagaaaaggtagtgttggtgtttggtttttttttgtttttattaattattgggtggttttgtgtttagttaattagatgtggttgttttgtgggtgttattgtttttttttgtgggttgttgttttgtttatgtgttggggtatttttgttggtttttggtgggggttgttggttgggtgagttgtagtttagttttgtgttgttatgttgggaattggtgttttgtttatatattttagagaatgattagaaggatgtgttgtgtttgtagaagtttaaatttggaggtttttgtagtagttttattgttgagaatttaggtagaggatagatttggtgatgttgttattttagaagttttttttagtaattgatttttgtgttgttaaatttagggaatgtttttttgttttttttattttatttgatagtttggaagtatggggtagagttgatgtttttgtttttgaaatatgttttttttttggttatgatgataatatattttttttgtttttttttgtttttggtattttttttatattgtttttatttttattattaaattattatatgttaaggttgttagggtttagatatttgttagtttttttatttgggttttttttaaatgttgtgttgtgatgattttatttatagttttagtttttttttagatggaggagttttaaatgtttattttgtttatattttttttttgggttttatatttataatttttatttgtttttttatttgtatgtgtagtgagttttataaattatgtttagaattaaatatttttttttttaaatttgttttttttttagaaatggtatatgatagatatttaggatttatagttgatattgtttttttttttattttgtaatatttgatttttaaattttaattgatttttttttttaaatattttttaagttttatttattttgttttattttttttgttgtttttttttgtagtagatttttgaatggttgttttattttagtttttatttattttttaatttattttttatataagagtttgagtgtttttttttttaattgaaaagtagattatgttatttgttaatttgaaaatttttttatggtttttttttgtttttataaaatttagttttttaatatatattataaagttttggttgtttgatttttttgtttaattttataatgtgttattttgttttgtttattttagtatttagttttttaaataaattatattttttaaatttagggattttttattttgagtttggaaaattttttgagttaatatttgttttatttaattttttgttggttaatttattttttagattttagtttaaaaattttagtttaaatgttatttttttaggtaggtattgttgaagttagataaattaaatttttttggattatatgtttataaaattaattagtttttttaagtagatgggatttgagttaagttttgaataattaggtattttggggtaggagaaggatttgaataattttttatggatatgtttatatgtgtgtgtatgagttttttttttttgtatatttatttgttttttttgttataaatgtatttttataaagtaagttagtagtgaaattagatttttttgttaagagatgttatggtattaaaagtgttttttttgtttttatttatttaagaattaagataatgttttattgttttttgaaaaaagttgtattaatttatttttaatgttgttaataaagatttgagattgggtaatttataaaataaagaggtttaatggatttatagttttatatggttggggaggttttataattatggtgggaggtaaggaggaataagttatattttttattgatggtggtaggtaaagagtttgtgtagggaaatttttatttttaaaatgattggatttttgagatttatttattattataaaaatagtgtaggaaagttttgtttttataatttaattattttttattagtttttttttatgataggtgggaattgtgggagttattatttaagatgagatttgggtggggatatagttaaattatattaaaagttgattttaggaagggtagattatatgttaaaaattttttttttggtattataaaatttgtatagatattagttttaatattgatgaaggaatggaataattttaatatttgtaaataggattatttggtattttaaattttaatttggattattaagatttgtggatgtttttttttttatttttttttattttagtatttatagtaatatttattataagtttttattatttgagaattggaatgttatgttaatttttaggtatattattttttttttgttttttttttttttattatatttgttaaatttaattttttaaaatattgtattgatatagttattttttgtt

SEQ ID NO: 573 - DNA, 6000 bp, Artificial Sequence
  chemically treated genomic DNA (Homo sapiens)
agtagggaatgattatattaatgtagtattttaaggaattgaatttggtaaatatagtgaaggagaaagagataagaaaaaggtagtatatttagagattagtatagtattttaatttttaagtgatgaaggtttatggtaggtattgttgtggatgttaaaataaaggggggtagggaaggaagtatttatagattttgatgatttaaattgggatttggagtgttaaataattttatttgtagatgttaggattattttatttttttattaatattgaagttaatatttgtgtaagttttatagtattagaaaaaaaatttttaatatgtaatttattttttttagagttaatttttgatatagtttggttgtgtttttatttaaattttattttgaatgataatttttataatttttatttgttatgggaggaaattggtgggaggtgattaaattatgggggtgagatttttttgtgttgtttttgtgatagtgaatgagttttgaggatttgattattttaaaaatgggagtttttttgtataagttttttgtttgttgttattaatgaaagatgtgatttgtttttttttgttttttgttatgattgtgaggtttttttagttatgtggaattgtaagtttattaaatttttttattttgtaaattgtttagttttaggtttttattagtagtgttaaaaatggattaatatagttttttttagagaatagtaaaatattgttttggtttttgggtgagtaagagtagaagggatatttttggtgttgtggtattttttggtagagaagtttaattttattgttaatttgttttgtgagggtgtatttgtgataagaagaataaatagatgtgtaaagaaaaaaaatttatatatatatatataggtatatttatgggaaattatttagattttttttttattttaaagtgtttaattatttaaggtttgatttaaattttgtttatttgaaggaattaattgattttatgagtatatagtttaaaaagatttagtttgtttggttttagtaatgtttatttggagaagtgatatttaagttgagatttttaaattaagatttaaaagatgagttagttagtgaagagttgggtgaagtagatgttggtttaaggggttttttaaatttagggtgagaagtttttgagtttggagagtgtggtttatttgaagaattaaatgttgaagtaagtaaagtagagtggtatattatggggttggataaagagattgggtaattagggttttatagtatgtattaagaaattgaattttataagagtaaagaaaagttatggaaggatttttaggttggtaaatgatatgatttgttttttaattaaaaaaaaaaatatttaaatttttgtatggagaatggattaaaaggtagataagggttgaagtgaggtagttatttgggaatttattgtagaaggaggtagtagaagagatggagtagagtaaatgagatttgggaaatatttaggaggaagaattaattaagatttgaggattaggtgttgtgaggtgagggagaaggtaatgttaattatgaattttaggtatttgttatgtgttatttttagaaaaagagtaggtttgaggagaaagatgtttggttttgaatatagtttgtagagtttattgtatatataagtggagaggtaagtgggagttgtaggtgtgaagtttagaggagaggtgtggatgggataagtatttaagatttttttatttagaaggaaattgaagttgtgggtgaggttattatagtatagtgtttaggagaagtttaggtaaagaagttgatgaatgtttggattttgataattttaatatataatggtttgatagtggaggtggaggtaatgtagaaagaatgttagaggtaggaaaaagtaagaaggatgtgttattattatgattaaggaagaaatgtgttttaagaataaaggtgttaattttgttttatgtttttgagttgttaagtaaagtgagaaaaatagaaaagtgttttttgggtttagtaatatggaggttagttgttaaagggagtttttagaatgatgatgttgttaaatttgttttttgtttggatttttggtgatgaaattattatagagatttttaagtttgggtttttgtaaatatagtatgtttttttgattgttttttaagatatgtaaatagaatgttagtttttagtgtggtaatatgggattgggttgtagtttatttagttggtggtttttgttggaagttggtggaaatattttagtgtgtgggtggagtagtggtttgtagagggaggtggtggtgtttatggaatagttgtgtttaattggttgagtgtggagttgtttggtgattggtgggggtggaagggggttgggtgttagtgttgtttttttttttgttgggtagttttgtttttttgtgtagagtttgtggaggggtttggttgtattggggggattgtgtttggtagattttagattgagtagaggtgatttagtgtgtttgggagaggttgtattgttgtgtttttgtttagtttttttggattttgtgtgtagagtgagtggttgtgaggttttgggtgttgggggtgggatgtgtagggatagagtttttgggttgtgtagttggatgttgggtgaggatgggttgtttgtgttgatttgtgaatagtgattttagaggaagaatgtgttttgagtattttaagtgtgagtagtgttatttgtttttggagatggtattgtttagtatgattgtttttgttagttgtgttttggtagtgaagaggatttgtgaaatataatttttttttagaaggtattgtatttttttatttattgttatttttttttgtttttatttttttttattagttatgtttttttttttttgtagaaagttttatttgttgtatgttatttttgagagttgtttaggttaatgtttgtattttgtgtatataattttgatagttttggtatttaatgtgttgtgtgtagttgtttttttggttgaatttttaggtttttgttggggtataaggtggtaggttagtaaatgtttatggaattagatgaatgagtatatgattttggaattttaattatgtttttatgtttaaagatggaagggtttaatgtttttttagagtttaaaagtgatgtttagtttttgtagattttttattttaaaataatatagttttaaaaaaatttttggttggtattgaagagttttgtggtaggtatgtagaggtgtggttgattgtgttttgaatgttgtttgtatagataaggagttatttttatagaatagaaataggatttgagtttttagtatagtttattgtgtaattattgtttaatgaggatgttggatttatatttgtgagattataatatggtttgttttttattttttaattttgtttgaaatatatataattttaatttaataaattgttttgagtatatagtatatgtagggtattgtttaaggtttataagatgttaaaaagtaaaatattttattattttattttttttttatttatttttttttgttggggattttggaggtattatagagttttataaggaaaattggaattgatgttttaatagaggtatagaatttagtgagatgtaagttaaagaaagtttaattgtgagtaagttttagataattttatgaaagaaggggtttttgtatatagttttgaatgttataggatttagagatgtaaaaatttgtggagaggttgtttttaagggtgagtagttggagtaaagtagaaatgttgggtatagttgaaaaatagtaaatgatttggtgattgggttgttttgttgatggatgaagatggggtggggtggaaatttgtttaggaatggatagattataggatttttgtataggagattgatgtggtttaatttgtgggtagtagaggttggattgggaaggtagaatgttggagataggaaggagtaggttttgggatggagtggaaggaattaattttaaatttgagatttgagtttagtgattgggagatggttatgttattttttgagttggtaataggttttgtgagtagatgagattgattttagatttgtgaatatgagtttatttatttattgttttttttttttagagatagagtttttttttgttttttaggttggagtatagtggtgtgattttagtttattgtaatttttgttttttgggtttaagtaatttttttgttttagttttatgagtagttgggattataggtgtatattattatgttttgttaatttttttttgtattttagtagagataaggttttattatgttgtttaggttggttttgaattttggagtttaggtaatttgtttattttggtttttgaaagtgttgggattataggtgtgagttatttggttagtttaaatatgagtttattaatttattttttttgtgttaggtgttatatatgtattagtttaattagttttaagaattaattgtggtagggtgtggaagtttatgtttgtaattttagtattttgggaggttgaggtggaaggattgtttgaggttaggtgtttgagattagttttagaaatataatgagaggttgtttttatagaaaatttaaaaattagttaggttttttggtttgtgtttattgtattagtttgtttttatgttgttataaagaattgtttgagattaggtaatttataaagtgaagaggtttaattgatttatagttttgtatggtagaaggtatttttttatggggtagtaggagagagaatagatgtaagtaggggaaatgttagtggtttataaaattattagatgttatgaggtttatttattattatgagaatagtatgggggagattgtttttatgatttagttatttttattggttttgtttttaatatatgggaattatattataatttgaggtaagatttgggtgggggtatagagttaaattatattatttgtagtttgagttttttgggaggttgaggtgggaggattgttttagtttaggggttggaggttgtagtgaattgtgttttattgttattgtgttttaatttggatgatagagtaagtttttgtttattaaatatatatatatatattttgttgataggggagtaagttatttgggtttgtttggttaataagaggtgttgtagtttttattgtttgatggtttagtatatttgttttaggtagatttttattagttattaagtagggagggagatagttatagatttttttatttaggtaaaataaaattgaattgaaaaattaaattgttttagtaggagtgttaaggggttgggtttgggtttgtttttattggtatatatgaggataattagttttataggttagatatttttttatatttttttggaaggatatttgtggagtaggtgtgattttatgtttgtatatatgtgtttggttataagtatgtatatatatttttttatgttttatttgaaaatttagattttttttttagaggtttggtaggataagatttatttgtgtttgttttgtatattgttatttgtgtgttgatataaattttaagttatatgatggttatgggagattttttgtttttttaatgaattttaggatttgtttatattaagtttttgttgtgattttgaatttttaggattattatgtaaaaatggatttaatagttatttaaaaagttaagtgttattttatttttttaaattatatttaatgatgttttaatttttaaaaattattatttttttatgttagatttattgtttgtagtaggtaaagaagaaaatatatttttttaaatgtgtataagaaaaataatgaattttattatatgaattataaatataaaatagaag

SEQ ID NO: 574 - DNA, 6113 bp, Artificial Sequence
  chemically treated genomic DNA (Homo sapiens)
ttattttatttgttttgtagttttatttataagagttttttagtttttaaatatgatttatatagtgtaattattataatattaagggtatttatgatagttgttatttattgagtatttattttatgttaggatttggtattgtttatgtattttatttatttgatttgtttaaaagtatgtagttatttttattttttatttttagatgaggaatttgaattttttaaatattaagtaatttagtatgtgttggaatttgtatatgaaaatttatattggtttgaatttaaagtttatttaaagtattaagttatgttgtttttatgatttaggttatgtgtttagattatgtaaatgtttattttataaatttttaattggaaaaagattaagtaatttttaatataaatagtttatttttttaaaagtgaaatatttttgatgattgatttgtataatgtgtttttattttaataagaagagtaagaaaatggaaagtattgtatatgttaaatagtttgatttaattttattgtatatatatattaaaatattatgttatatattataaatatgaagttatttgttaattaaaaaaaaaaagaagaaaagagaagaataggtttagaatagaaatgaagtttatgggagtataaaggtgtaatagtgtagattaattgtgtgagttttaaataaagtttttaaaagaattttttgaaatttttgggtaagttttttaatttttttgaattataattgttttatttattagaatagataatagtgtaggtttttattttattttggaatgggtatgatatttttttagttttattttttatatttggttatatttttatattaggtttttattttatgtaaaagatttgttgggaaggtttttgaggggtttttttatttttttatagagttttttattaaatagaggtaaaattaaattatgttttttttttttatggtattttgaattttttttattatgtgatttattagaattatttatttatgtatttggtttatattattgagtttttggtgaatttatattgtttttttttataaaatataaagtaggtggtttatataaaatatatttttaataaatgtggaatagaaggtatgatttatgattattttattttattaaatgtatgatattatttggattatgtattgtgatatattattaaaaataagtgatttttaaaaaaaaatttttagaattaggatagatgtattgtgatttatgttattattattattattattattattattattattattattattttgagttggagttttgttttattatttatgatggagtatagtggtatgattttggtttattgtaatgtttgttttttgggtttaagggagttttttgttttagtttatttgagtagttgggattataggtgtgtgttattatgtttagttaattttttttgtatttttagtaaagatggggttttgttattttggttaggttgtttttgaatttttgattttaggtgatttatttgttttggttttttaaagtgttgggattataggtatgagttattgtgtttggtttgatttatatttttaaaagggttgtgttattgaaataattaggaaagaattatatttttaggtgaaggaaaatgaataatgtttttttttttttttaagttaagaaaaatttagttttttagttgatagtatatttaagttagttaaattaagtagttttttgtttttgttttattttatttatttgttatgattaaatattttattaggttgtaagtgggtttttaatgttgatttttttattttgggatttgagaggtatagtttagagtattattttttatttaaatgttagtatgttattagtagaaattattttttaggttaaatattgttttttttagaaattttttttttaaggattagtttaaatttaaatttattagagaggaaaatagtagattttagagttagatgaagaatttatatttatttggttttgaatattattggttgtgagatggtgtaggtaaaattttaagtgtataatttggtaataataaattattaataaatattaatgttgatgaggtttttgggttatataaagaaatagggagtgaggggatttgaaattttggttattttatagaaatgggtgggaaggggtttttgattgagatagaagtttattttatatgaagtaattttttattgagtttttttgttttttatttttgttggaaatattaggtaaagttatttttggttttaaagtatttttatatttaaatatggaatttttttatttaatttttgtttgttgtagatgttaagtatataaagaggttgttagagtttgaaatatttggatttttgttaggtattagttttggaattttagttttgtttgtttttaaaaatggtttgtagttagaggtttaagttttatttttttttagtgaatttttatgtatgagggaggtggggtgtgtgttttttgtgtgtggtttttgggtagtattttttggggtgttgtttgtttttatttatggttgggttttgatgttatgggttgtggtttttttttggttgagtttataaagtggtaggtgtgtgttgttttatagatgtttgtatatttgggtgttagtgttttagaggttttgggatagtttgaggtgttgtgtttgttgttttgagttttttaagtttttgagagtggtgtatatttttggtttttatttgtttttttaatatttgtttgttttggtggtagtttgtgttttagagattgagttgttttagagattgagatgttgttgttgtgaaggattaatgagagttttgttgttattgttggtgttggtggtgttgttgtttttgatatttggtttaggtgaggatttattggtgttgaattgttgggttttttttttatggtaggttttgttttttgagtttggtttttgtttttttaaaaattgttttttagtttttttgattttgtgttgtaggaggtgattattgtagttttttttttaggaggaaaagagaagggtagatgttttaaatgtttaggataaggtgttttagagaattgttgtattttttttttagtttagttgagaagatgggagagattatttgaatttaattttttgttttatagattaaaagattaaaaagattaagatttagagaggtgaagtgatttttgtagatattggatttagtagtgtttgttgttttttgtttaattttttatttttgtttagtgattttttttttatttttttagagggatttagagtattttggtgagaggttaaaagtattattttgatgttgttttattgagatttaagaaaaagtaagataaagtagtggtttaattttgggttttaaattttatttagtatttagtttattgtttatgtagtaataataataatgataatgaaaaatgataataataattgatataattaattattgtttatattattttaaaagattattttttaaaaatattttttaaaaatatgaatatattttttaaaaatatgaatatattttttaaaaatattttttaaaaatatgaatatatttgaagaaaatttgatatttgtatttaaaatttattgaaataggttaggatggtattttagtaaaaaaagaaatgtatttggaatgtgaagtgatgggaatttttagatattatttattaagtaattgtattagattaatttgttaatttggtgggatttttttgatgtggaaattaatgtggattatttgtggaaaagaaaaattttagaaaagtatttttgtaattgggatagttgaatttgtttgttggtaaaaatgtaaagttttttttatagaaatgatttaattataaataatagtatatgtgtaataattgttttgatgttaaaagataaatttttttatttaatatagttgatttgaaaggtattttattttatttttttttttttttttttatttttttttttgtaggttattatgttgttggattggattttaatgatatttattttgggaagtgtgaattattttttggggattatagtgttgatggatttgaggttattttaagaagtgagatgtttttagggagtgagattttttttgtgagtgaaatgttttttagtagtgaattgtttttgggagttgattatgattatttagaagagtatgataatgaattataaatatttggttatattgttgatgatttagttagaggtgagtaggggataaagtaaaaatatggtttgtgagatgtgggtttatatgagtaaagttgttttagaagtaaagttgttttttagattttttagtggttttattgtatatttgttggatagtttttaggtaaattgtgataaaaagaattataatgtgggtatattttatatggttagagtgattataaatggtgtatgttttatttttaaatttaatttttataatgattttaagtaggaattgttatttttattttatagatgtgataattgaagttgaaaaaggttttgttttaggttttataggtgataagtagatgagttagaattagagttttagtttgtttgattttatgtagaagagatattaagtttttttttattatgttatatgatttttattttgagagataaatttagatattaattatttttatttattttgtattttagtttttgtatttttttttttaatattatttttttttagataattgtattttaatataaataaggggataaggaagtaatgggataggaggtattagattttagtgtttaagtattaggtgatgagaagttgatggaataataataataatgttatttggaaatattaaagaagggtgaatatatttagattttgtattgttaaaattattttttaattttaaattttatttgttagttatataatttatggttttttttatttttttgttattttatattttaaaaaggttttttgtttggagtgaaagtattaaagtaagagagaaatattgtatattttggagtttgaaggaagaagaagttaatagtaaataagatttaaatattttaagagtatttattatagaggtagggtaagatggttttagagttgttgaaggttttttttgttttgatttgagtttttttggttttttttttttttgtttggtttttagaattggtgaagggatattaagtggtattagagggatagtgatttgggtgagtgggaagtgagaaaatttttagtgaatattttatttaattttttttttttttaaagtgtgtttttttgtgaggtgggtaaggggtttatttgtgtttatttttgaaggtatgagattagatttattaaggtgtttagaaattgtttttttaaatatgttttaagttgttaatattttagaaggttaagtaaatgattagtagtataaatgatgattagtgtttaaaattgtaatgtattgtgaaatagagtgaaaatgttggttgaatatttttgaaaggttaagttaaatgtttatgatgttagtgtttattgtaatattttagtatagtgatttttttatttgtttttgtttatagtttgtaatttatttgataaagtgaagttataatgtttatttaaaatattttttttaaaggatttttttgttttgtgtttttttattgttagagaaaagttttaatataaaaattgtataattattttttaaatatttgttattaattttatttttgttaaatgttattataataaattgttaaaatatttagtatttattttttatttttttaattatagatattttatttttgatattttagttgatttttattatgtttttaatgttttgtattgaatgggtgttgtatgattattatgattaatggtattttttttttattgaaatttgtttgttaaatatttatttggataaatttttttagatattagtgtaataaaatgtatagtattaatatgtaaagttatttgttatttttagtatgtgggta

SEQ ID NO: 575 - DNA, 6113 bp, Artificial Sequence
  chemically treated genomic DNA (Homo sapiens)
tatttatatattaaagatagtaaatggttttgtatgttagtgttgtgtattttgttatattaatgtttgaagaggtttatttaagtgaatatttagtaaatagattttagtaaagagaaaatattattagttataatggttatgtagtatttatttaatataaaatattagaaatatagtgaaggttaattagggtattaaagatagaatatttgtgattaaggaaatggaaaataaatattgagtattttagtagtttattataataatatttaataaaagtaaaattagtagtaaatgtttaagaggtggttatgtgatttttatattgaaatttttttttgatgataaaaaagtataagatagaaaagttttttaagagaaatattttgaatgaatgttgtaattttattttgttagatagattataaattatagatagaggtaaataaaaaagttattatgttgaagtgttgtgataagtattaatattatggatatttaatttagttttttgaaggtgtttagttaatatttttattttattttataatgtattgtaattttgagtattagttattatttgtattattaattatttatttggttttttgaagtgttaataatttgaaatatgtttaagagaatagtttttagatattttgatgggtttaattttatgtttttaaaaataagtataaatgaattttttatttattttatagaaaagtatattttgagaaggaagggaattaagtggagtgtttgttaaaggtttttttattttttatttatttaagttattgtttttttggtattatttgatgtttttttattagttttgagaattagataagagggggagaagttagggaaatttaagttaggatagaaaaggtttttaatagttttgaaattattttgttttgtttttgtagtggatgtttttaggatatttagattttatttattgttaattttttttttttttagattttaaagtatgtaatattttttttttattttggtatttttattttaagtaaagggtttttttaaaatatgagataataggaaagtgaaagaaattatgggttatataattaataaatgggatttggggttaaagagtgattttagtaatataaaatttaagtatatttatttttttttaatatttttagatggtattattattattattttattagttttttattatttagtatttaaatgttaaagtttaatgttttttgttttattatttttttgtttttttatttgtgttaaaatgtagttatttggggaagggtggtgttggggaaggggatataaaagttaagatataaagtagataggaatggttaatgtttaaatttgttttttagaatgggggttatgtagtatagtgggaaagagtttagtgttttttttgtatagaattaaatagattggagttttaattttagtttatttgtttgttatttgtagaatttagagtaaaattttttttggttttagttattatatttgtaaaatgaggataataatttttatttaaagttattgtgaagattaggtttaaaaatgagatatatattatttatgattattttggttatataggatgtgtttatattatggttttttttgttatagtttatttaggggttatttaatagatatataataaagttattagaaaatttggggagtagttttatttttgaagtagttttgtttatataaatttatattttataggttatatttttgttttattttttatttatttttgattgaattattgataatatagttaggtatttgtggtttgttattatatttttttgagtagttatagttggtttttgaggatggtttattattagaaggtattttatttataggggaaattttattttttgaagatattttattttttgaggtaattttaaatttattagtattgtggtttttagaaaatggtttatgttttttagagtaggtgttattgaggtttaatttagtagtataatggtttgtaggggagggaataaaggaagaaaagaaaaggtaaagtagggtgttttttgagttagttgtgttaggtagaaaagtttattttttgatattaaagtagttattgtatatgtgttattgtttgtgattgagttatttttatgaaagaaattttatatttttgttagtaagtaaatttagttgttttaattatagaagtgtttttttgaagttttttttttttatagataatttatattaatttttatattaaaaaaattttgttaaattggtaaattaatttaatataattatttgatgggtaatgtttaaaaatttttattattttatattttaaatgtatttttttttttgttagaatgttattttggtttattttggtaggttttagatataaatattagattttttttagatgtgtttatatttttaaaagatatttttaaaagatgtgtttatatttttaaaagatgtgtttatatttttaaaagatatttttaaaagataattttttaaaataatataaatagtggttaattatattgattattattgttattttttattattattattattattattatatagataataaattgagtattaagtaagatttggggtttagagttaagttattgttttattttgtttttttttaggttttaataaaatagtattagagtggtgtttttaattttttgttgggatattttaagtttttttaggaaggtaaagaagaaattattagatagagatggagaattaggtaggaggtagtaaatattgttgggtttaatatttgtggaaattattttatttttttagattttggtttttttaattttttaatttgtgaaatgaagggttaggtttaaatgattttttttgtttttttagttgaattaaagaaaaagtatagtgattttttgggatattttgttttggatgtttgagatatttgttttttttttttttttttagggagggagttatagtgattattttttgtggtgtagggttgggggaattaaagggtgatttttagagaagtaagagttaaatttaagaggtaaaatttgttatgggaggagagtttagtagtttagtgttggtgaatttttatttgagttgagtattaagagtgatagtattattggtgttggtggtagtagtggggtttttattggttttttgtagtggtggtgttttggtttttggggtaatttggtttttgggatatgagttgttgttaaaatgagtgggtgttggaagagtgagtggagattgggagtgtgtgttgtttttgaaggtttggggagtttggggtggtgggtgtggtgttttgggttgttttgggatttttggggtgttggtatttaggtgtgtgaatgtttgtagggtggtgtgtatttgttgttttataggtttagttgggagggggttgtagtttatgatgttaaggtttggttgtgggtggaggtaggtggtgttttagaaggtgttatttgaaaattatgtgtggaggatatatgttttgttttttttgtgtgtaaggatttgttgagaggaagtggaatttaaatttttagttgtaagttgtttttgagggtgagtaggattggagttttggagttagtatttgatagaagtttagatgttttaaattttgataatttttttgtatatttaatatttataatagatagggattaaatagaagagttttgtatttagatgtaaaagtattttaagattaagagtgattttgtttgatgtttttaataaggataaaggatgagagaatttaatgaggaattgttttatgtaggatgggtttttattttaattaagagtttttttttatttatttttgtgaagtggttagaattttaaatttttttattttttatttttttatgtggtttaggggttttattaatattaatatttattgatgatttattattgttaaattatgtatttaaaattttatttatattattttatagttgataatgtttaaagttaggtggatatgaattttttatttgattttgaaatttgttgtttttttttttgatgaatttaggtttaaattgatttttgaaaagagggtttttgggaagaataatatttagtttaaaggataatttttattggtggtatattggtatttaggtgaagagtagtgttttagattgtgttttttaaattttaagataaaaaggttagtgttgagggtttatttataatttagtaggatatttaattatgataagtagataaaatgaagtggagataggaagttatttaatttgattaatttggatgtattgttaattaaagaattggattttttttgatttgaggaagagaaaaagtattgtttatttttttttatttggagatatgatttttttttgattgttttagtaatatagtttttttaagaatgtaggttaggttaggtgtagtggtttatgtttgtaattttagtattttgggaagttgaggtgggtggattatttgaggttaggagtttgagagtagtttggttaagatggtaaaattttatttttattaaaaatataaaggaaattagttgggtgtgatggtgtgtgtttgtagttttagttatttgggtgggttgaggtaggagatttttttgaatttgggaggtagatgttgtagtgagttaaggttatgttattgtattttattatgggtgatagagtaagattttgatttaaaataataataataataataataataataataataataataataatgtgagttatagtgtatttgttttaattttggaaatttttttttaaaaattatttatttttaatggtatattatagtgtgtagtttaaataatattatgtatttagtagaatgaaataattatgaattatgttttttattttatatttgttgagagtgtattttgtgtgagttatttgttttatattttatgaaggggagtagtataggtttattaggagtttagtggtgtgggttagatatatagataagtaattttaatagattatatgatgagaagggtttagagtgttatggaaaaaaaggatatggtttaattttgtttttgtttaatggaaagttttgtggaaagatgaagaggttttttaaaggtttttttagtaaattttttatatggaataaagatttgatgtgagggtatgattaagtatgggaaataaggttagaaaagtgttatgtttattttaaagtgaagtaggggtttgtattgttatttgttttggtggatgaggtaattgtgatttagagagattgagagatttgtttaaagattttaaaagatttttttggagattttgtttggagtttatgtagttggtttatattgttgtatttttatgtttttataggttttatttttgttttaggtttgtttttttttttttttttttttttttttgattgataagtaattttatatttgtagtatatgatatgatgttttgatatatgtatataatgaggttaaattaagttatttaatatatgtaatattttttatttttttattttttttattgagatgaaaatatattgtgtagattagttattagaaatgttttatttttgggaaagtggattgtttatattggaaattgtttagtttttttttagttggaaatttatagggtgaatatttatatgatttaggtatataatttagattatggggatagtatagtttagtgttttggatgagttttagatttaaattaatgtgggtttttatatataaattttagtatatattaagttatttaatatttgaaagatttagattttttatttgaaaataaaaaataaagataattatatgtttttaagtagattaaatggataagatatatgaataatattagattttagtatagagtgagtgtttaataaatggtaattattatgaatatttttgatattatgatagttatattatgtaaattatatttaagaattgaaggatttttataaatggagttatagagtaagtgaagtaa

SEQ ID NO: 576 - DNA, 6113 bp, Artificial Sequence; identical to SEQ ID NO: 574
  chemically treated genomic DNA (Homo sapiens)

SEQ ID NO: 577 - DNA, 6113 bp, Artificial Sequence; identical to SEQ ID NO: 575
  chemically treated genomic DNA (Homo sapiens)

SEQ ID NO: 578 - DNA, 6190 bp, Artificial Sequence
  chemically treated genomic DNA (Homo sapiens)
ttgtttttgtggtgtgggttttttgggggtagggttaaggtattaagatggatgaggatgagggttttggttgttaagggtgaggggttgagggttggagaggtttttttagtggttttttttttgtagagtgtattagttagatggtagagattttaaaatatatggtggatattgaggagaagggagttaagttgaagtttattattgtggatatgttgggatttggggatgttgttaataatattgagtggtgagtgaggtttgttgagaaaggttttgtttaggtggttatagtatttgaggtttggttttattttttttttgtttatagttggaagtttattattgattatgtggattagtagtttgagtagtatttttgtgatgagagtggttttaattgaaagaatatttaagataattgagtgtattgttgtttatattttatttttttttttgggtatgggtgtgtggttgttttggggttaggtttgggagtgtagtttttataatatggttttttggttgtgtttatgtttatttttggttgtttttggtaggttgtggttagtggatgtgggttttatgaaggtattgtatgagaaggttaatattgtgttttttattgttaaagttgattgttttgtttttagtgagatttggaagttgaaggagtgggtgagtttgttgttgtataggggtttggttagggttttggggttgagagtattagggggatttgtttggttttaaatttgatggtttttgttttattatagatttgggaggagattgataagtttgggatttatgtatattagttttttgagtgtgatttggatgaggatgaggattttaagtagtaggattgggaattgaaggtgaatatgtagattggtggggtaggggggatggagttggtgaggggtagaattagagggttttgttttttttatattgagtttgttggaggagggttaggttagtttagttgggtgtaagagttatttgttttaggagtagaggatttgtattttttttatttagggttagaaggtaaaggttattatgtttttgtttggttggggtgggttatgtgggttttgtgtggtgtttggtaggtatggagtatttgtttagatttagaggtgtagtagtgggttaggtttttaattttaattttttttttatgggttattagaggaaggggttgttttagtggtatattttggtttttagatttttgagttttagggttggtggttttgggtgttttggtagttagagtgatgatggagattatgttaggggtaggtggttattagggtaggggtattagtatggggagatataggtttagttttggggagggaaggggtagttggagggggtggtttttgatgagggaggagatgaggagggagtatgtttggttgggtatagtttggaaaggttttggaatgtgagttatatgggttttggttttagttaggggtagagaggttagaaaggggtaatgttaggatttttttgaggagagatagttgatggtgatgttggaggggtgttttgggagttatatgtttgttttttattagtaattgtgtaattatgtttattgggtgtgagttttttttttttttttttttaggagagtgtgttttttgttgttataggtagtaatatggtggtggaggttaaggggtagtgggtttggggttgattgtatttttgggggattgtggagggtgagtagagttttggggtattaggtttggtgggggaaggttgttttgggttggtgttagtttattatttatttttattttgtagtggagaattaggtgtattgtgattttgtgaagttgtgtaatatgtttatttgtatgtatatgtatgattttaaggatgtgatgtgtgatgtgtattatgagaattattgtgtgtattgtatttagtagatgattaggtgtgtgttttagttgtgagttagattttgtttttttggttttgtttatgtttttataattgagggttggttttgttagtttatttagatttgaattttgtattattttttaagtttttttttttttttagagtttggtttttttagaattaagtttagggttgtgagggttttggagggtagggttttagtagtggtggggatgggttaggtattgttagtttatgttgagttttttggtggtgttgttttgtttatttttttttttgttttgtgtagtaaattgatttaggatagttgtatggagagttttattttgattttgttgttgtttattttggatgttgagattgagaagtttattaggatgaaggatgaggaagtatgtggggtggtgggggtggtggaggtgggtgttagggatgtttttttgtggtgttgtttatttgttgggttgtttttgtttgtagttgaggtgtatgtaggagatgttgtagaggatgaagtagtagatgtaggattagtgatgtttgttgtggatatattgtttgtttttgggatgtttttgtatttttggatattagattggattgtttttgatttggagatgtggggttatagtttttagttgattttaatttatttttagtattatttttttttaggttattgtgtttgtttttgaggggtttggattgtagtttttgtttagttggttttttttgattttgggggattaggagtgaagttgggtgggattttagagatttgttttttttgttttttttttgtttttggatggttatagtatttaaattgtaggttttgttttggtaggtaggtaaagttaggtagaagaggatttttaggattttgggtttgttttttgttttagtgttgtagaatggatttgggagtttttttttgtttgtttttgtgggttatttagtgagtgttgagattttattttttgttgaggtgggttgagtttttttttatttttagatgtttagtgggtagggttgggttgaattaaatgggagttttttagatataaggaggttagaggttgtaaggagtggggttgtgattgtttatattttttttttatagtttggtttgatttggagggtttttggggtattgggtggtgagttattttttggtaatttttggtgttgttttttgtttttgtttgaggttttttttttttagtattgttgtggtgtgttgggattttgagtttaggttttttgatgtttttatttgtatgatttttttttgttatatgatgttttgtttttttttgttgtgaatgttgtgttttgttttggtgataggagaataatgttggtgaatgttgtagtgggtgtttgagtgttttgtgtgtttttgagagtgggtgggagtggaagtttgagtggtttgtggtttttggtgatagtgtgttatttgttgttgtagtgtgtgtttgtgtggtttttgggttatttttggttaggttgtagtattgtggttggtgtgggtgtggtaggggtggggtggttttattgtttggtttttttgtttatgttttttgttgtagagtaagttgggttgttgtttttttgttatgggttttggtgagtttggagtttggttgggtttttggttgttttttaggttgatttgggttgagaggagttttggttgtttggttgtagttgggagagatttgggttagatttagaggggatttttagttggtgtgtggggtggttagggtggagaggttggtgggttattgggatgttgggtattaggggttggatggagttgggttggtagtttgggtatttagagatgttgtttaggtgtttgttgattgtttggtttattgtggtgttttttttgtagggttgtgtggggtgttgagtttattgtttttgttgttggttttgttgagttgtttggttgtaggttgtttggtgttttgtagttgtgtggggatgtttgtggattgtgggtgttgtgggttgatttgggttttgttgttgattgttttttttgttgatataattgagttggtgttgattggtaataatttgatggtgttgttgttggggttgttggatgtgttgtttgtgttgtgtattgtatatttgggtgttaatttttggtgttgtgattgttgttttgtgttgttgtgtgtttggttggttggttgttttgagtgtgtgttttattgtgatttgtgttgtgtggtgtttttagtgttgtgtggttgtttgttgttttatttggttgaggatgagttgtgtgttgtttgtgtttttggtttgttttgttggggggtgttggtggtgtagtttgtgttgttgggttttgggttgttgtatgtgttgttgttggtgttgttgttgtgttgtttgtggaggttgtgggtttgggtttgtgtttgtgttgtagtttggttgttgttgattgatttgttggtggttgagtgagttggaattgatgagttttgaggagagaattggtgtgttttgaggagagaattggtgttgggtaatatgggtttgtaaatttgataggattttgtttgaggggtttttgtgttaatttggattggtttttgttttttttgttgtttaattttttagatttattttatttgtaggtttagattatgtgggatagaatttttgtttattttattttgagggaggtgaatttgtatttttaggtttgggaggattatggggtataatgtggtttagattttgttgtgttttttttttaaattttggtgttgaataaatttttttgatttggttttttttgtatgattgatttggaaattttttttgttaaatttaggaaaaggttttaggaggtggtttaaggggatataaatatatttttatatgtttattttaattttaggggtagataggagttagtgggtgatttttttttttttagatatatttttaaaaggttatatgggaaggtatgagagagatgttaagtgataatgtgggggttagtgaggatgttgtggggatattgaggattttgtgggggtagtgaggatgttgtggggatgttgtggggatagtaaggatattgggggtagtgaggatgttgtggatattgtggatgttgtggggataatgatgttgtggatagtgaggatgttgtgggggtggtgaggatattgtggagtgaggatattgggggtagtgaggatgttgtggatagtgagggtgttgtgggggtggtgaggatgttgtaggggtggtgaggatgttgtgggggtggtgaaggtgttgtggggatggtgaggatgttatttggggtggtgaggatgttgtggatggtgagaatgttgtggggatattgaggatgttgtgaggatgttgtgggggtagtgaggatgttgtggattgtgaggatgttgtggggatggtgaagattttgtgggggtggtgaggattttgtggatggtgaggatgttgttggggtagtgaggatgttgtggattgtgaggattttgtgggggtggtgaggattttgtggatgtggtgaggatgttgtgggggtggtgaggatgttgtggatagtgaggaggttgtggagataatggggatgttgtagataggatgttgtggaggtggtgagggtgttgtgggggtggtgaggatgttgtggatattgatgatgttggaggtaataatgaggatattggggataatgagtatattgtgggggtggtgagaatgttgtggatattgaggatgttgtgggggtggtgagggtgttgtggatgtggtgaggatgttgtgggggtggtgaggatgttgtggggattgtgaggatgttgttggggtggtgaggatgttgtggatgtggtgaggatgttgtggggatggtgaggatgttgtggggattgtgaggatgttgttggggttgtgaggatgttgtggatgtggtgagggagttgttagggtggtgaggatgttgtggatgtggtgaggatgttgtggatgtggtgagggagttgttggggtggtgaggatgttgtggatgtggtgagggtgttgtggggatggtgaggatgttgtggatgttgttggggtagtgaggatgttgtggatgttgaggatgttgtgggggtgatgaggatgttgttggggtggtgaggatgttgttggggtggtgaggatgttgtggatg

SEQ ID NO: 579 - DNA, 6190 bp, Artificial Sequence
  chemically treated genomic DNA (Homo sapiens)
tgtttatagtgtttttattgttttgatagtgtttttattgttttgatagtgtttttattgtttttatagtgtttttaatgtttgtagtgtttttattgttttgatagtgtttatagtgtttttattgtttttatagtgtttttattgtgtttatagtgtttttattgttttgatagtttttttgttgtgtttatagtgtttttattgtgtttatagtgtttttattgttttgatagtttttttgttgtgtttatagtgtttttatggttttgatagtgtttttatggtttttatagtgtttttattgtttttatagtgtttttattgtgtttatagtgtttttattgttttgatagtgtttttatggtttttatagtgtttttattgtttttatagtgtttttattgtgtttatagtgtttttattgtttttatagtgtttttagtgtttatagtgtttttattgtttttatagtgtatttattgtttttaatgtttttattgttatttttagtgttgttagtgtttatagtgtttttattgtttttatagtgtttttattgtttttatagtgttttgtttatagtgtttttattgtttttatagtttttttattgtttatagtgtttttattgtttttatagtgtttttattgtgtttatagagtttttattgtttttatagagtttttatggtttatagtgtttttattgttttaatagtgtttttattgtttatagagtttttattgtttttatagagtttttgttatttttatagtgtttttatggtttatagtgtttttattgtttttatagtgtttttatagtatttttagtgtttttatagtgtttttattgtttatagtgtttttattgttttggatagtgtttttattatttttatagtgtttttattgtttttatagtgtttttattgtttttatagtgtttttattgtttttatagtgtttttattgtttatagtgtttttattgtttttagtgtttttattttatagtgtttttattgtttttatagtgtttttattgtttatagtgttattgtttttatagtgtttgtagtgtttatagtgtttttattgtttttagtgtttttattgtttttatagtatttttatagtatttttattgtttttatagggtttttagtgtttttataatgtttttattggtttttatgttattatttagtattttttttatgtttttttatgtggttttttgggagtgtgtttggaaggggagaggttatttattgatttttgtttgtttttgaggttagggtgggtatgtgaggatgtgtttgtgtttttttgaattgttttttggggtttttttttgagtttggtgaggggaatttttaggttagttgtgtagagaagattagattagaagggtttatttagtattagagtttggaagggagatgtagtagggtttggattgtattgtgttttatggtttttttaagtttggaagtgtgggtttgttttttttggggtagggtgggtaggagttttgttttatgtggtttgggtttgtaggtggggtgggtttgagagattgggtagtggaggaggtggggattggtttaggttggtgtgagggttttttgggtagggttttgttgagtttgtaggtttgtgttgtttagtgttggttttttttttaggatgtattggttttttttttaggatttgttggttttggtttgtttggttattagtgggttggttagtgatagttgggttgtggtgtgagtgtgggtttgggtttgtagtttttgtaggtggtatagtagtagtattagtagtaatgtgtgtagtagtttaaggtttagtagtgtaagttgtgttgttagtgttttttagtagagtgggttgggagtgtaagtggtgtgtagtttgtttttggttagatagggtagtaggtggttgtgtagtgttgggggtgttatgtaatgtaggttgtggtagggtgtatgtttggggtggttggttagttaggtgtgtagtggtataaggtggtagttgtagtgttaggggttggtgtttaggtgtgtggtgtgtagtgtgggtagtgtgtttagtagttttggtggtagtgttgttaggttgttgttggttagtattagtttggttgtgttgatagggaaggtggttggtagtgaggtttaagttagtttgtggtgtttgtagtttatgagtgtttttgtgtagttatagggtgttgggtaatttgtggttgggtggtttggtggggttagtagtaggagtagtaagtttagtgttttgtgtggttttgtaagggaagtgttgtagtaagttgagtggttggtgggtatttgggtgatatttttgagtatttagattgttggtttggttttatttagtttttgatgtttggtgttttggtagtttgttagtttttttattttgattattttgtatgttggttggaagttttttttaagtttgatttaagttttttttagttgtagttaaatgattagagttttttttaatttgggttggtttagggagtagttgggggtttgattggattttagatttattggagtttatggtgagaagatggtagtttggtttattttgtagtgggaggtgtaggtgggagagttgagtgataaggttgttttgtttttgttatgtttgtattgattatagtgttgtggtttggttagaaatagtttagaggttgtgtggatgtgtgttgtagtggtagatagtatattattgttggaggttgtaggttgtttaggtttttgtttttatttgtttttaggggtatatggagtatttggatatttgttgtgatgtttattaatattgtttttttgttattaggataggatgtggtatttataatggaagaaaatggagtattgtgtggtgggaagggattatgtgggtgggaatattgggaggtttaggtttaggattttggtatattatagtggtgttggggagaagaggttttgagtgagggtaggggatggtattgagagttgttaggaggtggtttattgtttagtgttttgggggttttttaggttgggttgggttgtggagaaggggtgtaagtggttatgattttgttttttgtagtttttggtttttttatgtttggagggtttttatttgatttagtttaattttgtttgttaggtgtttggggataagggaagatttggtttgttttgatagaaaatggggttttagtatttgttgggtgatttgtgggagtaggtaaaggagggtttttaagtttgttttgtagtattggggtagggaatagatttaggattttgggaatttttttttgtttagttttgtttgtttgttagagtagggtttgtggtttgggtgttgtgattgtttgggggtgggggaagggtaagggaggtggatttttgaagttttgtttaattttgtttttgattttttaaggttagagagggttagttgggtgggggttatggtttaggttttttggaaatagatataatgatttgggagggggtggtgttgagaataaattagggttagttgggggttgtggttttgtgtttttgggttgggaatagtttggtttggtgtttaggggtgtgagggtgttttggagatggatggtgtgtttgtggtgagtgttattggttttgtatttgttgttttattttttgtagtattttttgtatgtgttttagttgtgggtggagataatttggtgggtgagtagtattgtggaggagtatttttgatgtttgtttttgttgtttttgttgttttatatatttttttattttttattttgataagttttttagttttggtgtttggggtgggtagtggtaggattgggatggggttttttatgtggttgttttgggttagtttgttgtgtggggtgggggggaggatgggtggggtggtgttattgggaggtttagtgtgggttggtgatgtttggtttatttttgttattgttgaggttttgttttttggagtttttatagttttggatttggttttagggagattaggttttgggggagggggggggtttagggaatggtgtaaagtttaagtttgggtgggttgataggattggtttttagttatggagatgtgggtggggttagaggggtgaggtttggtttgtggttggggtgtgtatttggttatttgttggatgtagtgtgtgtggtagtttttgtagtgtatgttgtatgttatgtttttgaggttgtgtatatgtgtgtggatgagtatgttgtgtagttttatgaagttgtaatgtgtttggttttttattgtggggtgggggtgggtagtgggttggtgttggtttaggatagtttttttttattagatttggtattttaagattttatttattttttatgattttttaggggtatagttggttttggatttgttgttttttggtttttattattgtgttgttgtttataatggtgaagggtgtgtttttttgggggaaggagggagaaaggtttatatttggtgagtgtaattgtatggttattgatgggaaatgggtatgtaatttttggggtatttttttagtattattattaattatttttttttaaagagattttggtgttgtttttttttggtttttttgtttttggttggagttagagtttatgtggtttatattttagggtttttttaggttatgtttaattaggtatgttttttttttatttttttttttattaagaattattttttttagttgttttttttttttttagggttgagtttatgtttttttatgttgatgtttttgttttggtggttatttgtttttggtatggtttttattattattttagttgttggggtatttaaagttattaattttggagtttagaaatttgggagttagggtgtgttattggggtagtttttttttttggtgatttatgggaagagggttggggttgggggtttggtttattgttgtatttttggatttgggtaagtgttttatatttgttaagtattatatggggtttatatgatttattttagttaggtaaagatatggtgatttttattttttagttttggatgaagggggtataggttttttatttttagaataaatgatttttgtatttaattgggttgatttggtttttttttagtaggtttaatgtgaaggagataaagttttttggttttgttttttattagttttattttttttgttttattagtttgtatgtttatttttagtttttggttttgttgtttgaagtttttatttttgtttgagttatatttagggaattggtatatatggattttaaatttgttaatttttttttggatttgtggtggggtaaggattattagatttgaggttagataagtttttttggtatttttagttttagggttttggttaggtttttgtgtgatggtaggtttatttgtttttttagtttttggattttattggggataagatagttagttttggtgatgagaggtatgatgttgatttttttatgtaatgtttttatgaaatttatatttattggttgtagtttgttgagagtagttaagggtgggtataggtatagttagggggttatattgtaggggttgtatttttgagtttggttttaggatagttatatatttatgtttgaagggggagatgaagtataggtagtagtgtatttggttgttttggatgtttttttggttgaggttgtttttattatggaagtattgtttaaattgttggtttatatagttggtgatgggtttttagttgtgggtaggagggaggtgaggttaggttttgagtgttgtggttgtttaggtaaggttttttttagtaggttttatttattatttggtgttgttgatagtgtttttgaattttggtgtgtttatgatggtgagttttagtttgatttttttttttttaatgtttattgtgtgttttagaatttttattgtttggttgatgtgttttatggggaaggggttattggaagggtttttttaatttttagttttttatttttggtagttaggatttttgtttttatttattttggtgttttggttttatttttaggggatttatattgtgagaatag

SEQ ID NO: 580 - DNA, 6231 bp, Artificial Sequence
  chemically treated genomic DNA (Homo sapiens)
ttttttttttgtttattttaggtagatataattgtttatgtttttttgatgagaggaaataggttgagagaagaaaaatgattgttttaggattatattatagtggagagtgggttataggatatgatgtagggtttaggtttttgttttgattaagttttatatgtttatttagtttttaggttttttttatttttttgtttttatttataagtggttttgagatatgtgaatattttttttttatgtattataaattttttttattgagttttggtgttttggtttttggtatatttaattagtattggtagaggagagtttatatttttttttttatttagggaagatgttttaagaaattttgtttttgtgtagtagaggagttggaggtagttttttaggtatttttttttaaataaaggtttatgtattggtgaagtgtttagataggtttttttgattggataattttttttaggattagttagatagggggtggggaagggggattaagagatgggtaggggatatttgtagtatttggagttaagggaaaattattttattggtttggtgtttgagttgttttgggttgttaggggtttgttttatatttatattaagatttgaatttggggattttttttggtggaattataattagagggttatatttaatgagataattttttgtatgtttggagatttttgaattttgtttattttagtttatatttaattttttttatgtatatggaaggtatatttagatagtttttaataattagaatttatatttaaggtttggtttgatttaaatttatatttatatatttttatttaataagaatttatatttaatttttttttttttttttgagatagttttatttttgttgtttaggttggagtgtaatggtatagttatggtttattgaaatttttgttttttgggtttaagtgatttttttgttttagttttttaagtagttgggattataggtatttattattatatttagttaatttttgtatttttagtagagatggggttttattatgttggttagattggtgttgaatttttgattttaagtgatttatttggtttgattttttaaagtgttagggttgtaggtgtgagttattgtgttttgttaaatttatatttaatttaaagttatagattatatgttatagataagatttgttgtgttgagtgtgtttattttttttttttttttttttttttttttggagatggagttttattttgttgtttaggttgtagtgtaatggtgtgattttgatttattgtaatttttgttttttaggtttaagtgatttttttattttagttttttaagtagttgggattataggtatgtattattatttttggttaatttttgtatttttagtagagataggtttttattatgttggttaagttggttttgaatttttgattttaagtgatttatttgttttggttttttaaattgttgggattgtaggtatgagtgattttgtttggtttaagtttattttgttaatagtgtttttggtttttgttgggtgtagtggtttatgtttgtaattatagtattttggaaggttaaggtaggaggattatttgagtttagaagtttaagattagttttttgggtaataaaataagattttttttttaaaaaaaaaaaaaaagaaagaaagaaagaaaagaaaaaagattatgtgattatgttattttagttatttgggatttgaggtgggagaattattggaatttaagaagttaaggttgtaatgagttatgattttgttattgtattttagtttgggtgatagagtaagattttgtttgaaaaattaaataaaataaagaaaaaaaaattataaagttttttttttttttttttttttttttttttttttttttaagatggagttttgtttttgttgtttaggttggagtataatggtatgattttggtttattgtaatttttgttttttaggtttaagtgatttgtttgttttagtttttttgagtagttgggattataagtatgtattattatgtttagttaattttgtgtttttagtagagatggggtttttttatgttggttaggttggttttgaatttttgattttaggtgatttgtttggtttggttttttaaagtgttgggattataggtgtgagttattgtgattagttaggtttttgggttttatttgtttgagatttggttttattttgttgtttagtttggagtgtagtggtgtaattttggtttattgtaatttttattgtttgagtttaagtgatttttttgttttaattttttgagtatttgggagtataggtgtgtgttattatatttgtttaattttttgtatttatagtagaggtagagttttattatgttggttaggttggtttttaatttttgattttaagtgatttatttattttggtttttgaaagtgttgagattataggtgtgagttattgtttttggtttgtttgtttttttgagataggattttattgtgttatttagtttggagtgtagtggtattattatagtttattgtaattttgaatttttggttttaagtgatttttttaatttggttttttaaagtgttatgattataggtgtgaggtattgtgtttggttttaataatgttttttgaagtgtttattttgtattaggtgtttaaatgtgtttaaattaagaagggagtaaatgttaataaaattttatatttataggtttattattgatttttaaaattttatttaaggtgggaatttggtaatatagtttggtagtgagttggttatttagtaaatgttttgatttgtagggtttttgagttagaggtattttgaggagattttgatgtagttgtttttttttttggagtgaattgaaagtaatgtgatttgttttttattatgtagttggtttggtagtatttgtttttaatagggttggggattgtatttatatttatatttgtatatatttttgattttgttttatttaaatttaaaatattgtagaattaaaatgggtttttagaaagttttgttgggaagattgagggttttgtggaaaggattttgtaggttgaaggttaggtgttttgttattttaggattataatttttgagaggttttgtgatggaagttatttttgttttttattaggttaagtgattttttggagggggagtaagattttttgtgttattggtgtgtgtagttgttgttgtggagagatgatgtttaggtttgggattgttagttagtgtgtggttaggtatgggttgatgggtttgtggggttggtgttgttatggtggttgtgtttgatttggatttggagatggaggaaggtagtgagggtgagggtgagttagagtttagttttgtggtgagtgttttgttttggtgtgattggattttggagttgattttgttatttagttgaggttggagtggtggttttgtatgtttagagtgggttttgattttttgtagatttagattttttttagattttggtttttattaagttttgattttatttttattttgattttttttttagaattttagtttttttttttgatttttttttttttgtttttggtttttttttaatttttatttattttttattagttgttatttttgatattttttttttttgggttatgtagtttaatttgaatgggagtggggaggtattttggtattttttttggtttttattttttggttttttataggatgtatgtttttttgttgagttgagggtagttggtttagagtgagtgagggttgtgttgggggaggggggaatggagtggggaaggggaattggggagtattggagttttgtttttattaattttttgtgtttgtaggtttgtgggatattatgaagaggtggagttgattgagattagtgtgaatgttggtttagagtgtattgggttttattgttttgagttgttgtgtgtgttgggtaaggggggttatggtaaggtaggggtgggtgtattttttttttggttttatagtttttatttggaggtagtaaagggtttttaaaataaattagatttgtgaattagtagggtttttaatgggatttagagttagaaatataaaggagggaaggttaaattttttttaattggatttgaaatttttattgttttatttttggtagggtttaggttttttgattttaaagttagagttttagggtggggttttttgaagataggatgtggagagggaagttgattttgttttttttgttttataggtgttttaggtgtgaaaggtgtaaggtattaatttgggtaaaatatatgttatgaaagttttaaggaaggtgagttatttgtttagttaatgaatattgtgtggttgttatttttaatatgttgtattaggttttgggaagatagtagggaatatagtggaggaggatttttgattttggtgtttgttggtttattgtttgttgtgatgtgtattgttttgtagtaatttttaatgggggtaattttgatttttagtagatatttgataatagtgtttggatattattttattttatttttttttaagatggagttttgttttgttatttaggttggagtgtagtgatgtgattttggtttattgttatttttgttttttaggtttaagtgatttttgtgttttagattttggagtagttgggattataggtgtttgttattatatttagttaatttttgtatttttttgtagaggtggggttttgtttggttggtttttaatttttaattttaggtgatttgtttgttttggtttttaatgtgttgggagttgggattataggtatgagttattgtttttagtttttttttttttttggatggagttttgttttgttttttagattggagtgtagtagtgtattttttgtttattgtaatttttgttttttgggtttaggtaatttttttattttagttttttgagtagttgggattataggtttgtgttattatatttggttaatttttgtatttttatttgtttatttatttattttgagatggagttttattttgttatttaggttggagtgtagtggtgtgattttggtttattggtaatttttattttttagggtgaagtgatttttttgttttagttttttgagtagttgggattataggtgtgaattattatttttggttaattttttttttttgtatttttagtagagatgggtttttgttatgttggttaggttggttttgaatttttgattttaggttatttgtttattttggttttttaaagtgttgggattatagttatgaattattgtgtttggtttagtttttgtattttttagtggaggtagggttttattatgttggttaggttggttttgaatttttgattttaggtgatttgtttgttttaattttttaaagtgttgggattataggtgtgatttattgtgtttggtatggatatatttttgattgttaaggtaagaggggagtgttattggtatttggtgggtggagattagggatgttgttgaatattttatgatgtgtagggtagttttttataataaagaatgatttggttttaggtgttagtagtgttgaggttgagaaattttgtgttagaggataaatttatttttgaaaatgatggtggttgatagtagtagaattatggagaaatataatgtagtgatagaggatgtagtagttaataaatagatggatggtttgaggagttttggttgtttttattttttttttttttttttttttgagatagtgttttgttttgttatttaggttggagtgtagtggtgtgattttagtttattgtaatttttgtttttgggtttaagtgatttttttgttttagttttttgagttgggattataggtgtgtattattatatttagttaatttttttatttttagtagagatggggttttattatgttggttaggttggttttaaatttttgattttaggtaatttgtttgttttggttttttagagtgttgggattataggtgtgagttattgtgtttagtttggatgttttagtttttaattaatttttgtatttttaggttaaaattgtgtgtaatgttaaggatata

SEQ ID NO: 581 - DNA, 6231 bp, Artificial Sequence
  chemically treated genomic DNA (Homo sapiens)
tgtgtttttggtattgtgtataattttggtttggagatataggaattggttagaaattgaggtatttaggttgggtatagtggtttatatttgtaattttagtattttaggaggttaaggtaggtggattatttgaggttaggaatttgagattagtttggttaatatggtgaaattttatttttattaaaaatagaaaaattagttgggtatgatggtatatgtttgtaattttagtttaggaggttgaggtaggagaattgtttgaatttaggggtagaggttgtagtgagttgagattatgttattgtattttagtttgggtgatagagtgagatattattttaaaaaaaaaaaaaaaaaaaaaatgggggtaattagagttttttagattatttatttgtttgttaattgttgtattttttgttattgtattgtatttttttataattttgttgttgttagttattattatttttagggatgggtttattttttaatatagggttttttaattttggtattattgatatttgggattaggttattttttgttgtgggaggttgttttgtgtattgtgggatgtttagtagtatttttggtttttatttattgggtgttagtaatattttttttttgttttgataattaaaaatgtgtttatgttaggtgtagtggattatatttgtaattttagtattttgggaggttgaggtaggtgaattatttgaggttaggagtttgagattagtttgattaatatggtgaaattttgtttttattaaaaagtataaaaattaggttaggtatggtggtttatggttgtaattttagtattttgggaggttaaggtgagtggatagtttgaggttaggagtttaagattagtttgattaatatgataaaaatttatttttattaaaaatataaaaaaaaaaaattagttaggagtggtggtttatgtttgtaattttagttatttaggaggttgaggtaggagaattattttattttgggaggtggaggttgttagtgagttgagattgtattattgtattttagtttgagtgatagagtgagattttgttttaaaataagtaggtaaataaatagaaatataaagattagttaggtgtggtggtataagtttgtagttttaattatttaggaggttgaggtaagagaattatttgaatttgggaggtagaggttgtagtgagtagagagtgtattattgtattttagtttggggaataaagtaagattttatttaaaaaaaaaaaaaagttagggatggtggtttatgtttgtaattttagtttttagtatgttggaggttaaggtgggtagattatttgagattaggagttagagattagttaggtgaaattttatttttataaaaaagtataaaaattagttgggtgtggtggtaagtgtttgtaattttagttattttggagtttaaggtatgagaattgtttgaatttgggagatagaggtggtagtgagttaaaattgtgttattgtattttagtttgggtgatagagtaagattttgttttaaaaaaaaataaaataaaatagtgtttagatattgttgttaaatgtttgttgggagttaaaattgtttttattgagaattattgtaagataatatatattataatagataataaattagtaaatgttaaagttagggatttttttttattgtgttttttgttgtttttttaaagtttggtatagtatgttgggaatggtagttatatagtatttgttggttgaatgagtgatttattttttttaggatttttatggtatatattttgtttaagttggtgttttgtattttttgtatttggaatatttgtagggtaggggagataggattaatttttttttttatattttatttttaagaagttttattttgaagttttggttttgggattaggaggtttaggttttgttaagggtggggtagtgaagattttaagtttgattggagaggatttggtttttttttttttatgtttttggttttgaattttattagaggttttgttgatttataagtttaatttgttttgagaattttttgttgtttttagatggaggttgtgaggttaggaggagggtgtgtttgtttttattttgttatagttttttttgtttagtatatgtagtagtttaaagtagtggggtttgatgtgttttgggttaatgtttatgttggttttagttagttttatttttttatagtgttttataggtttatggatataaggagttaatgaggataaggttttagtgttttttagttttttttttttattttattttttttttttttaatatgatttttatttattttaggttagttgtttttaatttggtaaggggatatgtgttttgtgagaaattgaggggtaagagttaaggaaggtgttaggatatttttttgtttttgtttaggttggattgtgtggtttaggagagaagggtgttagggatggtagttagtaggggatgggtaagaattgggaagaaattgaaggtaggaaagggagaattgggagaaaaggttggggttttggaagagaggttggggtgagggtgggattagaatttaatagagattgggatttgagaaggatttgggtttgtaaagagttggagtttgttttgggtgtgtggagttgttgttttggttttggttgggtgataggattggttttaggatttagttgtgttagggtagggtatttattgtggggttgagttttggtttgtttttgtttttgttgtttttttttgtttttaaatttaaattaaatatggttgttatggtggtgttggttttgtgggtttgttggtttgtatttggttgtgtattgattgatagttttggatttaaatattatttttttgtgatggtagttgtgtgtgttggtgatgtaagggattttattttttttttggaaaattgtttagtttggtggggaataaagatggtttttgttgtaaggttttttgggaattgtagttttagagtggtgaggtgtttagtttttagtttgtagaattttttttgtaggatttttggtttttttagtaaggttttttgggagtttgttttggttttatggtgttttgagtttggatggagtagggttggaagtgtatgtaggtgtgaatgtaaatgtaatttttagttttgttggagatgggtattgttaggttggttgtgtgatgaaaggtaggttgtgttgtttttggtttattttagaaagggaggtggttgtattagggtttttttaaagtgtttttggtttgaggattttgtaaattggagtatttattgagtggttagtttattgttaggttatgttgttaggtttttgttttaaatagggttttgggggttagtgatagatttgtaaatatgggattttgttggtgtttattttttttttaatttaagtatatttaggtatttggtatagaatagatattttaaaaaatgttgttgaggttggatatgatgttttatgtttgtaattgtagtattttgggaagttaagttgggaggattatttgaggttaggagtttaaggttatagtgagttatgatggtgttattgtattttaggttgggtgatatagtgagattttgttttaaaaaaataaataggttggaggtggtggtttatatttgtaattttaatatttttggaggttgaggtgggtggattatttgaggttagaagttggagattagtttggttaatatgatgaaattttgtttttattataaatataaaaaattagatgggtgtggtggtgtgtatttgtatttttagatatttgggaggttgaggtaggagaattgtttgaatttgggtgatagaggttgtagtgagttaagattgtattattgtgttttaggttgggtggtagagtgagattaagttttaaatagataaaatttgaaaatttggttggttatggtggtttatatttgtaattttagtattttgggaggttgagttaggtggattatttgaggttgggagtttaggattagtttgattaatatggagaaattttgtttttattaaaaatataaaattagttgggtatggtggtgtatgtttgtaattttagttatttgggaaggttgaggtaggtgaattatttgaatttgggaagtggaggttgtggtgagttaagattatgttattgtattttagtttgggtaataagagtgagattttattttaaaaaaaaaaaaaaaaaaaaaaaaaaaaaaaaaaaaaattttatggtttttttttttttgttttgtttagttttttagataggattttattttgttatttaggttggagtatagtggtaagattgtggtttattgtagttttgattttttgggttttagtgatttttttattttaaattttaagtaattggaatgatataattatataatttttttttttttttttttttttttttttttttttttttttagaggggaggttttgttttgttgtttaggaggttggttttgaatttttggatttaagtgatttttttgttttggttttttaaagtgttgtgattataggtatgagttattatatttagtaaaaattaaaaatgttgttgatagaatgaatttaggttaggtagggttgtttatgtttgtgattttagtaatttgggaggttaaggtgggtggattatttgaggttaggagtttaagattagtttaattaatatagtgaaaatttgtttttattaaaaatataaaaattagttgggagtggtggtgtatgtttatagttttagttatttgggaggttgaggtaggaaaattgtttgaatttgggaggtagaggttgtagtgaattaagattatgttattgtattatagtttgggtaatagagtgagattttgtttttaaaaaaagaaaaaaaaagaaagaaggaatgaatatatttaatatagtaaattttgtttgtgatatgtggtttgtgattttagattgggtatggatttggtggggtgtggtggtttatatttgtaattttagtattttgggaggttgagttgggtggattgtttgaggttaggagtttgatattagtttggttaatatggtgaaattttgtttttattaaaaatataaaaattagttgggtgtggtggtgggtgtttgtaattttagttatttgagaggttgaggtagaagaattatttaaatttgggaggtagaggttttagtgagttgtgattgtgttattgtattttagtttgggtagtaagagtgaaattgttttaaaaaaaaaaaaaaagattgggtatggatttttattggatggggatgtgtgggtgtgaatttgggttagattaggttttgggtgtgagttttgattgttggaggttgtttaggtgtgttttttatgtgtataggggaggttgggtatgaattgaggtggatagaatttaggggtttttaggtatgtagagggttattttgttgaatgtggttttttggttgtaattttattaaaggagatttttaggtttgggttttgatgtgggtgtagggtaggtttttagtaatttagggtaatttagatattaggttagtggggtggtttttttttagttttagatgttataagtattttttatttgttttttgattttttttttttattttttatttagttgattttgggaggagttgtttagttaagagaatttatttagatattttattagtatataagtttttatttggggagggatgtttggggagttgtttttagtttttttgttgtatagaggtaggattttttaaagtattttttttgaatgaggaagagagtgtagatttttttttgttaatgttagttaggtgtgttagaggttaaagtattaaagtttggtggagaaggtttgtgatgtataggagggaggtgtttatgtgttttagggttatttgtgaatgagggtagggaggtgaggggggtttagaagttgaatgggtatgtaagatttgattaaaatagaaatttggattttgtattatgttttgtgatttgttttttattgtggtataattttggagtagttatttttttttttttagtttgtttttttttattgggggaatataggtagttgtgtttgtttggggtgagtagaaagagga

SEQ ID NO: 582 - DNA, 6239 bp, Artificial Sequence
  chemically treated genomic DNA (Homo sapiens)
tataaaatttagttgagtgtggtggtagttatttgtaattttagttatttgggaggttgaggtaggagaattatttaaatttaggaagtagaggttgtagtgagttgagattatattattgtattttagtttatgggaaaagagtgagattttgttttaaaataataaaataaaataaaagttttttttattttattattgttgttaataatgatttttttttttttaatagtaaagttttagaagaattgtttatatttgttatttttattgtttttttttttttttttgagtttatttttatttggtttttttgtttttattatattgttaggtttatggttgatatttattgttgttaaatttaagggttaattttattttttttgtatttgtatttttagtagaatttgataaggttgattatattttatatttttttttttattttatttttaggtttatttattatttagttgttttgtttttttttttttgttgggttagttttatttttgttagattaagggtttggggtgatttaagaatgagtttttggattttttatttttttatttatatttttattagggatttatattatttagtgttttagttttaaatgtttttatgaggattatttaaagtgtgttttttgttttagtttttttttggattgttagatttggatatttaaggatttgtttaggattttttaaaaatgtttgttaggtattttaattttaatatatttaaaattgaatttttttttttttttattttttatttttttgtttatgggtgtgttttgagtttaggtttagaatgatttttttatttttaattattttttagttgagtatatttagtttttttgtttttagtattatttataggttgaggatttttaaatatttattttttagtttagattttttttttgaatttttgatttatattttttattttttatgtaatatttgtatttgattatttgagtggtatttttattttaatatgttttaaatagaagttttaatttttttttatttttatttttttaaatttagtttttagatatttttattttagtgtatggtaaatttattttgttagttgtttaggttaaaagttttggtataataattttttatgaggtttttttttgtaaattttttatttaatttattagtatattttgtaggttttgtttttaagattattgtttattatttttattattattatttggttaaattattatttttttttttttgagttttttttaatagttttttaatggtttttttatttttatttttattttgttatggtttatttttaatattgaggttggtaattttattaataaattagatgtgttgatttttagtttagaagatttttatggtttttaatttaattaaaataatgtaaatttttaatttgtatagataggtttattgaagttttatagaatatggattttaattatttttttgattttattttttttttttgttaattgtgtattagttatataaggttttttttttgtaaataagttttttgttataagtatttgtattttttgttttttttattatgttttttttttaggtgtgtagtttagttttttattttattgaggtttttttttttttttttttgagatagagtttgtttttgttgtttaggttggagtgtaatggtgtaattttggtttatttgtaatttttattttttgggtttaagtaatttttttgttttagtttttagagtagttgggattatagatatgtattattatgtttagttgattttgtatttttagtagagatagggtttttttatgttggtagggttggtttggaatttttgattttaggtgatttatttattttggtttttgaaaatgttgggattatgggtatgagttattgtgtttggtttttattgaagttttttattaaatatttttgtattttggtttgggtaatggagtgagattttgttttaaaaaaaaaaattaagattattattttataattaagtaaataattttatgatgaagttaggtttagattataggttgtagtttttataaaaaaatagtgggtaagtaaaagttgataaatagtaataaggaaatgtatatttgtgttaattaaatatttaattttatatatgttttaatgttttattttttttataattttaagtagtagtttaatgagattatataggtttaataatatttatttaatatttttttgatagaagttataggtatttgttttaatttattttatttttttttttagggaaattgaataataagtagaatggaataagattttaatttagaattttggagataatgttaaggagattgttttttaggtgattttaatttgtaattagattgaagaattagatgatttttataggatttatttagtttaaattagaagttttattattttgaatagaaaagttgttaggttaatagtgtaggaggtttatatggtttattttttttttttttagatttgtgtatgtttgtagagatgaagggaaggatgaattgagtaggttgttgaaaaatgtttaatttaagggataaggaaggttatggaagaggaagagatattatgagagttaaggatagtggttatgtttattttagttggatggtttttagaaatggagattttgaggtttaattttaggtttaaaaaaatagattttgtattttaatgtttttagatgatttgtatgtattggtttgtatttttagtttttaatgaaatttaagaattatttggagagtttgttaataattagatatttgggttttattttttagagattttgatttattgggtttttggtggagttatatgtttaataagtattgtaagttattttggtataattgttttaaggtttatggtttgagaagtatggattgggaaggtttttgtaaggaggtttttatttattaatttatttatttatttagttaggataagggtttttttaggttattttatttaaagtggtttttgttaaattgtatttttgttttttttttgtaatatttattttagttgtaagttttttgtatgtttattgtttgtttttttatttattagaatgtgaattttaatatagtagagattttttgtgttttttttatttaggtgattttggaggataaaatttaatttgaagtttatttattttttttgtgtatgttaatattatttaataaattttttgtatttttagttgtaataagtaataagtagtattttatagggtgttttggtgtttaggagtggatgtaaaggtgttgggtgggtataaggtagtgttaaggatatttagggatggaggaattgataggggatttgatgttttgttattttgattagttgttttttgtttttgttgtttttgtttgttattgagatattttttatggtttatttatttgttggtttttatttgtgatttaaggatttaagttttttaagagtttagttgttagaatttaaaggtttttttttttaaataggagttaaattttttagttagaaagttgattggtttgtgtttgagtgaggttgttttgtgattggttgataataaatttgatgttttgagttgtgtttaagggtgtatattgtgtgtaggtgtatttgttttttaagaatttggaagtggtggagttaatggttagttagatttgtggtagttttagttttagggtgttttttgtggttggttatttattggtgaagtaatagttttttgatgttaagtttgatgtattggagataaagtttaaggaggtgaattaatttttgaatgtgttagtaagtaagatggtgagaaaagtaagagagagtgggattgattgatagtgtagtggttggtttggtgtttttttagtgtgtgtagtgaatgtgtgtttggagtggtagattgggtaggatttgtgtttttatttttttaggagagagtgggatattaagagaattggattagttggtattgggatatggggagagtagttggtgtggttggttggggtatttagagaaaattatagaaatgattggggtgagattggaagagttgagagttagtaaggtggtatgtgtttttattttgtgttttttaagttgtttggtttggtttgtatttttttttttttttgaagggttttgtttttatttttatttagtttttagtttgtttttgtatttagatggttgtggtgtatatagtgagggggtatttgtgttttagtttttttaattgtgatgtatttggttttggattgggtttttgtttttgtgtgtttatttgtaaattggggataattaggtttttgtttatttggtgagtgaatgttttgtgggagttgagaagttaggggtgggttatttaaaatatatatatatatatatatatatatatatatatatatatatatatatatatatgtgtgtgtgtgtgtgtgtatgtatatttgggatgtgtttagtagaagtgaagagattggatagaatagtggtgtaggggaattaaaaatggtttttttttatttttttaggtattttattaggattaagagttaaatttatataagatgaattaatagattattgtagggtaaataggatgtgtatgtaaagtattgagttagtatatggaaattatttgagttatattaatttaatgttaatagtagaattttttattaatttttttttgttagattatttatttgtgatttttattttttattggtatttaagaattttttattttttttgggtaattgaatattgtttatgggagaaaaatgatatttaattatgtataggagttttataaaatatgagattaaaagttgaagttagatgattaaagtttatatggtattttgagttattgaaaggaatgaatagagaattgggggtggggggtgggaagtagttttaatataagttatgggatggtgaatggaggaaatgtatggtgaattaagtttgttatgtagatagaataggtgattttttgggtggtgttagtttttaattttttatgtgatttgagttaattttttttggtttataaggatttgtgataattgaggtatttttggagggttagattttaggtaggtaaggaaagtatagggaaagtttttttttgtttgttgttttttaggtgtttttagtttaaggtaattagtttgttaaagtattttgttttgggttggtattttttgaatttttttagtggttaagtttagggatttggagttggtaattttggtgtgttttaattttggataagtaatttagttattttttatgttgagtaggtgttttgatttttttgaatttattttattatttttatttgtgttttaggattttttatttaagtatagatttattatgtttatgtattattttatatatttgaatatattgaatgattttatttagtgaattgatgtttataaagtatttagtatgatggtatttggtatgtaggaagtgtttaatgttattggttattattaatattattagtgttatatagtgtgtaagaaattaggttttgggttaggtgtagtggtttgtgtttgtaattttagtattttgggaggtggaggtaggtagattatttgaggttaggagttttgagattagtttggttaatatggtgaaattttgtttttattaaaaatataaaaattagtttggtgtggtggtgggtgtttgtagttttagttatttgggaggttgagataggagaatagtttgaatttaggaggtggaggttgtagtgagttgagattgtgttattgtttttaagtttgggtgatagagtgagattttgttttaaaaagaaaaaagaaattaggttttgaggttatttttattttttattgttgtttttagatatttgtagttttttaattttggtttaaatatatatatatataaaggtattgatttttggtaagtaaattattatgttgaatagttggagtttttttttgaataagttagaaattatttatagttttttgttttttaagattgaaggaaaatttagatatttgtaagttagtgtatgtataattttttttgattattattgtttttttttttatttttattgttttgattttgattggtaatatttta

SEQ ID NO: 583 - DNA, 6239 bp, Artificial Sequence
  chemically treated genomic DNA (Homo sapiens)
taaaatattgttaattaaggttaaaataataaaaatgaaaaaaaaaatagtaataattgggaaggattgtgtatgtattgatttataagtgtttaagtttttttttagttttaagagataaaaaattgtaaatggtttttggtttatttaaaaaagaattttaattgtttaatatgataatttgtttattaaaaattaatgtttttatgtatgtgtatgtttggattaagattaaaaggttataggtgtttggggatagtaataaagaataaaagtgattttagagtttgattttttttttttttttgagatggagttttgttttgttgtttaggtttgagggtagtggtgtgattttggtttattgtaatttttgttttttgggtttaagttatttttttgttttagttttttgagtagttaagattataggtgtttgttattatattaggttaatttttgtatttttagtagagatggggttttattatattggttaggttggttttgaaatttttgattttaggtgatttgtttgtttttgttttttaaagtgttgggattatgggtgtgagttattgtgtttggtttagagtttgattttttatatattgtatgatattgatggtgttaataataattaataatattaagtattttttgtatgttagatattgttatgttaagtattttgtaagtattagtttattgaataaaattatttaatgtatttaagtatatgaagtagtatatgaatatagtaggtttatgtttgagtagaaaattttgggatataaataaagatgatgaaatgggtttaaggaggttaggatatttatttaatgtaaaaagtggttgagttatttgtttaaggttaaagtatattagaattgttaattttagatttttgagtttaattattgaaggagtttaggaaatgttagtttaaaataagatgttttggtgggttgattattttgaattgagggtatttggagaatagtaggtgggaagaggttttttttgtgttttttttatttgtttaaagtttgattttttaaaaatattttaattgttatgaatttttataaattagggaagattaatttggattatatgagagattagaggttgatattatttagaagattatttattttgtttgtataataaatttgatttattatatattttttttgtttattgttttataatttgtgttagagttgttttttgttttttgtttttaattttttatttattttttttagtagtttaggatgttatgtaggttttaattatttgattttaatttttagttttgtattttgtgggatttttgtatgtaattaaatattgttttttttttatggataatgtttagttatttgaaaaaaatgggagatttttaagtattaataaagaatgaaaattataagtgggtagtttggtaaagaaaagttgatgagagattttattgttaatgttgggttaatatgatttgaataatttttgtatgttagtttaatgttttatatgtatattttgtttattttgtagtaatttgttaatttgttttatgtgaatttaatttttagttttaataaggtatttggaaggatggagggaagttatttttggtttttttatattattgttttatttggtttttttatttttgttgagtatattttgggtgtatatatatatatatatatatatatatgtgtgtgtatatatatgtatatgtgtgtgtgtgtgtatatatatatatattttaagtggtttatttttaattttttaatttttatagaatgtttatttgttaggtaaatagaagtttaattatttttaatttgtaggtgagtatatgaggataagaatttgatttaggattggatatattgtagttggaaaggttagaatatagatgtttttttattatatgtgttgtgattatttggatgtagaggtgaattaaggattgggtgggaatggaagtgaggttttttgagaagaggaaggggtgtaggttaagttgggtaatttaggaaatgtaaagtagaggtgtatgttattttgttaatttttgatttttttagttttgttttagttgtttttgtggttttttttaaatgttttagttgattgtattagttattttttttgtgttttagtattagttggtttggtttttttggtattttgtttttttttggaaaaatggaggtgtgaattttgtttaatttattgttttgagtgtatgtttattgtgtatgttgaaagggtgttaagttgattgttgtgttattgattggttttatttttttttgttttttttgttattttatttattggtatgtttaaaggttagtttatttttttggattttatttttaatgtgttaagtttgatgttaaggggttgttgttttattgataaatggttgattgtggagagtattttggggttgggattgttataggtttggttggttgttggttttattatttttgggtttttagggagtaagtgtgtttgtgtgtggtgtgtgtttttaaatgtgatttaaggtgttgggtttgttgttaattaattataaggtagttttgtttgagtgtaggttaattggttttttagttagagggtttaatttttatttaaaaagaagaatttttgaattttaatggttgagtttttggaagatttgggtttttgggttgtaggtgggagttgatgggtgggtagattgtgggggatattttagtggtggatgaggatggtggggataaggggtggttggttggagtggtggagtgttaagttttttgttggtttttttgtttttgagtgtttttggtgttgttttgtgtttgtttagtgtttttgtatttgtttttgggtattgaggtgttttgtaggatattgtttgttatttattatagttagaggtataaggggtttgttgagtggtgttgatatgtgtgggaggggtgggtgggttttagattggattttgttttttgagattatttgggtaagaaaagtatagaaggtttttgttgtgttggagtttatgttttagtgggtggggagatagatggtaagtgtatggagaatttgtagttggggtgggtgttatagaggaaaagtaggagtgtggtttaatgggggttgttttagatagaatagtttaagaaggtttttgttttggttggatgagtgggtgaattgatgaatgagaatttttttgtagaggtttttttggtttgtattttttagattgtagattttggagtagttgtattgggataatttgtagtgtttgttaaatatatagttttattgagagtttggtaaattagaatttttgaggggtaggatttaggtgtttagttattaataaattttttagatgatttttaggttttattgagaattagggatgtagattggtgtatataaattgtttggggatgttaaaatgtagaatttgtttttttagatttggggttaggttttagagtttttatttttaagaattatttggttgaggtagatgtagttattgtttttaatttttgtaatgttttttttttttttgtaattttttttgttttttgaattaaatgttttttagtaatttatttagtttgtttttttttttatttttgtagatatgtataggtttgagggaggaaggaataaattgtataaattttttgtgttattagtttaatagtttttttatttaaaatagtaggatttttggtttgaattgaatggattttgtgaaagttatttggttttttaatttggttgtagattagagttatttgaagggtagtttttttggtgttgtttttagaattttggattagaattttattttattttgtttgttatttaatttttttagaaagaaaggtagaataaattggagtaaatgtttgtagtttttgttagaagaatgttgaataaatgttgttaggtttatgtgattttattagattgttatttagaattgtaagggaagtaaagtattagagtatgtgtgaaattaaatatttgattaatataagtgtgtatttttttgttgttgtttattaatttttatttatttattgtttttttataagggttgtagtttgtagtttgggtttggttttattatggaattatttgtttaattgtaaaatggtaattttaatttttttttttgagatagggttttattttattgtttaggttagagtgtggggatatttgataagaaattttagtgaaggttgggtgtggtggtttatgtttgtaattttagtatttttggaggttgaggtgggtggattatttgaggttgggagttttagattagttttattaatatagagaaattttgtttttattaaaaatataaaattagttgggtgtggtggtgtatgtttgtaattttagttattttggaggttgaggtaggagaattgtttgaatttaggaggtggaggttgtgggtgagttgagattgtgttattgtattttagtttgggtaataagagtaaattttattttaaaaaaaaaaaaaaagaaattttagtgaaatgaaagattgaattatatatttgggggaaaagtgtaataaagggagtaagaagtgtaaatgtttatggtaggggatttatttgtagaaagaaagttttgtgtggttggtatatggttgataagaagaggagatgaagttagagaggtagttagggtttatgttttgtgagattttaataggtttgtttatgtaggttaggagtttgtattgttttgattgagttgggagttatgggggttttttgaattgaggattaatatatttgatttgttaatgagattgttggttttagtgttaagaatggattatgatagggtaagggtggaagtggggaggttattgggaggttgttggaaaaaatttaagggagagagaataatggtttgattaggtggtagtagtagaggtggtgagtagtgattttgaaggtagagtttatagaatatgttggtggattaaatgaagggtttgtgagagagaattttgtaaagggttattatgttaaggtttttggtttgagtaattgataggatgggtttgttatgtattgagatgaggatgtttagagattagatttggggaggtgagagtggggagagattaggatttttgtttgggatatgttagaatggagatgttgtttagataattaggtgtagatgttgtatagaaagtagaaaatgtagattaagagtttaggggagaggtttgggttgaagaatgaatatttgggagtttttagtttgtagatggtattgaaagtaaagagattggatgtatttggttagggagtaattggagatggagaagttattttaggtttgagtttagggtatatttatgaatagggaggtgagaagtggagaagggaagaggtttagttttggatatgttaggattgaggtgtttggtagatatttttgggagattttgggtaaatttttggatatttaagtttgatagtttaaggagagattagggtagaagatgtattttgagtggtttttatgaaggtatttagagttgaggtattgggtgatatggatttttggtgaaggtgtagatggagaagtggagggtttagggatttgtttttgagttattttagatttttgatttggtaaaaatgagattgatttagtaaggagggaaagataggatgattaggtggtagataaatttggaagtgaagtgaagaaaaaagtgtaagatgtgattaattttgttagattttgttgaggatgtaagtatggggaaggtggaattgatttttgggtttggtagtagtaggtgttagttatgagtttgataatgtggtggagataaaaaagttaggtggggatgggtttaggggaggggagaggagtagtagaggtggtaagtgtggatggtttttttggagttttgttgttggagaggagggggttattgttagtaatgataatagaataaagaggatttttattttattttattgttttgagatgaagttttgttttttttttataggttggagtgtaatggtgtgattttagtttattgtaatttttgttttttgggtttaagtgatttttttgttttagttttttgagtagttgggattataggtgattgttattatgtttagttaagttttgta

SEQ ID NO: 584 - DNA, 6168 bp, Artificial Sequence
  chemically treated genomic DNA (Homo sapiens)
tttgagttttggaggtggaggttgtagtgagttgagattatgttattgtaattgagtttgagtgaaagagtgagattgttttaaaaaaagaaaaaagaaaaagaaaaagaaaaagaaaatatagtagagaaatatgagtttattttggaaaattttattttttgagaaagtaagattaaatggtttaggatttttattgatttagaaaatgtttttaaatagttttagaaaattaaattaaattaatgtatataaagaatattgataatatataaatgtgtaatttatatttatattaaatgtatttgtattatataatttgtttatggtatattttttttttatatttttaattttatttttgtttttataaaattttttaaagaaagtagtatttaatttgtatatgttagaatggaaattattttgtaaagatgtatttattaaatgttagatgtatttaaggagtatttatatttgtaatagatataagttatttttaatttaaattatatgttattttgtttattttttgaaaagaatgtgatatggaaagggtattattatttaatgaaatttttttattttataaattagaaaaataatgtttagaaagttgtaatttatagatattttggagttatgaagtggtagagttggaattagggtttatgtttgtttaatgtttatttttattgtatttttattattttatatatatatatatatatatatatatatatatatataaatattagtgttttatgtattttattgtttatattttttttaaaaagtaaatagaataatatgtgatataatttaggaaggggatttaaaagtaaagtgtgtatgatagaaatagggttatttaatggaaatagtgatgttaataaattatgttttttagtattttgtaagaaatagagttttaaggggatttagagattaaatttaattttttaagttaattatttaatagggtggttgtatatttaggttattttgagtgtataatagtattggatttgagttttgttttttgatttttatttttgttttttgataagttttgtgatagtaaaggggaaagaatgtttattgatttttaatagttatttttattatgatatttttgttaaaatattattttaatttaggttttaagtagtttatgtttagattatatttatgagataattaggttttttggtttataggtgttttttttttttatattgtattttattgatagatttattatttttaaattattgtttgtattatattatttttagttaagttttgtgatggtgtgtgtttaatagtttattgattttgttttaaatattttaatttggtttttttagttttttataatttgtttgttttttagaaattttattttttttagtaaagtatgtttatttgtattgttaattttttattaaatgtttttttttttgtttttgtttttttttttttttttattattgtaaattttatttaagttttaaggtatgtatttgtgttttttatttagtttttttttattattttagtttttgttgttgagtttttttttttttttttgattttgtgaatttttttataggttattttgttgggtttgtatatttaaatttagtgtaagttttagggtaggaattatgttttattttaggaattttatgagttttttttttatttttattgttatatattttagtattttgttgattatgatagatttttagggaatattttgattgttggatagtttagatatggtggaggaagagaatgttagttatttgtaagtaatgttggtaaaagtattagtattatttttagggttaagttttaattttattgtttttttttatgaatgtatatatttattttattattaaattgttattgatttttttttttttagtgtttgttaaataagtttattttttttaattttggttttaagtttgatttatttttaagtaagtttattgtatttttttagttattttttttattttaaggatatagttaaatgaaagtttttatttaggttttttttttttttttttaataagaggaatttttatttttttttatttgtggtgttttttttttaggtttgaaggtaggagtgatattgtggtgatattttagttgtggagattttttttttattatataaatgttttaaatttagatgtgtttatagtttagttaagattagaaaatgttattggtttttttttttttttttgttttgtaaaatgattatgatgtagagagtaagttttgaagagttgggatttttttttatttagaagtttttttattatttttttttggtggaggggaaggggaagtttgtttttagttatatttgaagttttagttttgttttgtgagttttgatttttaaggaggtaggagagattttttggagggttttaggtattttgttatttttttttttgttggtatttttttttaatgttaggtgattatatttttagttaaagagtttttgtttttttgttttttgtaggatatgttttttggtttatattattatgtgagtttttttagtgggtttttttgtttgtttttgtttttattttttgatttttatttgtgagtatagtgttttattttggtggatagtttgttggtgttgttaggttttttgttgtgtgtataagttagtagttggtggtttgtttgtagtattggtagtgaggattttggaattgtttttgtttttgggtttttttatgtgtttagggattgtttttagtaggtgtagttttaggtgtttaattgttagatttttaattttgtgtttttttagtttttaaagttttttaatttgtgtttgttagttttagtgtgtttttttgtttagatgttagtttggtttagggtttgttttttttgtgattttagttttagattttttttttggtttttagtgtttagtatggttatttatttagggtaagggttaggagtagtggtagggagttggtgttgttgtattgggtggtttggtttattaattttgttttgttgggttgggtagtttttagataagtttttttttttttttgttttttttttgggttttgggtgtttgagagggtgtttggaaattaattttggaggtagaaggaaatgaaattattttttaggttggtattttggttataaggtagggaaatatttagggtgggaggttggttggttttgtgaatgttgttgggaggagggagttttttatttattttttttttttttgtatatattttgttaaagaggtgtaggatttggttttgggagtttttatgttgtttttatttaaattgttttatatttatatttatatttagggatatatttgggttgtttttggattagtttattattttttttgttgggttttatttgattgattgtttatttttttattttttagggtgtaaataaggtagggagggagatgtaaagaatttgtgtggaggggtgttgggggttttggttgggtttgtaggttgatttaaatttttggaagttattgaggaagagttagagatttaaatgtgttttggaattttaattttttttattttagaggattgttagtgttatggagaaattagatttattatttattgtggttgattttaggtatttgataatgtaggtaattttaaaagagttattgttgttttttaaagttttgaagttatagtgaaattttgtttttataaaaaatataaaagtaaattaatagttgggtatggtggtgtgtatttgtagttttatttattttttgaggttgaggtggggaggattgtttaagtttgggagatggagtttttaatgagtttagattgagttattttattttagttaaggtgtaagagtgagatattgttttaaaataatgataataataataataatattagtaataaaaaaaaaaaaaaaaaaaaagaaaagaaatgaaaaaagtttttaagttagtgttttagtttttgggtgtattgttttttaataatttataaaattggggtttattaggatttattttagaaattttatttgtatttttgtttatgaatttatttatgtatttagtatatttttatttatttgtattaagtaatttttggaatagaaagatatttttatagtttttagagaaagtaagtagtatttaattttattttatgtggttatatattgtttttaagataattaaaagatatagttgtttttgtattggtttgtgttttttatataagatttatgtggataattatgttttttagtatagaaattttatttttatagtatttaaaagttatgtaagttttattttatatatgaaatgtagtttgggtgtttgtttttttttttttattttattgtttaagttaagtaaattgttgtgtatttgttttttatgaataatattttattttaaaattaaattattttattgttttaggtaattgatatatttggtggaataaaaattagtttttaatttttagaattttattttagttttatatgatagtttataaaatattggtagagagggtaggtatgaagtttaaagaaatttaaagttgtaagatggaaggttattgtattttagttaaaaagagtagaaatattggaagttaatggattttgatattattttttttttttttaatatttttattttgtattttttttttttgatattttttttattttttagtattagtgttttaagttaaagtattttttattttaagatggtatttagtttagttaatagttgttttgttagttttaatagaatgttataattttgttttttttttttgtagatattaataaaaaaaaaaaaaagtgagatttaaataaaaagtattaaatgtttgttgagtattggaaaattttaggatttggtgtaagtatttattatttatgttatttaagtggtaaattaatttttttaggttattagaatatgaagtagtataatttaatatattaaataggatagataaattaataattttttttgagggttttatttattattataaataaaataagtatttttaagaaaatttaaattttttgatattggatatttaatttttttaatgttaagagattttttttgtttttttttgtttgttttttttttttttttttattttttttttttttgtttttttttttttttttttttttttttttttttttttttttttttttttagtttttaattattttttttttttaagttatttgtttatggggtatggtaaagttggaatataattattatatttggaagagtggaaggtaagaattgatttttttgagtttttaaatatgtaattgagttgtgttttagtgtttttatttgtaagttgagttgttattaagagaaaaataaattaaagttatattagagttataaggtgaaatttgtatttttagttaattttaaggtaggaattgtttgagtgttgttttttttgtgttaggtttaggtaggtataattagtttttttaaatttggtatgaggtttaagtagatttttttggagggtttttaagtattagtttttttttttttttatatagaatagtttgtagttgggattgttttttttgttttttggataggataaaataaatttgtagttatatatagggtataatatataaatagatatatgttatgatggaaaggaaaattttggaatgtattttttttaggttaatatgtattttttaaatgaaggttttaaggtatttagtagtataggaaaattttttaatgattattaattttatttaataagagtgggtgaatgaaaatgatgaaaggtatttttaaaattgtaatttttatagtaatgataagtattatgtattgtagattattagtggtatagttatatagagagaatttttaaatattttatttaaaattattgaattggtttttaagaatgtattagtgaaaaattattgtttaaaagttgtatttaggtaattgtattttataatttagttgttttgagggaggtagttatttttttttttgtttatttttttgtatttttttttttagtttag

SEQ ID NO: 585 - DNA, 6168 bp, Artificial Sequence
  chemically treated genomic DNA (Homo sapiens)
ttagattgaagaggaagatataagaaagtaggtaggaaaaaaaataattattttttttagaataattagattataaaatataattatttgaatataatttttgagtagtgattttttattgatatatttttagaaattaatttagtagttttaaataaaatatttgaaagttttttttatgtaattgtattattaataatttataatgtatgatgtttattattattataaaaattataattttaaaaatgttttttattatttttatttatttatttttattaaataaagttaatggttattaggaaatttttttatattattgaatgttttaaagtttttatttggagaatatatgttggtttagaaggaatgtattttaaaatttttttttttattatggtgtgtgtttgtttatgtgttgtgttttatatgtaattataagtttattttgttttgtttagaagatggggaggatggttttagttgtaggttgttttgtgtgggaagagaaaaaggttgatgtttaaaggttttttaaaggaatttatttaagttttatattagatttgggaggattggttatatttgtttaaatttggtataggaagaatagtatttaagtaatttttattttggggttaattaggaatataagttttattttgtgattttggtgtaattttggtttattttttttttagtaatagtttagtttgtaaatgaaagtattgagatgtaatttagttatatgtttgaggatttaggaaaattaatttttattttttatttttttaaatgtaatggttgtattttagttttattatgttttataagtaaatgatttgagagagagaggtggttgggggttgggggagaaaaagaagaaggagaaggagagggaagaagaggaggaagaatagagagaaagaaagtgaggggaaaaaaaagaaataaataaaaaaagataggaaaagttttttaatattgaagagattggatatttagtgttagaaaatttggatttttttgggagtatttattttatttatggtggtaaataaagtttttaaggaaggttattaatttatttgttttatttagtatattaaattatattattttatattttagtggtttgaaaaagttaatttattatttgaatggtataaatgatgaatatttatattaagttttggaattttttaatgtttaataaatatttagtattttttgtttaggttttgtttttttttttttttattagtatttatgaaaaaggaaaataaaattgtagtattttgttggggttaataggatagttgttggttaggttaaatgttattttggagtaagagatattttaatttagggtattggtgttgagagatggagagaatattagaaaagaaaaatgtagggtggaagtgttgagagggagggagatgatgttaaaatttattggtttttagtgtttttgttttttttagttggggtgtagtaattttttattttataattttgggtttttttaaattttatgtttgttttttttattaatgttttatgagttgttatgtgggattagaatgggattttgaaaattaagagttgatttttattttattggatatattagttgtttggggtagtaaaataatttagttttgaaatgaaatgttatttgtgggagataagtgtataataatttatttaatttaaatagtaggatgaggaggaagaggtagatatttaaattatattttatatgtaaaataaggtttatatgatttttggatgttatagaaataaaatttttgtattgaggggtataattatttatataaattttatatgaggaatatagattagtataaaagtagttgtattttttggttattttggaggtaatatataattatataaggtaaaattggatgttgtttgttttttttaaaagttgtgaggatgtttttttgttttagaaattgtttaatgtaagtaaatgaaaatatattgaatatatgagtaaatttataaatagaaatataaatgaaatttttaaagtaggttttggtgagttttaattttatgaattattagaagataatgtatttagaaattaagatattagtttgaagattttttttattttttttttttttttttttttttttttttgttgttgatgttgttgttgttgttgttgttgttttgaaatagtgttttatttttgtgttttggttggagtgaagtggtttgatttaggtttattgaaggttttattttttaagtttaagtgattttttttattttagttttagggaatggatgggattgtaggtgtatattattatatttggttattaatttatttttgtattttttgtagagatgaggttttgttatggttttaagattttaaaaggtaataatgatttttttgaaattgtttgtattattaaatgtttgaagttaattataatgaatggtgagtttggtttttttatgatattagtaattttttgaaataaaggaagttagaattttagaatatgtttgggtttttgatttttttttggtggtttttaggagtttaggttagtttgtaggtttgattggaatttttgatatttttttatgtggattttttatatttttttttttattttgtttatgttttagggggtagggaaatgaatagttagttaggtgagatttagtagggggagtggtgagttggtttgagggtagtttgaatatgtttttgggtgtgggtatgggtgtggggtaatttgggtgggagtagtgtggaggtttttaggattaagttttgtgtttttttggtggggtgtgtgtaggaggaggggggataaataggaggttttttttttttggtgatatttatggagttggttggttttttgttttgggtgtttttttgttttgtagttagggtgttagtttgggaagtagttttgtttttttttgtttttgggattagtttttaggtatttttttaggtgtttgaggtttgggaagggggtgaagaaggagggagatttgtttaggggttgtttggtttggtagagtggggttgatggattgggttgtttggtgtagtggtgttagttttttgttattgtttttggtttttgttttgggtaagtggttgtgttgggtattggaaattaggaggaaagtttggggttggagttgtggggagggtgaattttgaattgagttggtatttggataagagggtgtgttggggttggtaggtgtgggttggagaattttgaaggttgggagagtgtgaggttaaagatttggtaattgggtatttggggttgtatttgttggaggtagtttttagatgtgtgagaaggtttgagggtggaagtgattttgaggtttttgttgttagtgttgtgagtaggttgttagttgttgatttgtgtgtatagtagagggtttggtggtgttggtgggttgtttattggggtgaggtgttgtgtttgtaagtgagggttggggggtgggggtaggggtgagtagggaaatttattaaagaagtttatgtggtagtatagattaagaagtatattttgtaggaggtagaagaatgggaattttttgattgaaggtgtgattatttggtgttagggaagagtgttagtgggaggaggagtagtaggatgtttagagttttttagagggttttttttgtttttttaggagttagaatttataaagtagagttggaattttagatgtggttggaagtaggttttttttttttttttattgagggaaggtagtgagaaggtttttaagtaggaaaaaattttaattttttaaagtttgttttttgtattatggttattttgtggggtagagaagggaagggaaattagtaatattttttaattttagttgggttgtagatatatttgggtttggagtatttatgtggtaggaggagagtttttatagttgaagtgttattatgatattatttttatttttaagtttgggaaggggatattataaatgaaaaagaatgggaattttttttattgaggaaagagagggggagtttaaatgaaaatttttatttgattgtgtttttggagtaagagaggtggttaaaaaggtatagtgaatttgtttggaggtggattagatttaggattaaggttagagaaaataaatttatttaataaatgttgaagaggaaggagttagtaataatttagtggtagagtgaatgtgtatatttatgaagaagagtaatggggttgagatttaattttagaaatagtattgatgtttttgttagtattgtttgtaagtagttgatattttttttttttattgtgtttaaattatttaatagttaaagtattttttgagaatttgttgtagttagtaaggtgttgaggtatgtagtaatggaggtggggaaagggtttatgagatttttaaaataaaatatgatttttgttttagaatttgtattgaatttggatatgtaagtttagtagggtaatttgtggaaaaatttatggaattagaaaagggagaaagagtttaatagtgggggttggaatagtggggaaaggttgaatggaggatatgaatgtgtgttttgaggtttgggtagagtttgtaatagtagagaggaaagagggaatagagataagggaaaaagtatttagtaaagggttggtgatgtgaatgagtatgttttattggaaagagtagaatttttgagaggtagatagattatgaagaattgaaaaagttagattagaatatttggaatagaattaataagttattaaatatatattattatagggtttgattgggagtgatatgatgtaaataatggtttaaaggtgataaatttgttagtgaggtgtagtataggaagggggggtgtttgtgggttagaggatttgattgttttgtaggtataatttgggtatgagttatttggggtttaaattagggtgatgttttagtagaggtgttatagtagaaatgattattgaaagttgatggatatttttttttttttattattataaaatttgttaaaagatagaaatgaaaattaaaaagtaaaatttgaatttagtgttattgtatatttagggtaatttaaatgtataattgttttgttaaatgattggtttgggaaattgaatttggtttttagatttttttaaagttttattttttgtaaaatgttaaggaatgtaatttgttggtattgttgtttttattaagtggttttatttttgttatatatattttatttttaagttttttttttaaattatgttatatgttgttttatttattttttgaaaagaatgtgagtaataagatgtatgagatattagtgtttgtgtgtgtgtgtgtgtgtgtgtgtgtgtgtgtgtgtgagatggtggaaatgtgatgagagtgggtattgagtagatatgagttttggttttagttttattattttatgattttgagatgtttgtaagttataattttttgggtattgtttttttaatttgtaaaatgaagaggttttattagatggtgatgttttttttatgttatattttttttaaaaagtaaataaaataatatgtgatttaaattagaaatggtttatgtttattataaatgtagatgttttttaaatatatttggtatttagtagatgtatttttataggataatttttattttaatatatgtaaattaggtattattttttttgagaaattttataaagatagaagtggggttggagatataaaaagaaggtatattataagtagattatatggtataaatatatttaatataaatataaattatatgtttatgtgttattgatattttttatatgtattaatttggtttaattttttaaaattgtttaaaggtattttttaagttagtagaaattttgagttatttaattttatttttttaaaaaatgagattttttaaaatgggtttgtatttttttattgtatttttttttttttttttttttttttttttttttttttgagatagttttatttttttgtttaggtttagttatagtggtatgattttagtttattgtaatttttgtttttagggtttaag

SEQ ID NO: 586 - DNA, 6168 bp, Artificial Sequence; identical to SEQ ID NO: 584
  chemically treated genomic DNA (Homo sapiens)

SEQ ID NO: 587 - DNA, 6168 bp, Artificial Sequence; identical to SEQ ID NO: 585
  chemically treated genomic DNA (Homo sapiens)

SEQ ID NO: 588 - DNA, 6205 bp, Artificial Sequence
  chemically treated genomic DNA (Homo sapiens)
ttgttgggaagggtgtttgaggttgtgggtggtgtggagtgtgtttgtgtgtgtggaggttgagttggttgtgtgaagtggtagtgggtttgttagagagtgtttatttgtgtgaatgtataattatatattatgggttatgttttatatttattttttttttaggtgggttaggttgtttgtatgtggagatttagagaggttagtggaagggtagtgtgggaaggtggttttttttttttgtgagtgtagatttggtggaggaggtggtgattgtttggtaggttgtgttggtgagttttttagttttttttattgatgtgttaggtgttttgaaggtgataggtgttttttgttgaaaatgaaggtgtttgagttaggaaggtgggggtgggtagttagtgggagataaggagtttggagaaaattgagaggtgggtaggttttgaatgtgttgtgttgtgggttgtgttgtgagtttggtatatgttttttgttttagtttgtgttggggtttggtttttaggttttttgtgatgatttgtgaaaatattttttgtttttttttttttaatttggaattttggagggagaggttgtgtttggttagtagttgttgtgagagtagtatttatttgggtttgtgtgtgttgtgatgtgttggggtttttgtgttgttttgtgttttgtttttggtattattttttgtggttttattgtttttagtttgtatttgagtgttgaggtggtaagggtaggtttgtgtgtgagttttttgtgggttggtagttaggtgtgtgagggttgtttttgttggtgtttttagtttgtgttgtttgtttttaggaatttggtttggtgtgtagtgttagaggttttgtggtggtggtaggttgagtttataggggtattaggttaattttttttttttgttttgtgtatgtggaattttttattattattattaaagaattttttagaatttgtttatgttaaattttgtaaattttttgttagggtttttgttattttttgggaaattggaatttgtgttttgaaaatggggttgtggggttaaataggtgggtttttagtgtgtgttgggggtgggggagggtaattgaattatgtgtgagtttagatttgagtgtggtgtgtgtatgtgtgagtgggagtgagtgtgaatttaagtttttgtgggttttaagtttttgtgttaatgagtgtattagtgggtgtgtatatgtttgagtgttttttgtatatgagtgtgtatatatgtatgggtgtgtttatatgtttgtttgtgtaatttattgggtttgtatgtgtattaagatatgtatgtgtgtgttaatgtgtggataagagtgtgagggtgtgtgtgtatgggtgagtgattgagtatgttgtttatttaggggtttgtgtggtttgggttgtttttgggttagtgggtttttatttgtttttgttaggtttgtggtgtttgagataaagtggttgtgatttgtgttgtgtttttgttttttgtttgtgttttgttttggtggttgtttgtttgtttgtaagttgttgggtgagtttgaaaaattttgggagtggtgtagttttttttggggtggggagagtgggtaggtggttttttgtgggaatttagttggttggttgtgaggattggagttgagttggttgtgtttgtgatggttatgattgggaggttgttgtatttgtgatttgttatagggttgtgtgtgttggggaaggttttggtttagggagtgttttttgttgtgttgtttgggtggggaaggtggggtttagtgtgtattggggttgaattgtgggtggagggtgtattaatatttgtttgttaggttggtggaggtggggtggattttgttggtggttgtggggtggtgagagtgggggttttttaagtgtttattaatgtgggggtttgaggggggtagggatggagggagggaattttgggagggttttaggttgatttgtgagatgtagttgagtggagatggagtgaaggttgttttgtttggaattttggagttgagtgttgtgggtggtggggatttagggttgtttttggttggggtgtatggttgtaagatttggaggtggtgtttttttttaaaaaatattggtgggggtagtttttttatggtttttgtttgggttgtttttggttttagtttggtttttttttttgtgggagggtgagaaagaaagagggaggagagaggtgggggaggtgggagttggagagagaggggttttgagttaattgttggtggatttagtagttttttggggagggtgggtgggagtgtgggggtgggtgtgttgtggtttgtttgggagaagtggttgttgatgatggtagaggtgtagttagttttgtgtgtgtagtttttttttttttgttttttttttttttgttgtttttttttttttttttttttttttttttttggtttgtttgtggtgtagagtagtggtggtagtggtggtggtggtagtagttatttgatgtttttggtgtttgagaagtagtagttattgtatggtggtggtggtggtggtggtgggggaggtggtgtggttatggattttgtgttgtttggtttgtttaaggttaagaagattaatgttggtatttggtgtttggagaagttgttttatttttatattgtgtttattgttatggttatttagagtttatttattaagtgtttgatgttgagtgagatttattagtttttgtagagttgttttttttttttttggggtttttattagggttggaagaattttgtgtgttataattttttgtttaatgagtgttttattaagttatttaagggttttgggtggtttggtaagggttattattggattattgatttggttagtgagtttatgtttgaggagggttttttttggtggtggttgtgtggtttttgaaggaaatgttaggtgtttaagtttatgtatagtatgatgaatgggtttggttttaattattttttggatatttatggtttttagggtttggttggtggttttttgtgtttgtttaatagtttggtgttggagggtggtttgggtatgatgaatggttatttgttgggtaatgtggatggtatggttttgtttagttatttggtgttttatttgttttttaatggtggttatttgtatatgggtggttgtggtggtgtggtggttggtgagtatttgtattatgatagtttggtgtttgtttttttgttgttgtttattggtgttggtggggttatggagttgtatgttgtttatttgggtttggtggtggtttggttgtttttggtgtttgtggtgtttaatagtggtgttttttatattaagtagtagtttttgtttttttgtaattttgtggttaattttttgtttggtagtttttttatgtattttttggagtagttgtatttgtattagaatagttataatgttttagttgagttgtaaggtgagtggggaggttgagggtgttttggtttttgggaagttgagtttgagtggtagtgggatttagttggggtgagtttttttatttttgtggttggaattttaaggttgaggggaggtattagttttttaaggtgttttttggttttatttttttttttttgaagagtgattattgtttttgattttagtttgggttaatttgtttttttttttgtttgaattttagttgttagttgttttaggtttgattaggtaggttggttttgagttagatgttttagattttagtgttttaagtttttttgtgttttttaagtttttttatagtttggaaagattttgggatggatttaaggtttttagtgttggttagatggttgtttttttttggtggtggtttttaggttgtttggagggttgtttttgtttggggttgggtggaatggaaggtgttaggtttaaagttgttgggttagtgtttagaggtttagttttggttttttaggggattagatttggtagatttatagttgagtttaggggtattttgtggtgattgaggtaggagggtgttgtggttaggttttggagggttagagttgtagattgggttatgggggttttttgttttttaggatttaagtttttaggtttttatatttttaatatttttgatattttaatattttgaatatgtagaagtatttgttaagggagatgtagtagttttgttttttgattttgttttaggttttttgtagtttgtaggtttagttttggaaaaagttggagtgagtttgttagggttagtttagggttagttgttagtagttttaggaggtaggagttaggtttggaggttttaggtagtttttttgtgggggattttttggttttggggtttgttttttggagaagtttttttttatttttgttgttggtttggtgttggttttgtattggttttttttttaattttgttggtagttgtagtttttgaggttgggggtggtggtggttgttttggtggtgatggttatgggtgttaggggttttttatttggttttttttattattttttttatggttttggaagttttgggtttttgtatggtgtttgaggttggataggtatgtagtaggtaggtaggtaggtaggtaggtaggttgtggtaagtgttttggagttttttttttgggtgtgtagttggaaggttgggatttggggaggagagtggggaggtggttgtgttttggagttaggttgataggttttgtgtgttttatgggagtattgtttttttgtttgaattttgagttattgtggttaatttttttgtttttttaattttttttgttgttttgttttgtaggtattttgtggtattatttgtagttgtttagtatgtgtgattgaaaggagtttgtttttttttttaatgttatggtgtttttttttatgtatttggttggtgggggtttttattattattagtaggttatttattaagatattaagttttgtgtgatgtgaggttgttgttgtaggtttttttggtgtaggtaggtgggttatagggattttggattggtataagaaattgttttttttttgaggtataattgttggtagaagaaaagggttttatttttttttaattggagtttttggtaaggagtttttaatgtaaagatatagtgttgtggttggtatttttttttttatttttttaaaattgttaagaaatgttagtggtgggtttgatttgattgtagttattggtaaataaaagtttttgattttgttgaatttgtttgagatggtgttgtgtaggggaaagtttttgtatttatataggaattttgttgaggttttttttttttttggttaatggtagaagtgggggaaaatttttagaagaaaagtaaatatgtgagattaattattattaaatatttttattttttggttgagtatttatttttttattttttattttttttttgaaagaatgttttggaatgtgtaagtttttttttagagttgttttttgtagggagtgggaagtgataagagtttagattttttttttgatttttttttttatttttgaagttttttttgtggattataggtggatttttgtgtgaataatttgtattttggaagttattgtttgtttttaaatagaaagttaaaggagttatgaagtaagtggttgtttgggtgtttgtttttgtttttttttatgttttttttttttttttgttttagttttttttgttatgttttgttttgaattttatttagatttttttagtgggtatttttttgttttttaatttttattgtaaattttttggtttgagaatgagttgaatatagtgtgatgtagggattaggatggtttggtgattgtgtggatttaggattgtggggatgtagaaaggttaaggtatttttaaaaattatagtaaggtttttgtttatttattttattttttttttttaataattaaaatattgtgtaggtttttttgtttattagtattaatggtgtaattttgttggtaatatttgttgtgtagaattttttttagatatttattgtaaatttgaaataaagattgatttgtgtaaaaataaatttttatatgttttatataaatata

SEQ ID NO: 589 - DNA, 6205 bp, Artificial Sequence
  chemically treated genomic DNA (Homo sapiens)
tatatttatataaaatatatggaaatttgtttttatatagattggtttttgttttaaatttataatggatatttaaaaaaaattttatatggtaaatattgttaataaagttatattattaatattgataaatggaggagtttatgtggtgttttgattattagggaaagaaagtagaataaataaataggagttttgttatagtttttaaaagtgttttaatttttttgtgtttttgtaattttgaatttgtgtggttattgggttgttttagtttttgtgttgtgttgtgtttggtttgtttttggattagaaagtttatagtagaggttgggagatagaaaaatatttattgaaaaagtttaaataaaatttaagataaaatataatagaagaggttgaagtgaaggaagaggaggaatatggaaggggatggaggtggatgtttggatggttgtttgttttgtggtttttttgattttttgtttaaagatggatagtggtttttgaaatgtaagttgtttgtataaagatttatttgtggtttatggaggagattttggaggtggggagggagattgggagggagatttgagtttttgttattttttgttttttgtaaaagatggttttaaagggagatttgtgtattttaagatatttttttaaaaaaaaaataaaaaataaaaagataaatatttaattaaaaaataaaagtatttgataatgattggttttatatgtttgttttttttttaaaaatttttttttatttttgttattggttggaaggaggggggattttagtagaatttttgtgtgggtgtgggggtttttttttgtatagtattgttttaggtgggtttaataggattaaaaatttttatttattgatggttgtagttagattagatttattattaatattttttaataattttgaaggagtgaggaaggaggtgttaattgtagtgttgtgtttttgtattggggattttttgttaaaaattttggttggggagaggtggaattttttttttttgttgatggttatattttgagaagaaagtagttttttgtgttggtttagggtttttgtgatttgtttgtttgtattaggagggtttgtggtggtagttttatattatgtaaggtttgatgttttggtaggtgatttgttggtggtagtaggagtttttgttggttgagtgtatggaagaggatgttatggtgttgaaagagaagataaattttttttggttatatatgttgggtgattgtgagtgatattgtgggatgtttgtaaggtgaggtgataggaggggttgggggagtagaagagttagttatggtggtttagagtttaggtagaggagtagtgtttttgtggggtgtatagggtttgttagtttggttttagagtatggttgtttttttgtttttttttttgagttttggttttttagttgtgtatttaaggaaaagattttagaatatttgttatggtttgtttgtttgtttgtttgtttgtttgttgtgtgtttgtttagttttggatattgtgtaggggtttagggtttttagagttataggggaagtggtgagggagattaagtggagggtttttaatgtttatggttgttattgttagggtagttattattatttttaattttagaggttatgattgttggtggggttgaaggagaggttagtgtagggttagtgttgggttagtagtaggggtgagaagaagtttttttagagaataggttttggagttggggagttttttgtagagaggttgtttaaggtttttaggtttggtttttgttttttggggttgttgatagttgattttggattggttttggtaagtttattttagttttttttagagttgggtttgtaggttgtggggggtttggggtagaattaggaggtgaggttgttgtattttttttggtagatgtttttgtatgtttggggtattggggtattaggggtgttgggggtgtggggatttgaaaatttggattttaaaaaataaggagtttttatggtttggtttgtagttttgattttttggggtttggttatggtatttttttgttttagttattataaaatgtttttggatttagttgtgggtttgttaggtttggttttttgaaaggttggggttgagtttttgagtgttggtttagtggttttgggtttaatattttttgttttgtttagttttaggtagaggtagttttttaggtagtttgagggttattattagggagggatagttatttggttagtgttgggagttttgggtttattttaggatttttttaagttgtgaggggatttaagggatataaaaggatttagggtattggggtttgggatatttggtttaggattagtttatttggttaggtttggagtagttggtagttggagtttgaatagaaagagaaatagattggtttaaattagggttaagagtggtagttattttttgaagggggagaggtggggttaagagatattttggggagttggtgtttttttttagttttggggttttgattatagaagtggaggggtttgttttagttgggttttgttgttatttagatttgattttttggggattagggtgtttttggtttttttatttattttgtagtttggttggggtgttgtggttgttttggtgtagatatggttgttttagggagtgtgtggagaggttgttggatagggggttggttgtggggttatagggggataggggttgttgtttgatataagaggtgttgttgttgagtgttgtggatgttgagggtggttaggttgttgttgagtttgagtagatggtgtgtggttttatgattttattggtgttggtgggtagtagtggggaggtgggtattgagttgttgtggtgtgggtatttgttggttgttgtgttgttgtagttgtttatgtatgagtggttgttgttggaaggtaggtggggtattgagtggttgggtagggttatgttgtttatgttgtttggtaagtggttgtttattatgtttaggttgttttttagtgttaggttgttgggtgggtatgagaggttgttggttgagttttggaagttgtaggtgtttgggaggtggttgaagttgagtttgtttattatgttgtatatgggtttgagtgtttggtattttttttggaagttgtgtggttgttgttgaaaggagttttttttgaatatgaatttgttggttgggttgatggtttagtagtggtttttgttgggttgtttaaggtttttgggtagtttgatgaagtatttgttgagtgagaggttgtggtgtatggagtttttttagttttggtaggagttttggaagaaggggaagtggttttgtaggaattggtagattttgtttagtgttaggtgtttggtgggtgaattttggatggttatgatgatgagtgtgatgtaggaatagggtggtttttttgggtgttggatgttggtgttggtttttttggttttggatgggttggatgatgtggggtttatggttgtgttgttttttttgttgttgttgttgttgttgttgtgtggtggttgttgttttttgggtgttgaagatattgggtggttgttgttgttgttgttgttgttgttgttgttttgtgttgtggatgggttgggaggaggaggaggaggaggaggaagaggatgatgggggggaggagggtgaaggggagggggttgtgtgtgtggggttggttgtatttttgttgttattggtggttattttttttgagtgagttgtggtgtgtttgtttttgtgtttttgtttgttttttttgaggagttgttggatttgttggtggttggtttagagtttttttttttttaatttttgttttttttatttttttttttttttttttttttttgtttttttataaggaaaggagttgagttgaggttgagggtagtttgggtgaaggttgtgaggaagttatttttgttggtattttttggggggaggtattatttttaggttttatggttgtgtgttttagttgggagtagttttgagtttttgttgtttgtggtgtttggttttgagattttgggtgaggtagtttttattttatttttgtttggttgtgttttgtgggttggtttaagatttttttggagttttttttttttgtttttgttttttttgggtttttgtgttggtgggtgtttaaagagtttttatttttgttgttttgtggttgttagtagaatttgttttgtttttattaatttggtgagtaagtgttaatgtgttttttgtttgtggtttagttttggtgtgtgttggattttgttttttttgtttgggtggtgtggtgggaaatgttttttgggttggggttttttttgatgtgtatagttttgtagtaaattgtaagtgtggtggttttttggttgtgattattgtaggtatagttggtttgattttggtttttgtggttggttggttaagtttttgtgagggattgtttatttattttttttgttttgggaagaattgtgttgtttttgggattttttggatttgtttagtagtttgtgagtgggtgggtagttgttggggtagagtgtaggtggaaaatgaaagtgtagtatgagttgtggttgttttgttttgggtgttgtgggtttgatgggggtgagtgagaatttgttggtttagaggtgatttagattgtataggtttttgaataagtggtgtgtttagttatttatttgtgtgtgtatatttttgtgtttttgtttatatattagtatatatatatatgttttgatgtatatgtaaatttggtaaattatgtaaatagatgtgtaaatatatttatgtgtgtgtgtatatttatatgtagagggtgtttaggtatgtgtgtatttattaatgtatttgttgatatggaagtttaaggtttataggagtttaagtttgtatttatttttatttatgtgtatatatgttatgtttggatttgaatttatatgtagtttagttgtttttttttatttttaatatatattgaaaatttgtttatttggttttgtggttttgtttttaaagtgtaggttttgattttttgagagatggtaaaggttttggtaggaagtttatagggtttaatgtaaataagttttgggggattttttaataataataatagagaattttgtgtgtgtagggtgggaggggggagttggtttaatgtttttgtgggtttggtttgttgttgttgtggggtttttgatattgtgtgttaggttaggtttttgagagtagatagtgtgggttgggagtgttggtaagggtggtttttgtgtatttggttgttagtttgtagggggtttgtatgtagatttgtttttgttattttagtgtttgggtgtgggttgggggtggtggagttatgaaaggtggtgttgagagtggagtgtaggatagtgtaggagttttggtgtattgtggtgtgtatagatttaggtgagtgttgtttttgtagtgattgttggttgggtgtggtttttttttttagggttttgagttgagaagaggggggtgaggggtgtttttgtgggttattgtgaagagtttagaggttaagttttagtgtgagttggggtgagaggtgtgtgttgggtttgtagtatggtttgtggtgtggtgtgtttaaagtttatttgttttttggttttttttggattttttgttttttgttaattatttgtttttatttttttggtttggatgtttttatttttggtgggagatgtttgttgtttttggggtgtttggtatgttggtgagaggagttggggggtttgttggtgtagtttgttgggtagttgttgttttttttgttagatttgtgtttgtgggagaagagagttgtttttttgtgttgtttttttgttggtttttttgggtttttgtgtgtagatagtttggtttgtttagggaaagaatgagtgtgggatgtgatttgtagtgtgtggttgtgtatttatgtaggtaaatgttttttggtagatttgttattattttatataattagtttagtttttgtgtatatagatatgttttgtattgtttatggttttaaatattttttttagtga

SEQ ID NO: 590 - DNA, 6181 bp, Artificial Sequence
  chemically treated genomic DNA (Homo sapiens)
ttaattgttattttatatagtaagtttgggttattagtattttttgttatagtagttgtggattggagttagtgaagtggggatgggaagtaagtggttttaatggatgtagagtagggttaagaggaagagtaaagttggtgaaaaaaggggaataaagtttaatttggatgatatattaggaagttattaggtaagaagggaataagaggatatgttggttatggtttgttttttatgtatgttatttattatattaagattgatggtttatagttaagtattgttttgttttttttttttatagggtttgttaatatagtatattgttaagggtgagaatgaggtaattaggtttttatttttattttaaattattttaatttatatttttttttttatagggttttaagttttattaaagagtatagtattttttatattagggaaggagtttggttggaggaggtggaagaaatagttttttaagagaagtagaaattataggttaggaagggatagagagattagaagatatatttgtgttaataaggataggagaaaaataagtataggagaaaggggtgttaggagaagatgggttgaagttggatatagggaatagttttaaatttatttttgttatttatggttttttgttattgtttttttggagaatgttataggtaaagttggaaagtgattaaaaaaaaaaaaataaagatatgtatttttattgggtgtggtggtttatatttgtgatattagtattttgggaggttgaggtgggtggattatttgaagttaggagtttgagattagtttggttaatatggtgaaattttgtttttattaaaaatataaaaattagttgggtgtggtggtgggtatttgtaattttagtttaggaggttgaggtaggagaattgtttgaatttaggaggtggaggttgtagtgagttgagattgagttattgtattttagtttaggtgataagagtaaaattttgttttaaaaaaaaaaaaatatgtattttttttagtttattttggaattatttttagatttattttagagaattaaaatatagatagataattattttgattaataatattaatatttgaagtgtgttagatgttgtgtttaatttttatatttttttttagtgtttattttagaagagttttgttattttgttagttaattttgagaaggaattttattattttatttttagttagtttttgggtatagagagaatgaggaaaggattttattatagttttatatttttaaaatatataaatatatattaggatgttttttatttgtagagatgatgttttgtgggagtttatagtatttagagttagggaaggattaatgggtgtgggtgtttggaagaaaagaaagatgtatgatttttgaaatttatatagggagaaaggagattgtttattggaagtttaggtgattgggtgtaggggaaaagttgtgtgtggttttgtagtttaattgggaggaggggataggggtgggaagtggtaggaaatggtgaaagttttaggaatgtttttagtagggaaggttgggtaaatggggttaggaggaatgtttagataagaattttggttagggggaggggaagagatagagaagtagtgattgaattgttttttaaaaaaaaaaaaattaaataataaaaagagtattattatttatttttattttaaattattgtttttttggtagtagaaaatttttgtttatgttatatttatatgttatatattaataaatttatggttttatttatttatgtttaggaaggtttagagttatttttgggatgaggttggttttgggaagggaaagttaggaagtgaggttgggagtttgagggtaagttttttttttttttttgtgttaaattttatgtttagtttttttaaatagttttatttttggaggaggttaagaaagaggaaaatggggatgggtgtagtggttaatgtttgtaattttaatatttaaggaggttgataagggtggagtatttgaggttaggagtttgaggttagtttagttaatatggggaaattttgtttttattaaaaatataaaaattagttgggtgtggtggtgggtgtttgtaattttagttatttaggaggttgaggtaggagaattatttgaatttaggaggtggaggttgtagtgagttgagattgtattattgtattttagtttggatgataagagtgaaattttgttttaaaaaaaaaaaaaaaaaaaaaaaagatagaaaggaaaatggaaaatggttgtttttaattttattttttatagttagagatgggaattttgattttttatttgggggagtatgagagtgtttggaaaattgattttaaggtttaaaaagagaaaggataggaaaatataagtaggtggagttttagggattgatgataaggttttttagttgatgatttaggttttataaagataaagtttttaagggggtgtggttttttaaggatgtgaattttagatttttgggtggggaggttttttggatagttagatgtggattatggagggggtgtggttttggaggggtggagttttaataaatttgaattgttttttgaagagtagggttttgtttttttgggagataggttttttgataggagttagttgaggattgttgttaggaggtggagttttggagaatggaaggagtaatgaagggttttttgtagtagggtttggaatgtgttggggggtggggatttttagaaaaattgggtgatagggtggggttggagataaaaaataaaaattaagttggggtttgggggagttttttgaagttgggaggtgggatttttggggagaggggttttaggggtgggatttataaatgaagattggaagtggggttttgggagaggggttttggggtgaaagagtgagttatttaaggagaaaaaagttaagatttattagggttttatggagtttttgtattgtattgtgggttgatttggtgttggattatgttattgttagtttaggttattgttttaattttttttttgggttttgtttttttggagaaattttattatatttatttttggttttattaatttttgattttttattttagggttttttttttatgttttttatttttttgagttagttaatggtagtgtgagattgtgtataaaggtagtggtggttaataagatgtttatttttgatttatgtttgtttttgagaagtgtgagaattgttttttaataaggatttgaagagaagtaaatttaagttaattggaggtttgaaagtagaggtgttttgttttgagttaaatggattaataggaagtgtgggtggtgtgtttgaaagtgaggttaaagtgggtgggagtgtgtgttgttgggagttgtttggaggttggtggtgtggggttgaaggttagtaaattgagtgattatgttgtataaataaatttattatttggataaatatgatgatgaggagtttgagtattggttagtgttggtgtgggagtaatagtgagggttgtgagttttggttgttgagggtataaggaattagtaataggaattgaggtgatagaattggtgtatgtgtatgaggtgtgaatgggtaatggtgtgatattgtggaaggtgtaaggtgtatgtgtggaggtgggaggtgtttgtaaaataaagtggttgtgaatttggagttgttttttagtagagaggagagaggggtgggtgtggttagggtattgattatttttatttatgaggttttttggattattttttgaattttattgggtaaatttaatttgttttgtagagattgttttatagtaattttgttgaatttagtgggagaatgtagtaaaagtggagttggaagttttttggtgtttttaataggagagtagtgttgagagagttgaatattgtttattaatttgtgaaaaagataaggggtgtggttgtttggtttgtgtaaggaaggggattgtttgggattgtaatggaataaaattggttaggagtattgagaaaatatttaatatgggtttaatagatgttttttaaatattaaagggaatagttatggaatatttaataggttttaggtgttttgttaaagtgtaaggataatatatggtttttgttgtttataaatttaaaaatttgtgggtggtattgatagatattagaaaggtgatatatgttatgtaaggagttattatagggtgtgatgggagtatataagatttgttaaggagagggaattggtgatttgaaggttgtggttttttagttgtgagtgggggttgaggtggggttagaaagttagttttttatttttgttaattttaggatgtttttttattttatgttttgagaatgttttttgttttgttattgttttggaggttgattttttatttttggttggtttttttttttgggtttggtttgggggtgggggagtgttttaagggttaatttagtgtgatgttttttttattattattgaaaatgaaattagtagtaaattatgtgtgtttttatttatatgttggagataaaaatatagggatagaaagaggggaataatagatattggggtttgtttgagggaggagggtgggaggaggtagaggtttaggaaaaaaaaaaattgttgggtattatgtttagtatttgggtgatgaaataatttgtatattgaatttttgagttaggattttatttatataataaatttgtatatgtatttttgaatatgaaatttaaaatattgagaggaaaaatggaagagggaatgttggggaaagttttttagagggtagagtttgagatgagattttaagaaaaaggtatgtgggaggaagtattttttgattgaaattgtttagaagatattggatagttatttgttaaggatggtgatgatggaattttggtattggatgtggtatttgggtttgataaattttaagtgtataatttagattgggaataagggaagatataggattttataaatgttggtattatgttaatttgtattaattgtaataattaagattattttttggtttgtattttgtttttttagttggagaatataaaatgaaaatttgttttttttgtgtttttttatttagtttagtttagggttttgggttttttagagaatttgatgtgtattgataaatatataattatttttatgttaagatggttttagatttttttttaattaatttttttttttttagttgtttttttttatatttgaattaaattaatttaaaattgtatgtgtttataagagatttgtggagttgggaaggaattattattttattttttggaagatgaaatttttggtagtggtattttggtttaagaggggttttttggtgtatgtattgaagttaaattttgtgttagggtggtgttagaatgtgagttatttttattatatttggattagaatttttttttttaggagaatggtggggaattattgttattagtatagagggagaatttagtatatttttattgagtatgatgaagattatgtggattagtttgatttatattagggtaataatttttttgttatgaagggagatttatttttggttagaaaagtatggaatttatttagaaagttttaaggtatatttttttagagttaggaaaataagatttaggatagatttaattttttttttaagagataaggttttgttttgttgtttagattggagtgtagtggttatttataggtataattattgtgtattgtagttttttttttttttttattttttttttttttttttgagatggaattttattttattgtttagattttagtttattgtaatttttgttttttggatttaagggatttttttttgttttaattttttaaatagttgggattataggtgtatgttattatatttggttaatttttgtatttttagtagagatggggttttatgttgttggttaggttggtttttaatttttgattttaagtgatttatttattttagttttttaaagtgttgggattataggtatgagttattgtttttgg

SEQ ID NO: 591 - DNA, 6181 bp, Artificial Sequence
  chemically treated genomic DNA (Homo sapiens)
ttaggggtggtggtttatgtttgtaattttagtattttgggaggttgaggtgggtggattatttgaggttaggagttggagattagtttgattaataatgtgaaattttgtttttattaaaaatataaaaattagttgggtgtggtggtatgtatttgtaattttagttatttgggaggttgaggtaggagagaattttttgaatttaggaggtggaggttgtagtgagttgagatttgggtgatagagtgagattttgttttaaaaaaagagaaaaaaaataagaaaaaagaaagggttgtaatgtataatggttgtgtttgtgaatagttattgtattttagtttgggtaataaagtaagattttgttttttaaaaaaaaaattaaatttattttgaattttatttttttaattttggagggatgtattttgagattttttgggtaaattttgtgtttttttaattaaggataagtttttttttatagtaaaaaaattattattttgatgtgaattaaattaatttatatagtttttgttatgtttaatgaaaatgtattaagttttttttttgtgttagtaatagtgattttttattatttttttaaaagaaaaaattttagtttaaatataatgaaaatagtttatattttaatattattttggtatgaaatttggttttaatatatatattaaaaaattttttttaaattaaagtgttattgttaagagttttattttttaggggatgaaatggtgatttttttttagttttataaattttttataagtatatatagttttaagttagtttagtttagatgtagaggaaaatagttgaggaaaagaaagttaattaaaggagggtttggagttgttttggtataaagatgattatgtatttgttaatgtatattgagttttttggaagatttaaagttttgaattaggttgggtgaagagatataagaaaagtaagtttttattttatgttttttaattgaggagataagatataaattaggaagtggttttaattattataattaatatagattagtataatgttaatatttgtggaattttgtgtttttttttatttttaatttagattatgtatttaaaatttattaagtttgaatgttatatttagtgttaggattttattattattatttttggtagatggttatttagtgttttttaaataattttagttaagaggtgtttttttttatatattttttttttagagttttattttaggttttgttttttaggaagttttttttaatatttttttttttgtttttttttttagtattttaagttttatgtttaagggtatatgtgtaggtttgttatataggtaaaattttgatttgggggtttggtgtataggttattttattatttaggtattaagtatagtatttgatagttttttttttttttgaatttttatttttttttattttttttttttaagtaggttttaatgtttgttgtttttttttttttgtttttgtgtttttatttttgatatataaatgaaaatatgtgtagtttattattggttttgtttttaatggtggtgaaagagatattatgttgaattggtttttaggatatttttttgtttttaaattaagtttagggaagaagattgattgaaagtaagaggttagtttttaaggtggtggtggggtggggggtgtttttgaagtgtgggatgggggagtgttttggagttagtaaaagtaggggattgattttttagttttattttaatttttgtttatagttaggaagttgtagtttttgggttgttagttttttttttttagtaagttttgtgtgtttttattatattttgtaatggttttttgtatagtgtgtgttatttttttggtgtttgttggtattatttatagatttttaaatttgtgaatagtagagattatgtgttatttttgtattttagtagaatatttgaaatttgttaagtattttgtaattgttttttttgatatttaaagggtatttattagatttatattaagtatttttttaatgtttttagttagttttattttattgtagttttaagtgatttttttttttatataagttagataattatgttttttgttttttttatgagttaataagtaatatttaatttttttagtgttatttttttgttagggatgttaggaaatttttagttttgtttttgttatgtttttttattggatttgataagattattgtgaaatagtttttataaggtaagttaagtttgtttgataaagtttagagaatgatttagaaagttttatgggtgagggtggttagtattttaattatgtttattttttttttttttttattgagaggtgattttaaatttgtaattattttgttttatgagtgttttttatttttgtgtatgtgttttatgttttttataatattatattattgtttgtttgtattttgtatgtatgtgttaattttattgttttagtttttgttattaattttttgtgtttttagtggttaaagtttatgatttttgttattgtttttgtgttagtattaattgatatttaaattttttgttgttgtatttgtttgaatagtaaatttgtttgtgtgatatgattgtttggtttgttagtttttagttttgtgttgttaatttttaagtaatttttaatagtatgtgtttttatttattttggttttgtttttaaatatgttgtttgtattttttattggtttgtttggtttgaggtgggatatttttatttttaagtttttgattggtttagatttatttttttttggatttttattggagggtagtttttatgttttttaagaatgagtgtgggttaaaagtaggtgttttattggttattattgtttttgtgtgtgattttgtgttgttattggttaatttgggaaagtgggaagtgtgaaggagggattttgaggtagagggttaggggttagtgaggttggaagtgagtgtaataaagtttttttagggaggtagggtttggggagaaagttggagtggtaatttaagttggtagtggtgtgatttggtattaaattggtttgtggtgtggtgtggagattttatgaggttttggtgagttttgatttttttttttttaggtgatttatttttttattttggaattttttttttgggattttatttttggtttttatttataagttttgtttttgagatttttttttttggaagttttattttttaattttagggggtttttttgaattttgatttgatttttattttttgtttttgattttattttgttgtttagtttttttggaagtttttattttttgatatgttttaagttttattatgagaaattttttgttattttttttattttttgaaattttgttttttagtaatgatttttggttaatttttgttaaaaggtttattttttaaaagggtaaaattttgttttttaaagaatgatttgaatttgttgaagttttgtttttttgaagttatgttttttttgtaatttatgtttgattgtttagaaagtttttttgtttagaagtttgaagtttgtgtttttaggggattatgtttttttaggagttttatttttgtgggatttgggttattagttgaaaagttttgttgttaatttttgaaattttatttgtttatatttttttgttttttttttttttgggttttgggattagttttttgagtatttttgtgtttttttaggtgggaagttaaagtttttatttttggttgtaaggagtgagattaaaggtagttgttttttgtttttttttttattttttttttttttttttttttttttaagatggagttttgtttttattgtttaggttggagtgtaatggtgtgattttggtttattgtaatttttgttttttgagtttaagtgatttttttgttttagttttttgagtagttgggattataggtgtttattattatgtttggttaatttttgtatttttagtagagatggggtttttttatgttggttaggttagttttgaatttttgattttaggtgttttatttttattagtttttttaagtgttaggattataggtgttagttattgtgtttgtttttgttttttttttttttaattttttttaagggtagaattatttgaaagggttgaatgtggggtttggtatgagagggagagagagatttgtttttagatttttagttttattttttggttttttttttttaggattaattttattttagaagtagttttaggtttttttagatataagtggataagattatggatttgttggtgtgtggtatgtgggtgtgatatgagtaaaagttttttattattagaagaatggtagtttggagtgggggtagataatagtgttttttttgttgtttgatttttttttttttaagggatagtttagttgttatttttttgtttttttttttttttttaattagagtttttgtttgggtattttttttggttttgtttgtttagttttttttgttggaaatatttttgaggtttttgttattttttgttattttttgtttttgttttttttttttagttgggttgtgaagttatatatagttttttttttatatttaattatttggatttttagtaggtaattttttttttttttatgtaaattttaagagttatatgtttttttttttttttgaatgtttatatttgttggtttttttttggttttggatattgtaggtttttatagaatattatttttatagatgagggatattttagtgtgtgtttgtgtgttttgggggtgtgaggttatggtggaattttttttttattttttttatgtttgagagttggttggaaatgaagtgataaaatttttttttaggattggttggtagagtgataaagtttttttggaatgagtattaaggggagatgtaagagttaagtatagtatttaatatattttaagtgttaatgttgttaattaggataattatttatttatattttaattttttgaagtaaatttaagggtaattttaaggtgagttggggggaatatgtatttttttttttttgagatggagttttgtttttgttatttaggttggagtgtaatggtttgattttggtttattgtaatttttgttttttgggtttgagtgatttttttgttttagttttttgagttgggattataggtgtttgttattatgtttagttaatttttgtatttttagtagagatagggttttattatgttgattaggttggttttgaatttttgattttaggtgatttatttgttttagttttttaaagtgttggtattataggtgtgagttattgtgtttggtaggaatatgtatttttgtttttttttttttggttattttttagttttgtttgtggtattttttggaagagtagtggtaggaagttgtgggtggtaggaatgggtttgggattgttttttgtgtttagttttaatttatttttttttgatattttttttttttgtatttattttttttttgtttttattgatgtagatgtgttttttgatttttttgtttttttttggtttgtagtttttattttttttggagaattgttttttttattttttttagttaggttttttttttggtgtgaaggatgttgtgttttttggtggggtttagggttttgtaagaggagggatgtgaattggggtggtttggagtgggagtggggatttgattgttttatttttatttttgatagtgtgttgtgttaataagttttgtggaaaggggagataggatagtgtttggttatgagttattggttttggtgtggtagatggtatatgtagagaataagttgtgattagtatgtttttttgttttttttttgtttggtagttttttgatgtattatttaggttgaattttatttttttttttttattagttttgtttttttttttggttttgttttgtatttattgggattatttattttttatttttattttgttagttttagtttatagttgttgtagtagaggatgttaatggtttaggtttattgtatggggtagtggttgg

SEQ ID NO: 592 - DNA, 6181 bp, Artificial Sequence; identical to SEQ ID NO: 590
  chemically treated genomic DNA (Homo sapiens)

SEQ ID NO: 593 - DNA, 6181 bp, Artificial Sequence; identical to SEQ ID NO: 591
  chemically treated genomic DNA (Homo sapiens)

SEQ ID NO: 594 - DNA, 6000 bp, Artificial Sequence
  chemically treated genomic DNA (Homo sapiens)
ttaaataagtaatgtttttgtttttgatttttgtgttattttttaataaggaagggaagtattatgtaggggggtggggggttgggggaggtattttagttttagaatattttaattttttttaaatatttaatttttattggttttattgtttattttttaaggtttgaggtgggaaaggttgtaattttagggaaaagagatatttttttaaatttaaatttttgatggtttttagaggtaggaaaatatataatgttaagtagagaaatgagtaagaaagagggatgggagtagaaaattttatttagttagagagagatgtaatttggaggttttggattataattttattatgagtaaataagaaaagttggttttgtggtaagtagggttttaaaagtttttttttttgggttataggaaatagaagaatagtaggaagtgggaagtagaggtatataggttattttttttttgaattttttaatttaagtgtaggaagagtagttttttttttttaattttaatttaagagttgttttatattttttttatttgtttatttgttatgaggggtgattagtttgggtgggtttttgaggtattgtttgaagtgtaatttgaaggtttggttaatggtgttgatgatattttgggtaagttttttgggatattttagaatgtggtaggttgagggtatagtagaggttgttagtgagttgagtttattgggaggaggtatagataggggtttttatttttttttgtaggaatttttattgagatttatttagagtgggtatagatgattaaaggttttatttatttttttaaatagttagatttatttagtgttttttattatgttttatttttttgatttatagggtttttggtaatataggtgatatatttggttgtgttttggggaggaaggttaaaaaattttatagttttattttatttttgatttttaaaatttagttttttttagatatttttataattttagtatttttatttttttaattaatgtttttttaatttttagttttttgttttttttttattgtttttgttttgttttttaatttattggatttttgttggatgtaaatgagatagattgtatgtggtggttggtgatgatttgagaattagggtaggggatgaagaaggaagggaatgttatgtgttaggtagttttagggtttagaattttggtgttttagttttattttttgggttttttattttatatttttattttttttttttttattggttttttgtttttaagttttttttttagattttggttttttaattagatttttttttagtatttttattagtgtttttggtttgtttgtttatttttattaatttgtttgtagtttgtggttatgaggttgaggttgttggtggagatggtgagagtgattggtattttagtaaattttaggttatttttttttaggatagagttgagtgggtggttatagggttaaggtagggtttagggttttagaaggtgagggtttttagtataggtaaattatatttttgttttttggttttttttttatatgttttatatttgtttttttattgtttttttatattttttagtagtatttttatttttaaggattttaagtattttttttttttttgttgtttttttagtatttggtatagttttatatattagattgatggtttttttggggaaagaggggtatttagatttagtgtttgtttgtttgttttttatttaattggggttgttatagggttgggggaggggaaagttaggttagatttttagggtattttaggttttttgttatggtggattgaattaagggtttttaatatttgatgatattgagaggttattttttggttgattgggttagggttttaatgggtatagttttatttttttttagttattaaatgttttattttttttttaaaggtagtagtaattttttatttattttttttttttattttagttttatttgttagttgtttttgttattttttttataatttttaaggttggataggtaaggaggatttgggttaaaggggtttttttttagtaagaggtggaattattattttagtttttttttaattttttttattatgtaaagattagtttttagtagtagtatttaagtgatttattttttttttttgttttttatggttttattaattttaggatttttataatttattttttttttattaatttggtgatttgagtttgggtgttgaagtttagggtatgtattgattggaggatttttatataatttatgtattaaggggagggagaagaggatagtaggttagtggtttttttattttagtttttttataaagggttttaggattttatttatatggtttttaagggaagtaaagaggaagaagttttgtttattttttgtggttatattttataattaaggtgaaagataatagggaatgaggagaaaaagaaaaggtaggttagaaggattttatatattggggagagagtttggaggggattgataggtattggttgggatggagtgataattttagaaagtgggaggagaatggaggaaagattaagaagttatttattttaatatttattaagagtttttgttatgttgggtattgtgttaagtatgttagggtgggggtgggggagtgaaaagaaggaagggggtttaggtaaagttggaagggaaggggttatagaattggggaagggatgagaaaggtttaggaaataggatattgaaatggggttgttggggaatagtaggaaaaaagagattttggttaagttggagtgagtattagaattggagggggtttgtgggggaatggagaggaggatgtttatttatttgaattaagtaggaaattttgggttttatgattttgttgttgggatgtagttagttttgtgtgggtttattgataaagtttttgtggtgggtttattttttgtttttaagttggtttttttttatttgagttttgtgtttgttgtttttatttagtttgtttatgttttggaggaggggtagggggtttgagtttggtatggttgtttttatgattttttttttattattagttgttttttttggtttttttttagattttgggtgttttttagttgggttggttagttttaggttgtttatttgggggaagaaggagtatagggtagtgggattattgtttttaggtagaggaggtaggatgggttttagggatgaagttgatggggaaggtagtttttttgggggggtggatttagaagtttttttttttagtgatgatagagatttattttggagtggattgtatttgggtttggggggtaggagatttatagttgaggtgaaagaggggttgttgtttagtttggtttttttgttagtttgggtaagggggttaggtagggggtatttttaggtttttagtttggttggatttttgtggtttaggagttatagaagttttggggagggagagggataagtggtttttgttttttagtttagatttagatagttttaggttttatttttgtttaatgtggagttttttttttggttgagaagagaataggttggatttagtgtttttggtttttttttaggggtggggagttaaggggagagattaattgtgaggatagtgttgatttataggtttagaggggttgagtttttattttgttttaattttgaattggagtagggggtagggttatttaagttttttttttttgttttatataaataattagtaatttggggagaagtaaagtgggggtgggagggaaggatggaagagtgggatggaaaggaaggagataggaggtttgggttatttaaaattggatatatgtaggttaaagggggtaggaagttaggtaggagtataggggaatgagggaggaaatagaggtagttgggggtggaaaagggaggagattttagagtttagtatttttttttttgttttggttggatatttgaatttttttattttttttatgtttgaaagttggttggttttagtttaggttatttttaattgttattttatatagtaagtttgggttattagtattttttgttatagtagttgtggattggagttagtgaagtggggatgggaagtaagtggttttaatggatgtagagtagggttaagaggaagagtaaagttggtgaaaaaaggggaataaagtttaatttggatgatatattaggaagttattaggtaagaagggaataagaggatatgttggttatggtttgttttttatgtatgttatttattatattaagattgatggtttatagttaagtattgttttgttttttttttttatagggtttgttaatatagtatattgttaagggtgagaatgaggtaattaggtttttatttttattttaaattattttaatttatatttttttttttatagggttttaagttttattaaagagtatagtattttttatattagggaaggagtttggttggaggaggtggaagaaatagttttttaagagaagtagaaattataggttaggaagggatagagagattagaagatatatttgtgttaataaggataggagaaaaataagtataggagaaaggggtgttaggagaagatgggttgaagttggatatagggaatagttttaaatttatttttgttatttatggttttttgttattgtttttttggagaatgttataggtaaagttggaaagtgattaaaaaaaaaaaaataaagatatgtatttttattgggtgtggtggtttatatttgtgatattagtattttgggaggttgaggtgggtggattatttgaagttaggagtttgagattagtttggttaatatggtgaaattttgtttttattaaaaatataaaaattagttgggtgtggtggtgggtatttgtaattttagtttaggaggttgaggtaggagaattgtttgaatttaggaggtggaggttgtagtgagttgagattgagttattgtattttagtttaggtgataagagtaaaattttgttttaaaaaaaaaaaaatatgtattttttttagtttattttggaattatttttagatttattttagagaattaaaatatagatagataattattttgattaataatattaatatttgaagtgtgttagatgttgtgtttaatttttatatttttttttagtgtttattttagaagagttttgttattttgttagttaattttgagaaggaattttattattttatttttagttagtttttgggtatagagagaatgaggaaaggattttattatagttttatatttttaaaatatataaatatatattaggatgttttttatttgtagagatgatgttttgtgggagtttatagtatttagagttagggaaggattaatgggtgtgggtgtttggaagaaaagaaagatgtatgatttttgaaatttatatagggagaaaggagattgtttattggaagtttaggtgattgggtgtaggggaaaagttgtgtgtggttttgtagtttaattgggaggaggggataggggtgggaagtggtaggaaatggtgaaagttttaggaatgtttttagtagggaaggttgggtaaatggggttaggaggaatgtttagataagaattttggttagggggaggggaagagatagagaagtagtgattgaattgttttttaaaaaaaaaaaaattaaataataaaaagagtattattatttatttttattttaaattattgtttttttggtagtagaaaatttttgtttatgttatatttatatgttatatattaataaatttatggttttatttatttatgtttaggaaggtttagagttatttttgggatgaggttggttttgggaag

SEQ ID NO: 595 - DNA, 6000 bp, Artificial Sequence
  chemically treated genomic DNA (Homo sapiens)
ttttttaggattaattttattttagaagtagttttaggtttttttagatataagtggataagattatggatttgttggtgtgtggtatgtgggtgtgatatgagtaaaagttttttattattagaagaatggtagtttggagtgggggtagataatagtgttttttttgttgtttgatttttttttttttaagggatagtttagttgttatttttttgtttttttttttttttttaattagagtttttgtttgggtattttttttggttttgtttgtttagttttttttgttggaaatatttttgaggtttttgttattttttgttattttttgtttttgttttttttttttagttgggttgtgaagttatatatagttttttttttatatttaattatttggatttttagtaggtaattttttttttttttatgtaaattttaagagttatatgtttttttttttttttgaatgtttatatttgttggtttttttttggttttggatattgtaggtttttatagaatattatttttatagatgagggatattttagtgtgtgtttgtgtgttttgggggtgtgaggttatggtggaattttttttttattttttttatgtttgagagttggttggaaatgaagtgataaaatttttttttaggattggttggtagagtgataaagtttttttggaatgagtattaaggggagatgtaagagttaagtatagtatttaatatattttaagtgttaatgttgttaattaggataattatttatttatattttaattttttgaagtaaatttaagggtaattttaaggtgagttggggggaatatgtatttttttttttttgagatggagttttgtttttgttatttaggttggagtgtaatggtttgattttggtttattgtaatttttgttttttgggtttgagtgatttttttgttttagttttttgagttgggattataggtgtttgttattatgtttagttaatttttgtatttttagtagagatagggttttattatgttgattaggttggttttgaatttttgattttaggtgatttatttgttttagttttttaaagtgttggtattataggtgtgagttattgtgtttggtaggaatatgtatttttgtttttttttttttggttattttttagttttgtttgtggtattttttggaagagtagtggtaggaagttgtgggtggtaggaatgggtttgggattgttttttgtgtttagttttaatttatttttttttgatattttttttttttgtatttattttttttttgtttttattgatgtagatgtgttttttgatttttttgtttttttttggtttgtagtttttattttttttggagaattgttttttttattttttttagttaggttttttttttggtgtgaaggatgttgtgttttttggtggggtttagggttttgtaagaggagggatgtgaattggggtggtttggagtgggagtggggatttgattgttttatttttatttttgatagtgtgttgtgttaataagttttgtggaaaggggagataggatagtgtttggttatgagttattggttttggtgtggtagatggtatatgtagagaataagttgtgattagtatgtttttttgttttttttttgtttggtagttttttgatgtattatttaggttgaattttatttttttttttttattagttttgtttttttttttggttttgttttgtatttattgggattatttattttttatttttattttgttagttttagtttatagttgttgtagtagaggatgttaatggtttaggtttattgtatggggtagtggttgggggtggtttgggttggggttagttagtttttgggtatagagagggtgggggaatttgagtgtttaattaggataggaagggaaatgttgagttttgagatttttttttttttttatttttagttgtttttgtttttttttttatttttttgtatttttgtttggttttttgttttttttggtttgtgtgtgtttggttttgagtgatttagattttttattttttttttttttgttttatttttttattttttttttttatttttattttatttttttttagattattagttgtttgtatagggtaggggagaggggtttggatagttttattttttgttttagtttgaggttggggtggggtgggggtttagtttttttgagtttgtgagttagtattgtttttatgattggtttttttttttagttttttgtttttggggaggagttagaagtgttgggtttagtttgttttttttttagttagagaagaggttttatgttgggtggggatggggtttgaaattgtttgggtttgagttggggagtggaagttatttgtttttttttttttttaggatttttgtgatttttgggttatagaggtttaattaggttaagggtttggggatattttttgtttggtttttttgtttaaattggtaggggggttaggttgggtagtagttttttttttattttaattatggattttttgttttttaagtttaagtataatttattttggaatgagtttttgttattgttggaggaaggggtttttgggtttatttttttggaggagttgttttttttattagttttatttttggggtttattttgttttttttgtttggggatgatagttttattattttgtgttttttttttttttggatgagtaatttgaggttggttaatttggttggggggtgtttagggtttaagggggagttaggaagggtagttgatgatggggaggggattgtaggggtagttatgttagatttaggttttttattttttttttaggatatgaataagttgagtggaggtggtgggtgtaggatttgggtggaagggggttagtttgggggtgaggagtggatttgttatgggagttttgttaataagtttatgtggggttggttgtattttaatgataaagttatgggatttggggttttttatttggtttgggtgagtgaatatttttttttttatttttttgtagattttttttagttttaatgtttattttagtttggttggaatttttttttttttgttgttttttaataattttgttttagtgttttattttttaaattttttttattttttttttgattttgtagtttttttttttttagttttgtttgggtttttttttttttttttatttttttatttttattttggtatgtttagtataatgtttagtatggtagaagtttttaataagtgttggaatgaatgattttttgattttttttttattttttttttgttttttggagttgttattttattttagttaatgtttgttggttttttttaaattttttttttagtgtgtgaggtttttttagtttgttttttttttttttttttattttttgttgttttttattttggttgtgggatgtagttatgggaagtgggtagaatttttttttttttattttttttagggattatatgggtaaagttttagggttttttgtgaaggggttggggtgggggagttgttgatttgttgtttttttttttttttttttagtatatgggttgtgtggaggttttttagttaatgtgtgttttggattttaatatttggatttaggttattaggttagtggggagggagtggattgtgggagttttgggattagtgaggttatgggaaatagaggaggggagtgggttatttgggtgttgttgttgggggttgatttttgtgtagtaaaggggattgagagaaagttgaggtagtgattttgttttttattgaaaggaggtttttttggtttggattttttttatttatttagttttgggagttgtggggaaggtggtagaagtagttggtaggtggagttggagtagaaaaggggggtagatggaaggttgttgttgtttttgggaagggaatgggatatttggtagttggaagggggtggggttatatttattgaggttttaatttaattagttaggaagtggttttttagtgttattaaatattaaaggtttttaatttaatttattatgataaagagtttggagtgttttgggagtttggtttggttttttttttttttagttttgtggtagttttagttgagtgggaggtaggtaggtaggtgttgggtttgagtatttttttttttttagggaggttattagtttggtgtgtgaggttgtgttgggtgttaagggggtgataaggaggagaaaggtatttggggtttttggggatagggatgttgttgggaaatgtggaggggtagtggggaggtaagtgtggggtatgtggggagagggttaggaggtaaaagtgtggtttgtttgtgttgggaatttttattttttgagattttgggttttattttagttttgtagttgtttgtttagttttattttggggaggagtaatttgaaatttgttggaatgttaattatttttattgtttttattagtagttttaattttatggttgtagattgtaaataggttggtgaaggtgggtagatggattagaaatattgatgggggtgttaaggggagatttagttaggaggttaaaatttaggaagagggtttgagagtaggagattagtagggaaggaggaaatgaggatatgggataaggaatttagagaatgagattggggtattagggttttgggttttgaggttgtttgatatatggtatttttttttttttttattttttgttttaatttttagattattgttaattattatatgtaatttattttatttgtatttggtggggatttggtgagttggggaatagagtaaaggtggtgggagaagagtaaggggttagggattgggaagatattgattagagaagtgggggtgttaggattgtggggatatttgaaaaggattgggttttaggggttaggagtaaagtagaattgtaaaattttttgatttttttttttaggatatagttgagtatgttgtttatgttgttaaagattttgtgaattagagaggtgaggtatggtggggagtattgggtgggtttggttgtttgaggaggtgagtaggatttttggttatttgtatttattttaagtagattttagtgggggtttttgtagaggaagatgagggtttttgtttgtgtttttttttagtgggtttagtttattgatagtttttgttgtgtttttagtttgttatattttggagtgttttgaagggtttgtttaggatgttattagtattattggttaggtttttgagttgtgttttaaataatattttaggaatttatttaaattggttattttttatgataggtgagtaggtggggagagtgtggagtagtttttggattaggattaggaaaggagggttgttttttttatatttgagttgagaggtttagggagggaataatttgtgtgtttttgttttttattttttgttatttttttgttttttgtggtttaggaggaaagatttttgaggttttgtttgttgtaggattagttttttttgtttgtttatggtggagttgtagtttggggtttttaagttatatttttttttggttaggtgggattttttatttttattttttttttttgtttatttttttgtttggtattatgtgtttttttgtttttagaagttattaagaatttgggtttgggaggatattttttttttttgagattataattttttttattttaggttttgagggataagtagtggagttagtagggattgaatatttaggagaggttaaaatattttggagttggagtgttttttttggttttttatttttttatatggtgttttttttttttgttgggagatagtatagagattaagagtaagagtattatttatttga

SEQ ID NO: 596 - DNA, 6200 bp, Artificial Sequence
  chemically treated genomic DNA (Homo sapiens)
ttttttgtttgtttattgtttttttatttttgtttatttttaggtttggggtatttatgttaagatgttgggtgttttattgttattttttattattttttggttaggggtagttaaggagagaataggtaggttgaatgtgaatagggatgatttttttatttttaaatttttttatagatggttatttttttagtttagtttttttttttttgtgttagttatttgtgggttggatattggagtggtttatgaggataagtgtagatggggtgataggttttttttggaggatttgttggggtagggtgtttaggttagatggagtttgagaaggagtagggggtagttttgagggtgtttttgtttgatgattggggtggaatgtgttgtaagtagtattttagttttttgttaaagagttatttatttatttatttttaatttaaagagaaatattgatgtgatagttttgttttttagtttttgtttatagttttatattaaaatgggttattaataaataatttagggttgggtgtagtggtttttgtagttaggagtttaagattagtttggttaatatggtgaaatgttatttttattaaaaatataaaaaattagttgggtgtggttgggtgtggtggtttatgtttgtaattttagtattttggaaggttgaggtaggtggattataaggttaggagtttgagattagtttggttaatatagtgaaattttatttttattaaaaatataaaaattagttggttgtggtggtatgtttttgtaattttagttatttaggaggttgaggtaggagaattgtttgaatttgggaggtataggttgtagtgagttgagattgtattattgtattttagtttgggtaatagagttagattttattttaaaaaaaaaaaaaaaaattagttaggtgtggtggtaggtgtttgtaattttagttatttgggaggttgaggtaggagaattgtttgaatttgggtggtagaggttgtagtgagttgagattgtattattgtattttagtttgggtaatatagtgaggttttgttttaaaaaataaataaataaataaataaataaataaataaataaaaaataaataatttaagtaggtttaagataaggggtaaaggatttatattaatatttaatattttatttttttggttttggtttatattttttaggtatgaagttgtttaatttgtataagttttgtttataataatatagttatttatttagttttttatttatattatagtagagagttgtgttaatgaatatttataatttaaggggtttagtatagaggtatttttaaagttttttaaaaagtttagtttattaaggtttagataagatgtttgaggttttgaatgttatagtaataattaggatttatatttttgtaagaataggttttaaggatattaagagttattttgatggttttggattattttttatttttaatttttttatttttttttttttttgagatggagttttgttttattatttaggttggagtgtaatggtgttattttggtttattgtaatttttattttttaggtttaggtaatttttttgttttggttttttgagtaggtgggattataggtatatgtttggttaatttttgtatttttagtagagatggggttttattatgttggttaggttggttttgaatttttgattttaggtgatttatttgttttagttttttagtgttgggattataggtgtgagttatttatttggttttatttttaatttttaaaataataggtatatttttttttaggagtgattaaggtaaaagtgataatggttttttatttagattttatttttgatagttttatttagtgttttatgagggagggagttgatgtataagggaatagatagattttttaggaagtaagagttttaaaaatagggagtaaagtttgtgtagggtttttttttttttttgtagttaagagaagaaagtttttaggttttaaatagtgatattggtattaatttataaataagtaagttgaataaaatatagtttagaaatagatttatatatatgtgggaatttatatatataataaaggtggtattttaaattagagaggaggttttttaatgaaatttgtttggattattgggaaataagttaatttagatttatttagatttttattttaatttagttattaattttaaattgtaatttagatttgttttgggttttttaaattgtaattttatatttttttagagtttatttttatttgttgtttagtttttttttttttaggatatggattgggaattatggtttgaaggttaggttttgtttgtttagttttagatattatttgtatgtgatgagttttgtagaggtttttattagttgggagttattggttggttagatttatgttggtagtatttgataggatgtggttataaatgattagagtgggttttgttgttaaatttgggatttgtattttggagtataatggggaagaaagtgtttaaaggattgtttattgtaggattttaagttttttagtaggaatttgttatgtggggttatgggggtgtagggatggagggaagggttttattgtttgttggttgtagggttaggggtaggagttttttttttgggttatttttagagagaaagggggaggagagttgggtggagaagggaaatagttgtgagaagtagagaaaaagagagagagagggaggggttggattgattgagttggaagtgttagtttgagttggtaaaagggagtaggttagtatattagttttaatttgggtgttggttttattgtttttgttttgttattgtttttatttttttttagttttgtggtgtgtgtgtaggttagtttaatggattttttgatttatttgattatttgtttatttttggtgtaaggtttgtgataggaggttagtttatttggggtttaaggtattgttatttttttggttgtttgtaaataattgaatttgttatgttgtgttttggttaaggattttttaaattttttgttttggttttattgggtaagtttgttgtttatgtttagtttttattggtttgatgttttgtgatgtaagttatgggaatttaatggaagaggtggaatgagaagggtttatgtttggtttttagtttaggaaagtttttttaaatttttttagtgaattattttgtttttttttttttttttttttttttttttttgagataggtttttttttgttgtttaggttggagtataatggtgttatttgggtttgttgtaatttttgttttttgggtttaagtgatttttgtgttttagttatttgagtagttgggattataagtgtttgttattatgtttggttaatttttgtatttttattagagatgggtttttgttgtgttggttaatttggttttgaatttttgtttttaggtgatttatttgttttggttttttaaaatgttgggattataggtgtgagttattgtgtttggtttttttttttttataaaaaaaattaaatttttaatgtaattggagtttatttttatgtatgtatgagttggggtttaatttttttgtttgatggagtgttagttatgttaatattatttgttaaataaattgttttaatagaatttaaatgttgtttttgatatataatgttagtatatttatttgtgtttatttttagattttgtattttgttgtttgtttatttgtttgtgtgtttatttttgtgttattattatgttgtttttaaaagttttgatatttttgggaggagtttttttattaatagattttttgttgtaagatttttgttagttgttgtgttgtttgggtttatttttatttttttttttttttgttatattttttttttttttgttttttttaatttttagattttattattgggttaaataaatatatttttgggttttttatgaaataattagtggatatttattaagtatgtattgtttagtatttttttttttttttttaatattttattttttttttaggggattatttgtttttttagtttatgtagttggtttttgtagtagtttttgttgttgataattttaaatttttaggttgatgaagatttatttaaattttatttttttttttttttttgagatgaagatttgttgtgttgtttaggttggagtgtaatggtataattttagtttattataatttttttttttagggtgtaattgatttttttgttttagttttttgagtatttaggattataggtgtatgtgattatgtttggttaatttttgtatttttagtagagatggggttttattatattgtttaggttggttttaggtgatttgtttgttttggttttttaaagtgtttggattataggtgtgagttattgtgtttagttttatttttatttttgaaagtatttagagttttgaggatttgagaaggaaattgattttattgtaggtttagaaatgagttttaattaatttatattaattaatattttttattttagattatggttattggattaggtataagtttgtgatttaagtgggttagttagtgggaattagttttttgtttagaatgttgggtagtttaaggaaatatttaatgtttattggtttattataaagtgtattataaatgatatagatgaaaagatgtatagggtaaggtatggaggaagagatttttggaagtgagtagggaagtatgtagtttttattgttgtttttagtgttattgaaggaagtagtttgatattgaagtttaatattgtagaaggtagaagagaggtttggaaagaattttaggatttgatgatattgttgagtttttatatgtttatgttagtattttttttatatgaataatagagaagattattatttagttaatattttttttgaatgtattttaaatgttatttgttgtttaagtatattgtgtagaaaaaataaattatggttaggtttggtggtttatgtttgtaattttagtattttgggaggttaaggtggttgtattatttgagtttaggagtttaagattagtttgggtaatttgtgaaattttgtttttataaataaaaaaaaaaaaaattagttagtatggtagtgtgtgtttttagtttaagttatttgataggttgaggtaggaggattagtagaggttggaggttaaggttgtggtgagttatgattgtattattgtattttagttttgatattagagtgatattttgttttaataaaaataaaaaatgggtagggtgtagtggtttatgtttgtaattttagtattttaggagtttaaggagggtggattgtttgagtttaggagtttaagattattttgggtaatatggtgaaattttgttattattaaaatataaaaaattagttagttttggttaggtgtggtggtttatgtttgtaattttagtattttggtaggttgaagtgggtggattatgaggttaggagtttgagattagtttggttaatatagtgaaatttgtttttattaaaaatataaaaattagttggatgtggtggtaggtgtttgtaattttaattatttgggaggttgaggaaagagaattgtttgaatttgggaggtggaggttgtagggagttgagattgtattattgtattttagtttgggtgatagagttagattttgttttgaaaaaaaaaaaaaaattagttagttgtggtggtgggtgtttatagttttagttatttaggaggttgagtgaggtataagaattgtttgaatttgggagtgttgtagtgagttgagattatgttattgtattttagtttgagtaatatagtaagagtttgtttaaaaaaaataaaaataaaaaaagatttaattttttttttgtttttatattatagtaattaatataggagatttttgtgattatatgtgtggagattttattgtattattaagtaattagttttgtaattaagtaatttgttttgtagtagatattagttgggtgttttttgattagattttgatattatttatttagagagagtattagattttataggttgagggtttagtt

SEQ ID NO: 597 - DNA, 6200 bp, Artificial Sequence
  chemically treated genomic DNA (Homo sapiens)
gattgagtttttaatttatgggatttgatgttttttttgggtagatagtgttagaatttaattggaagatatttagttgatgtttgttgtagaatagattgtttgattgtagaattgattgtttggtggtgtagtaaaatttttatatatgtggttgtagaagttttttgtgttgattgttgtggtgtgagggtagaggaaaaattgggtttttttttgtttttgttttttttagatagatttttgttgtgttgtttaggttggagtgtagtggtgtgattttggtttattgtaatatttttaggtttaagtaatttttgtgttttatttagttttttgagtagttgggattataggtatttgttattgtaattggttaattttttttttttttttgagatggagtttagttttgttatttaggttagagtgtagtgatgtgattttagttttttgtaatttttgttttttaggtttaagtgattttttttttttagttttttaagtagttgggattataggtgtttgttattatatttagttaatttttgtatttttagtagagatgggttttattgtgttggttaggttggttttgaatttttgattttgtgatttatttattttagtttgttaaagtgttgggattataagtatgagttattgtgtttggttagaattggttaattttttgtattttagtagtaatggggttttattatgttgtttagggtggttttgaatttttgagtttaggtaatttattttttttgggtttttgaagtgttaggattatagatatgagttattgtgttttgtttattttttgtttttattgagatagggtgttattttaatgttggggttggagtgtagtggtgtaattatggtttattatagttttgatttttggtttttgttgatttttttgttttagtttattaagtagtttggattagaggtatatattattatattggttaattttttttttttttatttgtagagatggggttttataggttgtttaggttgattttaaatttttgggtttaagtgatatagttgttttagttttttaaagtgttgggattataggtgtgagttgttaagtttagttatggtttgttttttttatataatatgtttaaatagtaaatagtatttagaatgtatttagaaaggatattagttgaataataattttttttattgtttatgtaagaaaagtgttaatgtaggtatgtagaggtttaataatgttattaagttttgaagttttttttaggttttttttttgttttttgtaatgttaggttttaatgttaagttgttttttttagtagtattagaagtagtaatgagggttgtatgtttttttgtttatttttagaaatttttttttttatattttgttttatatatttttttatttatattatttgtaatatattttatgataaattagtaaatgttaagtgtttttttgagttgtttagtattttgagtaagaaattgatttttattagttggtttatttaaattataggtttatgtttgatttaataattataatttggaataaaaggtattgattagtataagttaattggggtttatttttggatttgtaatgaagttagttttttttttaaatttttaaaattttaagtgtttttagaagtgggaataaagttgggtgtagtggtttatgtttgtaatttaagtattttgggagattaaggtgggtggattatttgaggttagtttgagtaatgtgatgaaattttgtttttattaaaaatataaaaattagttgggtgtggttatatgtatttataattttaggtatttgggaggttgagataggagaattagttgtattttggaggaggaggttgtggtgagttgagattgtgttattgtattttagtttgggtaatatagtgaatttttattttaaaaaaaaaaaaaaaagtgagatttaaataggtttttattaatttagggatttggggttgttagtaatagaaattattatagaaattgattgtatagattggagagataggtggttttttaaaggaaaaatagagtgttagaagaaaggagaagagtgttggatagtatatatttaataaatatttattggttattttatagaaggtttaaaaatgtatttatttaatttagtaatgaaatttgagggttaggaagagtagaaaagaaggaagtgtggtaggaaggaggaaaaatgaaagtgggtttaaataatatggtagttaatagagattttgtaatgaaaggtttattggtggaaaaattttttttaggaatgttagaatttttaagaatgatatagtaatgatataagaataaatatataggtaaatgagtaaataatggaatataaagtttagaaatagatataagtaaatatgttaatattatatattaagggtagtatttaaattttgttggggtagtttgtttaataaatggtgttgatataattggtgttttattgggtagagaagttagattttagtttatatatgtataaggataaattttagttatattaaagatttaattttttttataaaaagaagaaggttgggtatggtggtttatgtttgtaattttagtattttgggaagttgaggtgggtggattatttgaggataggagtttgagattagattggttaatatagtgaaaatttgtttttaataaaaatataaaaattagttaggtgtggtggtgggtgtttgtaattttagttatttgggtggttgaggtatgagaattgtttgaatttgggaggtagaggttgtagtaagtttagatagtattattatattttagtttgagtgatagagagagatttgttttaaaaaaggaaaaaaaaaaagaaaagaaaaagtaagataatttattgggggaatttggggaaatttttttaaattggaagttaagtgtgagttttttttattttgttttttttattgggtttttatgatttatgttataggatattgagttaatgggaattaggtatgggtgatgagtttgtttaatggggttggggtgggagatttgaaaagtttttggttagggtgtggtgtggtagatttagttgtttgtgggtggttgggagagtagtagtgttttggattttaggtgagttggttttttgttgtaggttttgtgttgggagtgggtagatgattaggtagattagagggtttgttgggttggtttgtgtgtatgttgtagggttggaaggaggtagggatgatagtagggtgggggtggtgagattagtgtttagattggggttagtgtgttgatttgtttttttttattagtttgggttagtgtttttggtttgattggtttaatttttttttttttttttttttttttttgttttttatggttgttttttttttttgtttagtttttttttttttttttttttaaggatggtttagaaggagaatttttatttttggttttatggttgatagatggtaaggtttttttttttgtttttgtgtttttatgattttgtatggtgagtttttgttgggaaatttgagattttgtaatgagtaattttttaagtatttttttttttgttatgttttaaagtatgggttttaagtttgatgatagaatttgttttggttatttgtagttatattttgttaggtgttgttaatgtgaatttgattagttagtgatttttagttggtgaggatttttgtagggtttgttatatataaatgatatttgggattgagtaggtagggtttggtttttaggttatgatttttaatttatattttgaaaaaaaaaaaattagatagtaaatagaaatagattttaaaaggatataaagttatagtttaaaaggtttagggtaagtttaaattataatttggaattaatgattaaattgaggtaagaatttaaatggatttaaattgatttattttttaatggtttagatagattttattgaagggttttttttttgatttgaaatgttatttttattatatatataaatttttatatatatgtgggtttatttttggattgtattttatttaatttgtttatttgtagattggtattaatattattatttggggtttaggggttttttttttttggttgtagaagaaggaaggggttttgtataggttttgttttttgtttttggagtttttgttttttggagagtttgtttgtttttttgtatattagtttttttttttatggagtattgagtgaggttgttaggaatggagtttgaatgagaaattattgttatttttattttagttatttttaaaagaaaatgtatttattattttgagagttgaaagtgaggttaggtaggtggtttatgtttgtaattttagtattgggaggttgaggtaggtggattatttgaggttaggagtttgagattagtttggttaatatggtaaaattttgtttttattaaaaatataaaaattagttaggtatgtgtttgtaattttatttatttaggaggttgaggtaggagaattgtttgaatttgggaggtggaggttgtagtgagttgagatggtattattgtattttagtttgggtaatagagtgagattttattttaaaaaaaaaaaaaaatgaagaagttgaaagtgagaagtggtttagggttattagggtagtttttagtgtttttaaagtttgtttttgtaaaagtgtaaattttggttattgttataatatttaaggttttaagtattttatttaagttttaataaattaagttttttaggagattttgagaatatttttgtgttaaattttttgaattgtgggtgtttattgatgtagttttttattgtggtgtaagtgaggggttggatgaatgattgtgttgttatggataggatttatataggttgaatagttttatgtttgaaaagtgtgggttagggttaaagaagtgaaatgttaggtgttggtgtgagttttttgttttttattttaggtttatttaggttatttattttttatttatttatttatttatttatttatttatttattttttgagatggagttttattgtgttgtttaggttggagtgtaatggtgtgattttagtttattgtaatttttgttgtttaggtttaagtgatttttttgttttagttttttgagtagttgggattataggtgtttgttattatatttggttaatttttttttttttttttgagatggagtttagttttgttgtttaggttggagtgtaatggtatgattttggtttattgtaatttgtgttttttaggtttaagtgatttttttgttttagttttttgagtagttgggattataggagtgtgttattatggttagttaatttttgtatttttagtagagatggggttttattgtgttggttaggttggttttaaatttttgattttgtgatttgtttgttttggttttttaaagtgttgggattataagtatgagttattatgtttagttgtatttagttaattttttatatttttagtagagatggtgttttattatgttggttaggttggttttgaatttttgattgtgggagttattgtgtttagttttaggttgtttattaataatttattttaatatgggattatgagtagaggttgggaagtaaaattgttatattagtgtttttttttgaattgggggtaggtgggtgggtggttttttagtaaggggttgaaatattgtttgtagtatattttattttggttattagataaaggtatttttagagttattttttgtttttttttaggttttatttggtttgagtattttgttttagtgagttttttggaaagagtttgttattttatttgtatttgtttttatgagttgttttaatgtttagtttataggtaattggtgtaagggggagaggattgagttggggagatgattgtttgtgggagggtttagggatgagaaggttatttttgtttgtatttaatttatttgttttttttttagttgtttttggttagaaggtgatggagaatagtagtgggatatttgatattttaatgtaagtgttttaagtttgggggtggatgggggtgaggggataatgaataggtaggaag

SEQ ID NO: 598 - DNA, 6222 bp, Artificial Sequence
  chemically treated genomic DNA (Homo sapiens)
ttttttgttttgtgttgtggaggaggtttttgttaaagagattgtatgttgtggagtagggtgggtttgggttagggttgtgttttggattgtgtttgggaggtagggatttgggtttagatttggggttaggtttaggttttgtgtgtttttttgagttatttattgaaggttttgatgtatttgtggagtagtttttttattgtgtagtttttgtttaggtttagggtgtttgttatggttgttggtgtggggtgggttgggtttaggttgtgttttgggagttttttattgggtttggattgaatttttgttttgggagaggtagagtgggagtttgtggagttgtgggtgggggagtggttttgtgggtagaaatggggtggggtgggtatgttttttgttggataggggtggagttgttttttgtggttatttttggggttaaatggtttggtttgggatggtgtaatttgttagttgggaaatggatttgtagagaggtttttggtttatttttggagttgtgggaaggttgaggggttttatgaggatggggatgaattaagattttaggattggttggtgtttagttttttgtagggtgttttttttttgtgttttttttttagaggtatttgtagtattttgtagtttggttttgtgttttttttgtttttttttttttatagtttttttttttttgtagggttattttgggaatttagagtttgaggggattttggaggaatttttttttggtatgggaggtggggggagagaatttaggtgttttgtttgttttgtttttttttgggagtttaggaaggtgaggtggggttgtggtagtttttagggggtttgttttaggggaggtggattggatgggagaggaatatttttggggtggggggagtttgttgtggttaggaggtgttagtgggaagttttagtttgggaattgagtgtttttaggttatttttgtaaaggttttaggggttttggtttagtttgtttataggttttttttttttttatttttggtttttgattttggttttggttttgtataggtgaattgtgagtgtgtatggagtagggtgtttagaggggggtgtttgtgttaagggtggttggtgggtgtatgatattattagtaattttggttattggtggggttatatgtattttggtaggggtaaatattttatatttaagttagttgttggaggttggggatttaagtggaggtgtaggtgtttgtatttatatgtattgggttataggtattggttttttattttttgttttttatatataatggtatttatattttgtgtatatttgtatgaagaaatttttaggtatatatatttagtttgtttattttagaatgtaaatttgtggatgaggttgttttttggatgtgttgtttatttgagttaggttagttttgagttttgtggttatataggtgttgatatttttatatgtgtgtatatatgtaaggtagtgtttttttatgtatgtatatttttatatatatgtatatatttttatgggtgtgtatgtttattttgttgttttttttttatttgtggtgtagggtttgttttgtggttttagttttttgattttttttatttttagattttggtagagttttgttttatggaaaggtattttggttttatatatatttatttttttaggttggaggataggggagtttttgtatggagtttttaggtggattttttttaagagttatttagagttgtttttgtttggttttattgtttttttgtgtgattttgagaattatttggtttttgggagttttaatttttttatttgttaaatgggggtatgtgggggagggttttgttggaaggtggttgggaaaagttgggtgtattgtggaggttttttgttttttggggatttagtgtgttttagtttttgtggttgttgtttttttttttagatttgggttgtagattttttatttgtttgttgtttttagtttgtttgtgttgttttgggtggggggggagttgttgggggttgtgtttttttttgtttggtgttttgtttgtgtttgtttatttatttttgggatttgttgtaaggagtttgtattggtttggttgattttatttttgtgtgtttttgtttgttggttttgttgtggttgtggtttttgtttgttttttatgttgtggttttgttttttgttgttttgtttttgtttttgtgttaggttgtttttttttttttttgtttttgtgtggagttttgtattgttggttgtgttatttttattgggggtttttttttgttttgtatgtggtggtttttgtggtagtttaattttttttttgttgtgttgtttgggaggttagggttgtgggtggggggttgtgttattagttgttttgagggtgggtgattggaggttttgttgtttgggatgtggaggggggattgaaatgaagagttttttttttaattgtggatgttttagtgttttttgttttgtttgggtgttgggtggaggaagttgggaggggtaggaagtggattgtggtggggaaggggtgttttgtttagtttttagtttgggtttttgtttttgagataaattgtttttatggggttaatttggtttgggattgggtgtttttttgtaggtagtgggtggtataggtttagtggaggttgggggtgtggggatagttggtttttgagatagtttgggggatgggttaggataagatgggaatattttggggagagggatttgtggggagtgaggaatgaaattgtggttatttggagatgtggttttgatgtttgggaatgggggtggggggtttagtttatataggaggaatggggttttggaagtttggttttttatagggttgaatggaaaggggtagttgtatgtggtggtgggttttttgtagtttggagattggagatttggatgtttggttaatagggaggaatttgggaggggtagttgtaggtggttggggtttttattagttgggtttaggagagtgggtaatggtttttgattatttggttttagatatatttattgtgaaattattgattttaaattttttttttgaggtgtgttttttttagttttggggtgggggatttaggattgtttttgtattttagttttggtaatgtaagatttagaaataggatttttttgttttttagtttttttataatgagggtttagattaggtggtttgtgagtgttttttgttgtaatatttttttgattttggatttagtgtagttatttgttaagagatttttaaatgttgtagtagggtggggttaagggtggagttaagaaggtgttgagtattttttgtttttttttttttttgggttttgtttttgatagtgtggattttttgtggtttgggaagttttagtttaagttttggtttttagttttggtgggttttatttaggtagatgttttgtttttggttagtgaggttggttgttgatttagtatggatatggtattgggaagagaggtgtggagggtgatgttaggaaaggggttggagaggtttaggttttgtttttatgggttgttttttttattttttattattgttttgttgtgggatgtatttgttgagggtggaggataagggggtgattgtgtggttgttgttgagtttgttaagagttaaaaatattttttaataaagaggagtaaggaggtttttaaggagaatgaatttattagggagtgggtgtagttggttagattttataaataggaggggattgggagtttgaggatggaagggggtttgtgtttttagttatgttggatattgggatattgagagtggggaaaatgagggttttaggaggggtttagagatttaattttagtattttattttttgtatgaggtgttggggttggtttaagagagtgtgatagatttaagggttggtttggggtttggtttggaggtttagatggttttatttggggttggtaggtgttggtgggaaggttttatattttagattttttgggtatattgggtaatggtgtggttattggagaatttgttagaggtggttatgttttggattattatttgtgtttatttttttgggttttgtaggttaaagggaagttttggtttattttgttggtaggatttttattttttgttttattttaattagggttattaaagttttgttaatttttggtttaggattttttattttgtataaggtgttgatttttttttggtatttaatgtagtttttataatttgtgaagattttaaatttggaggggaaaggataggtatgtgttatttttttagggggttaggataagttttatgaggttaagggttaagtttgttttgttttagtggatagttggggatttagagggttatgttgtttttaaaggtgtttggttttaattattaggatttgtgtttggtttttttattatatatttgagttttgatttgttttgtggttttatttgagtgatttttgggttaattagtttattggttatggtgtatgagtatattgataatgtttttgaataggttgggttgtttgggggagaagaagttattgtttagttgtttaatgatttgttgaagtttaggaatgtgattgtagtatttttgggtattgtatttgttaggatagagttgtggttagttttttggaaaggggtttttggttttttttttagagaaaagttgagaagttttatgttttagggttaaaatttaggtttagtttgttgttttttagggttgttatattgtttttgtagggtttttttgtaattttttttttttgtttagttttttattttttttttgtgaatgaagaaattgaggtttggaggatatagaaagttaagtgttagagttaaggtttttaaataagttttttttttttatatgttattgttgttttttaattagtttgtttgttttaaaatggttttttttttttagtagtttaagtttatatttggttttgttttggggtagtaagagtagttaataggtataattttttaattgggttaggtatggtggtttatgtttgtaattttagtattttgggaggttgaggtgggtggattatttgaggaggttaggagtttaagattaatttggttaatatggtgaaatttagtttttataaaaatataaaaagtagttgggtatggtgttgtgtgtttgtaattttagttttttgggaggttgaggtggaagaattatttgaatttgggaggtggaggttgtagtgaattgagattatgttattgtattttagtttgggtaatagagtaagattttattttaaaaaaaaaaaaaaagataattttttagttgatttttagtgtttttattatggtttaaagtgttttataggttagttttaaaatttaattgttttaattagaaattagtattttttataaaatttttaattttttgtgtgattttttagttttttgtgtgatttttaggtaattttttttgtattatggtgttagtttttatagtggttttttatttgttttttttagtattgtttttattttgtagttagagggtttttttaggttttgttttgagtatgtgggattatgtttataatattttatagtttttttttgtttatgggatagttagttttttagtgaagttttataggagatattttttttagtgtttaatgttaattttgggaagttgttgtgggagtgtaaattgggagaaattttttggaaagtagtttggtaatttgtattaagagttttaagaatttatattttttaatttagaaatattatttttttgataattattttaaggaaattattagatgtggatgtagatattaaaaggttgtttattatagtaatatttaataaattggaaattaattttagtgtttagttatatggaattgattaaataagttgtgatatgtttataggatggaatgttatataaatatttaaaatatttttgaagattaataatatggaaaatttttttttaatgttaagatattaggatttaagtagggtgtggtggtttatgtttgtaaatttagtattttgggaggttgaggtgggtggattatttgaggttaggagtttaa

SEQ ID NO: 599 - DNA, 6222 bp, Artificial Sequence
  chemically treated genomic DNA (Homo sapiens)
ttgaatttttgattttaagtaatttatttgttttggttttttaaagtgttgggtttataggtgtgagttattgtgttttgtttgaattttgatattttagtattggagagagattttttatgttattagtttttaaaaatattttaaatgtttgtataatattttattttatgagtatgttataatttatttaattaattttatgtggttggatattaaggttaatttttggtttgttaaatattattgtgatgagtaattttttaatgtttatgtttatatttgatgatttttttaagataattattagaagggtgatatttttgagttaaaaagtatgagtttttaaggtttttgatatagattgttaaattgttttttagaaagttttttttagtttatatttttataatagttttttagagttggtattaaatattgaaagaagtgttttttgtgaggttttattagaaagttggttgttttatgggtaggagggagttgtgagatgttgtgagtatggttttgtatgtttagaatgaggtttggaagaattttttggttgtaggatggagatagtgttggagggggtaggtgggggattattgtgggggttgatattataatgtagggagagttgtttgagagttgtataagggattagagagttgtatgagggattagagattttgtggggagtgttggtttttggttggaatggttaggttttgagattggtttgtggagtgttttgagttgtggtgggggtgttgagggttagttgaagggttatttttttttttttttttgagatggagttttgttttgttgtttaggttggagtgtaatggtatgattttggtttattgtaatttttgttttttgggtttaagtgatttttttattttagttttttgaggagttgggattataggtatatgatattatgtttggttattttttgtatttttgtagagattgggttttattatgttggttaggttggttttgaatttttgatttttttagatgatttgtttattttggttttttaaagtgttgggattataggtgtgagttattatgtttggtttagttgaagggttgtatttgttagttgtttttgttgttttagggtaaggttggatatggatttgggttattggaggagaaaagttattttggagtaaataaattggttaagagatagtagtggtgtgtgggagaaaagagtttgtttgggggttttggttttaatatttagttttttgtattttttgggttttagtttttttatttataaaggagggatgaaaagttgagtagagaaggggagttgtagggaggttttgtaggggtgatgtggtagttttggggagtagtaggttggatttgggttttgattttggggtatgggattttttagtttttttttggaagaggagttaggaatttttttttggggagttgattatagttttgttttggtaggtataatgtttaggagtattatgattgtatttttgagttttggtaggttattgagtagttgagtagtggtttttttttttttaaatagtttgatttgtttaaggatattgttaatatgtttatgtattatgattggtgagttggttggtttgggaattatttaggtggggttgtagggtagattgaggtttaggtgtgtggtggggaagttggatgtgggttttggtagttggagttaggtgtttttggaagtagtatgattttttaggtttttggttgtttattgggatagggtaggtttggtttttgattttatagaatttattttagttttttaaaggaatagtatatgtttatttttttttttttaggtttaaagtttttgtagattatgaagattatattaaatgttaggagaaagttagtgttttgtataaggtgaggggttttgggttaggggttggtagggttttggtggttttggttgggatgaggtagaaggtggagattttgttagtagagtgaattagagtttttttttgatttgtagaatttaagagagtggatgtggatggtgatttggaatatagttatttttggtaagttttttagtgattgtattattgtttagtatgtttgggagatttggggtgtggagtttttttgttagtgtttgttagttttggatgaggttatttgagtttttagattagattttaaattagtttttgagtttgttatatttttttgggttagttttagtattttatgtagagggtggggtattggagttagatttttaagttttttttggaatttttattttttttatttttaatgttttagtgtttagtgtgattaaggatatgggtttttttttgtttttgggtttttggtttttttttatttatggggtttgattaattgtatttattttttaataaatttattttttttgggagtttttttatttttttttgttgggaaatatttttagtttttggtgggtttaatagtagttgtgtagttatttttttattttttatttttggtaggtgtgttttatggtgggatggtgatgggaggtggagggggtgatttgtgggggtggggtttaggtttttttagttttttttttggtgttattttttatgtttttttttttagtgttgtgtttatattaggttagtggttagttttgttggttgggggtggggtgtttgtttgggtggggtttattggggttgggagttgggatttgggttgaggttttttggattatggaggatttgtgttgttgagggtaggatttaggagggggaggaagtagaggatgtttggtgtttttttggttttgtttttagttttgttttattgtggtgtttaagggttttttagtaggtggttatattggatttaaagttgggggagtgttatggtagggaatatttgtagattgtttagtttaggtttttattatggggaaattgaggaatagaaaggttttgtttttaagttttatattattaagattgaggtgtgggggtggttttggattttttgttttaaggttgggaggggtatgttttggaagggaggtttggggttggtggttttatagtgagtgtgtttgaagttaaatggttggaaattgttatttgtttttttaggtttggttagtggggattttaattgtttgtggttgttttttttaagtttttttttgttggttaggtatttaggtttttagtttttgagttgtggagaatttattgttatatgtggttgtttttttttatttgattttgtggggagttaggtttttggggttttgttttttttgtgtgaattgggttttttgtttttatttttagatattaaggttgtgtttttagatagttatgattttattttttgttttttataggtttttttttttaaaatatttttattttgttttagtttattttttagattattttaaggattagttgtttttatgtttttgatttttattaggtttgtgttatttgttgtttgtaggaagatgtttggttttgggttgggttagttttatgggaatggtttgttttgaaaataggaatttgagttgggggttgggtggggtgttttttttttattgtagtttgttttttgttttttttggttttttttgtttgatatttaggtagggtggggggtattggggtgtttgtggttgggggaggggttttttgttttggttttttttttgtgttttgggtggtggggtttttggttgtttgtttttggggtagttagtggtgtagttttttgtttgtggttttggttttttgggtggtgtggtaggggaggggttaagttgttgtagggattgttgtgtgtggggtgagagggagtttttggtgggggtggtgtagttggtggtgtggagttttgtgtaggggtggaggggggagggggtagtttggtgtgggggtgggggtggggtggtggggagtggggttgtggtgtggagagtgggtgggagttgtagttgtagtgaggttggtgggtgggagtgtatggaggtggggttggttaggttggtgtgggttttttgtggtaggttttaagagtgagtgggtgagtgtgggtggggtgttaggtgaaggagggtgtggtttttagtgattttttttttgtttagggtggtgtgggtgggttgggggtggtgagtgggtggggagtttgtggtttgggtttgggagagggggtagtggttatgagagttaaggtgtgttggatttttggagggtggaggatttttatggtgtatttagttttttttagttattttttagtggggtttttttttgtgtatttttatttggtagatgagaaaattgaggtttttagaggttaagtgatttttaaggttatatgaggaagtggtagagttaggtggggatggttttgggtggtttttaggaaaagtttgtttgagaattttgtataggagtttttttgttttttagtttgggggagtgagtatgtgtagggttggggtatttttttgtggggtaaggttttgttaaaatttgggagtgaggggagttagggagttggggttgtagggtgggttttgtattgtaaatgggaggggggtgatggaatgggtgtgtgtatttatgggggtgtgtgtatgtgtgtgggagtgtatatgtgtggagaggtattgttttgtgtgtgtgtatatgtgtgaggatgttagtgtttgtgtggttgtgggatttaaggttggtttggtttaagtgaatagtatgtttaggaggtgattttgtttgtgggtttgtattttggggtggatgagttgggtatgtgtgtttgagggtttttttgtgtaggtgtgtatagggtgtgggtgttattgtgtgtgagagatggaggatgggaggttggtgtttgtggtttggtgtgtgtaagtgtggatgtttgtatttttatttaggtttttggtttttgatgattaatttgggtgtggagtgtttgtttttgttagggtgtgtatgattttgttagtgattggagttgttaatggtgttatgtatttattggttatttttggtgtgagtgtttttttttggatattttgttttgtgtgtgtttatagtttgtttgtgtggggttggggttagggttaggagttggggatagggaggaagagggtttgtggataagttgagttgggatttttgggatttttgtggaggtggtttgggagtgtttagtttttaggttgaggttttttgttgatgttttttggttgtagtgggttttttttgttttaggaatgttttttttttatttagtttgttttttttagggtaggttttttgggggttgttgtagttttgttttgtttttttgggtttttgggagggggtgaggtgagtaggatgtttgggttttttttttttattttttatattagggagaaatttttttgaggtttttttaggttttgggtttttaaaataattttgtgggggaagggaggttgtggagggagggaagtgggaggggtgtagagttgagttgtggggtgttgtaggtgtttttggggagagggtgtgaggagaaggtgttttgtggggggttgggtgttagttagttttgggattttggtttgtttttatttttgtgaagttttttggtttttttgtgattttgagggtgggttggaagtttttttgtgggtttgttttttaattggtgggttgtattattttgggttagattgtttaattttgggagtggttgtgggggataattttgtttttgtttagtagggggtgtgtttgttttgttttgtttttgtttgtggggttgtttttttgtttgtgattttgtagatttttgttttgttttttttgggataggggtttggtttgagtttggtgggaggtttttggagtgtagtttgggtttagtttattttgtgttggtggttatggtaggtattttggatttggataagggttgtatggtggaggagttgttttgtgggtgtattgaagtttttggtgagtggtttgggagggtatatggagtttgagtttagttttgagtttgagtttgggtttttgttttttaggtatagtttagggtatagttttgatttggatttattttgttttgtagtgtgtagtttttttaatgaaagttttttttgtaatgtagggtagagag

SEQ ID NO: 600 - DNA, 6143 bp, Artificial Sequence
  chemically treated genomic DNA (Homo sapiens)
taggtagttattttttggatgggtttattttagttttttattggtagtgggaagggtatataaatattgatttaaaagtaggaggttaaggtataaaatataatttaagaatttattatagatttagtgtggtggtttatgtttgtaattttagtattttgggaggttgaggtaggtagattgttggagtttaaatttttgagttgtggattatagtgtttttggggtattgttaggttaatttgtagttatgtggtaatatgaagtatttttgagtgataagtaaatagtttaagggggtgggaattatgaggtgattgttgtgttattttaatgtttttttgggtttgataatttaaaaggattttgtattttttagatgatgattattattatttttttattatgaggttttagattttaaaattttttaaattggtttaggtatagtggtttatgtttgtaattttagtatttttggaggttaaggtgggtagattatttgaggttaggagtttaagattagtttggttaatatggtgtaattttatttttattaaaaatataaaaattagttgggtgtgagggtgtatgtttatagttttagttatttgagagattggggtaggagaattatttgaatttaggaggtagaggttgtagtgagtagagattgtattattgtattttagtttgggtgatagagttgagtaatagagaaagattttgttttaaaaaaaagaaataaagaaattttaataattaaaaataaagaaaagtataatattgtaataatattttaatgaaaggagtagttggaagtagtaagtgttttaaattaggattatttggagtatttgaaattttattatttttatttatatatttagtgtttttagttttattgaattagtttagagtggatgttggagaatttgtattttttagaattttttaagtgatgttgatgttgttgttttgagtgttatgttttgagaatagttgttttaaagtatattaatagttgttatatatgtattatttttaattgtaggtattttaagaattttttttgagaaattttagttttttagaatagggagtgttttttttatgtatttttgatagtatttgaattggaagtagtttagtatagtagttttaaagaggttggggagttagtttgtttagttttggagtttgttttgatatttgattgttgtgtgagtttaggtaatttaattatttttagtttaagtgtttttggagtaaaatagaggtttattagtttttttttttttattagggaaattggaaatgaatatttatttaagttattaatgggagtgtattattttttatttttttgttatttatattttgaaaatgtagggggagaaaaatataaggaggtaggagttatatttgtaattttagattttgggtggttgaagtgggaggaatatttgagtttaggagtttaagattagtttgagtaataatatagagagttttatttttataaaaaaaatttttttttattatttgggtatggtgatatatatttggagttttagttatttgggaggttgaggtaggaggattgttttggtttaggagttggaggttgtagtaagttatgaatgtgttattgttttttagtttgggttatagtttgtataaagtaagattttgttttaaaaaaaaaaaaaaaaagttttttgttttgtttgaagttgaggagattatttgtttattttaagttattatttgtagaaattatatttatattttttttttttttatgtgtttttttttttaagagaaaggttgttaaataattaagagaagtttttatatttattgagtgtattataattgaaataagagtaagtgatttatttttttggaattttttaggttaagtttgtttaatttgaggtttatgggttgttaaatttgtaagtttttttaaaatattagatttttttttgtgatttttttttagtttattagttattattagtgttagtgtatgattagtgttagtgtattttatgtatggtttaagataatttttttagtgtggtttagggaatttaaaaaattggagatttttattttaggttgttttataataaaaggtaatattaatatgtgggaaagatgaggtggtagaggttaagaaatagaagatttaataattatttaagtgagattgaagttttttaaaggtttaggtttatgtagttagtagatggaatttttttatatatatttgttatttttttaagatggagttttattttgttatttaggttggagtatagtggggtgattttagtttattgtaatttttgtttattgggtttaagtaatttttttgttttagttttttgagtagttgggattataggtgtgttttattatatttggttaatttttgtatttttagtagagatggggttttattatgttagttaggttggttttgaatttttgattttgtgatttatttatttttgttttttaaagtgtagggatataggtgtgagttattgtgttaggttaagatggaaattttagttattattgttatttgagtttttttttgtttgtttttttgtataaaatgggtagggttgtgggtttttttagtttaggagttttggggtggttttaagaaggtagaatttttggtaggaattatttgtattaagattatggattatttttttgaaggttagtgattttagggattttatttttgagttgtttttttatgtggaagtgaaagtattggaaataggggaaagaagttggttaaagatagattttagttgtggtggtgtatgttttagttaaaagtaaattttggaaaattttgtttaagaatagggtttttatttataaatgaaaaataataatagtgttattttatttatatgaaatttgttataattaggtattatgatttatatggatatatagtgagatttttataaagaggtaaaaggagagttttggttattgagataaaagatatagagatattgggatatagagaggtataatgggatgtggagttggattgagttgttttgtaaggaatattggaaggggtggggatattattgggagatggtataggtttaggatattaattaggttttggttgagattagataaaggaaattgtttgtaagttgtttatttaaaaagaaaggaaaaggtgtgtttgagtttaggagattgtgagttttagagtaggaggtgggagttagtgaagggtgggtgtgtaaggggtgtagttgttttttttgttgggtaagagatttttttttttggtagtttgggttttttgtttttttattttttgtttttttttttttgagttttaagggtttgtagggtttttagtagtaaagttattggttttgtgtttttgtgtttttttgtgttgtgttttggggtgtaggtagggattatgtggttggtgtgggggtggtgttatttgtagtagaaagttttggtgtggattgtgtggtgtaggaaagtgttttttttgtttttagttgtagagggtttgggtagtattgggtgtggttttgggagagtgtgtttgtggtgttagtggttgtagggtgatttgttttgggtggggatatttattagaagaatatgtgtgagtagaggtttgtgttttgtagtgggttgggttttattttttggtatatgggtagtattttgttgggtggggtgggtgtgggttggggttgtgttgattaggtggtggtggttgtgggttttgtttttggattttaagtagggatgttggggttttggttgttatgtttgtttgtttggttggagtttgtgaagtagttgtttttgggagttgggtgttggtggtatgttttgtttttgttttttaggtttgttgttttgggggtgtttgttatgtgttgttgtttggagtttgggagttgtgtattgtgtgtgagtgtggttgggattgatgggtgatgtggtgggaggagatgtggtgggaggaggtgaagttggtgatgttaaagggagtttagagttatgtttaggggtgaggtgagggttgtttgtgttgttggatggagagggtagtagagtgtgtggtaaggaggttgggtttggaggtgtttatgtgtatgaatttgagtgaaattttttgaaatttattatttgagtttaggtgttgatatagaaggtggagtagggaggtgttggttgtgtttgtttttgtgttgtagaaatgtttttttggttatgggtttgggaagattgggagatagttgttttgtgttttagtagtttgttttttgggtgtttttttttttttaggattaaatgatggtgttatgggaggttttttaatttgtgagttaaatatttgattttggatgatagtaaagtttagttatagattatttttgtagagttgtaagattttaagaaagttgggtaatttgagagtatgatttagatgaatttgggagatggatgaatgttgttgttgatgggggtgggttttaggtattttatatgttgtatgttatggtggatttttgagttttttgttgtttttttagattgggaaaggaatataagaggaaagagagattgtttgatgatttttgttgttaagttttaaagtttaatagataatagtggtaaatgatatgtgggttttagaatattagtgatgtttatgtgtatttttgagtgtgtagttttattagtgtgtgtgtgtgtgtgtgtgtgtggtagttttatatatagtgttatgattatggtttattgtatttttgattttttagggtttaagtaatttttttaatttagtttaagtagttaggattataggtatttgttattatatttggtttatattttgtaatttttgtagagatgtaaaaattaaaattaaaggttttaagtttaaatattgataatttttgaagttaaatgattgttatggaggtttattttttttatattttatgtatgtttgagaatttggttttttttgtaataagattattttattgttttttgataattttttattttgttgtttaggttggttttaaatttttaggtttaagtgatttttttattgtggttttttaaagtgttaggattataggtatgtattattatgtttgattaattattttatttttaattttattagtgttttatttaaggttatttttattttatagatgaggaaggtgaagttgaaaggtagaatttgtttagttttagagttaagaaaggataaaatatgatttgtaataagtttatgtttaagtatggtttgtttttttggtggatggttagtgtgtatgagaagtgtttagaatatgttggttgaatggttgtaggaatgaatgaataaaattttgttttaagtttgtgtatttttatttttaagtttttagttatttttgtggttattttaataaggttagtagttgttttttatatttattttgaatgaaaaaaaatgaaaggttttaagtttatggtgtttggaataagattattttattgttttttgataattttttatgtatatttgttaaaatagtatagttaatagtttttaaagaaagttttatataaatatatatttaaaagttaagtataggttagttagtatagtgaggttttgtttttattaaaagttttaaaaattagtttaggtgtggtggtgtatttttgtagttttagttatttgagaggttgagataggaggatggttttagtttaggagttttaggttataaggagttaagaaggtgtttattgggttgggtataatggtttatgtttataattttagtattttgggaggttgaggtaggtgaattatttgatgttaggagtttgagattagtttggttaatatggtgaaattttatttttattaaaaatataaaaaattatttgggtgtggtggtggatgtttgtaattttagttatttaggaattttaggtagaagaattatttgaatttaggaggtggaggttgtagtgagttgagattattttattgtattttagtttggtaataagagtgaaattttgttttaaaaaaaaaa

SEQ ID NO: 601 - DNA, 6143 bp, Artificial Sequence
  chemically treated genomic DNA (Homo sapiens)
ttttttttttgagatggagttttatttttgttgttaagttggagtgtagtgggatgattttggtttattgtaatttttgttttttgggtttaagtgatttttttgtttgaggtttttgagtagttgggattataggtatttattattatatttagataattttttgtatttttagtagagatggggttttattatgttggttaggttggttttgaatttttgatgttaggtgatttatttgttttagttttttagagtgttaggattataggtgtgagttattgtgtttagtttagtgggtatttttttaattttttgtagtttggaatttttgggttaaagttatttttttgttttagttttttgagtagttgggattataagggtatgttattatatttgggttaatttttaaaatttttggtagagatagagttttattatgttggttagtttgtgtttgatttttaaatatgtgtttgtgtaaggttttttttaaaagttattaattatattattttagtaaatatatatgggaaattattaaggaataataaaatgattttgttttaagtattatgaatttggagttttttatttttttttatttagggtggatatgaagagtagttgttgattttgttaaggtagttatagaaatgattgaagatttagaggtgggagtatataagtttggaataagattttgtttatttatttttatagttatttaattagtatattttgggtattttttatgtatattggttatttattagggagataggttatgtttagatataggtttattgtaaattatgttttatttttttttggttttaagattggataagttttgttttttagttttattttttttatttataaagtaaggataattttgaatggggtattgatagaattaaaagtgagataattggttgggtgtggtggtatatgtttgtaattttagtattttgggaggttatggtgggaggattatttgagtttaggagtttgagattagtttgggtaataaagtgagaaattattaaggaataataaaatgattttattataaagaaaattaaatttttaaatatgtatgaaatatgaagaaaataaatttttatgataattatttggttttaaaaattattagtatttgaatttggagtttttgattttgatttttgtatttttataaaaattataaaatatgagttgggtgtggtggtgggtgtttgtagttttagttatttaaattgagttgggaggattgtttgagttttgggaggttgagggtgtaatgagttataattgtgatattgtgtgtgagattgttatatatatatatatatatatatattagtgaggttatgtatttagaaatgtatatgaatattattggtattttggaatttatgtgttgtttgttattgttatttgttaggttttagggtttgatgatagaaattattaggtagtttttttttttttttatattttttttttaatttaagggggtagtaaaaagtttagaggtttattgtagtatgtaatatgtgagatgtttaaagtttgtttttattgatgatagtatttatttattttttgaatttatttgggttatatttttgagttatttggtttttttgaggttttgtagttttataaggataatttgtggttaaattttgttgttgtttaaggttaaatgtttggtttataggttgaagagttttttatggtattgttgtttggttttgagaagggaaaggtgtttagggggtgggttgttagagtatgaggtagttgttttttagtttttttaaatttgtagttgagggggtgtttttgtggtgtaggggtgggtatagttgatgtttttttgttttattttttgtgttggtgtttagatttggatagtgaattttggaaagttttatttgggtttgtgtatgtgggtatttttggatttggtttttttgttgtgtgttttgttattttttttatttagtggtgtaggtggtttttgttttatttttgggtgtagttttgggttttttttggtgttgttagttttgtttttttttgttgtgtttttttttgttgtgttatttgttggttttggttgtgtttgtatgtggtgtgtagtttttgggttttaggtggtggtgtgtagtgggtgtttttgaggtggtgggtttgagaggtggggatggggtgtgttgttggtgtttggtttttggaagtggttgttttataggttttagttgagtggataggtgtggtggttggagttttagtatttttgtttgaggtttaggagtggagtttgtggttattgttgtttgattagtgtgattttggtttgtgtttgttttgtttggtaagatgttgtttgtgtattaggaggtgaagtttaatttgttgtaggatgtgaatttttgtttatgtgtgtttttttggtgagtgtttttgtttgaaataggttattttgtagttgttggtgttgtggatgtatttttttggggttgtgtttgatgttgtttaagttttttgtggttgggggtgaggggagtgtttttttatgttatgtggtttatgttggggttttttgttgtgggtggtgttgtttttatgttggttgtgtggtttttgtttgtgttttggggtgtggtgtagggggatgtggggatgtggggttagtggttttgttattggaggttttgtgggtttttagggtttgggggaggaggagtaggaggtggggaggtggggaatttaggttgttgaaagggggagttttttgtttagtgggagaagtgattgtattttttatatgtttattttttgttggtttttgttttttgttttgggatttgtagttttttgaatttaaatgtatttttttttttttttttaagtaagtagtttatgaatagttttttttatttgattttagttaaagtttaattagtgttttggatttatgttattttttagtagtgtttttattttttttgatattttttatgagatagtttgatttaattttatgttttgttgtatttttttgtgttttggtgtttttgtattttttgttttagtgattagggttttttttttgtttttttgtgggaattttattgtgtgtttatgtgggttgtggtatttagttatggtaagttttatgtgggtaaaataatattattattattttttatttatgaatggggattttgtttttgaataagattttttaggatttgtttttaattgggatatgtattgttatgattggagtttgtttttgattagttttttttttttgtttttaatatttttatttttatgtaggaggatagtttggaggtggggtttttggaattgttaatttttagagaggtgatttatggttttgatgtaggtggtttttattaggagttttatttttttaaaattattttagggtttttgagttgggagggtttatagttttatttattttgtgtaaggaaataaatggagaaagatttgggtgatagtagtaattaaaatttttattttggtttggtgtggtggtttatgtttgtatttttgtattttgggaggtagaggtgggtggattatgaggttaggagtttgagattagtttggttgatatggtgaaattttgtttttattaaaaatataaaaattagttgggtgtggtggagtatgtttgtaattttagttatttaggaggttgaggtaggggaattgtttgaatttagtaggtggaggttgtagtgagttgagattgttttattgtattttagtttgggtgatagagtgagattttgttttgggggagtggtgggtgtgtgtgggggaattttgtttgttaattatataagtttgaatttttgaagggttttaattttatttggatgattattagattttttgttttttgatttttgttgttttattttttttatatgttgatattgttttttattatgggataatttagggtgggggtttttaattttttgggttttttgggttatattggaagaattgttttgggttatatataaaatatattaatattaattatatattaatattaatgatagttgatgagttaaaaaaaaattgtaaaaaaaaatttgatgttttaagaaagtttatgaatttggtagtttatgggttttaggttggataagtttgatttaggggattttaagaggatgagttgtttatttttgttttgattgtggtatatttagtgggtgtaggaattttttttggttgtttggtggttttttttttaaggagaggggtatgtggaggaggaaggaatatgggtgtggtttttgtaaataataatttgaggtagataaatggtttttttaattttaggtagggtaaggaattttttttttttttttttgagataggattttgttttgtgtaagttgtgatttaggttggagggtagtgatatatttatagtttgttgtagtttttaatttttgggttgaagtaatttttttgttttagttttttgagtagttggggttttaggtgtgtgttattatgtttggataataaaaaaaaattttttttgtagagatagggttttttatgttgttgtttaggttggttttgaatttttgggtttaagtgttttttttgttttggttatttaaagtttgggattatagatgtgatttttgtttttttatatttttttttttttgtatttttaaaatgtaggtggtagggaaataggaagtgatgtgtttttattgatgatttgagtaggtgtttatttttggtttttttgatggaagggaaggagttagtagatttttgttttattttgaggatatttaagttgagagtggttaagttgtttggatttatataataattaagtgttagagtaggttttaaagttgggtagattggttttttagtttttttggagttgttgtattgagttgtttttagtttaggtgttgttggaaatgtatggagaaggtgttttttgttttggaaggttagagttttttaagggaaatttttaaagtatttgtagttggagatgatgtatgtgtaataattattagtgtgttttagggtagttgtttttaaagtatagtatttagagtagtagtattggtattatttgggagattttaagagatgtagattttttagtatttattttggattgatttagtaaaattggaaatattgggtgtgtgggtgggggtggtgaggttttaagtgttttaggtgattttgatttgaggtgtttattgtttttagttattttttttattggagtattattatagtattatgtttttttttatttttaattgttaaaatttttttattttttttttttgagatggagtttttttttgttgtttagttttgttatttaggttggagtgtagtggtgtaatttttgtttattgtaatttttgttttttgggtttaagtgatttttttgttttagttttttaagtagttgggattataggtgtgtatttttatatttagttaatttttgtatttttggtagagatggggttgtattatgttggttaggttggttttgaatttttgattttaggtgatttgtttgttttggtttttaaaaatgttgggattataggtatgagttattgtgtttgggttagtttgagggattttaaagtttgaggttttatagtgagaaaataataataattattatttgaggaatgtggagtttttttaaattattaggtttagagagatattaaaatgatatagtagttattttgtagtttttatttttttgagttatttatttattatttgaaagtattttatattgttatatagttatagattaatttaatagtgttttaaggatattgtaatttatagtttaggagtttgagttttagtgatttgtttgttttggttttttaaagtgttgggattataggtatgaattattatattgggtttgtagtaaatttttgagttatattttgtgttttagttttttgtttttaggttagtatttgtgtattttttttattgttagtggaaagttgaaatgagtttatttaggaagtggttgtttg

SEQ ID NO: 602 - DNA, 6104 bp, Artificial Sequence
  chemically treated genomic DNA (Homo sapiens)
aaattttttaaaagtataattggtaatgtaaaggttgaattttagtttatattttttttgtaggtttttagaattgtttttaggtttttagagttggatagattttttatggttattttttaaagtttttttttatagtgtggaggtttagaattagaagagtaatgtgtttggttattattgtagagataggttagaagttagttttttgtggtttatgtagtgtgttttaggtgggtgtttttttttttttggaagtattaataattttttatatttggggttatatagttattgttgggattatttagttttttgttttagttgttgtttttgttattattaagatttttattaaaggtagagtaggggaaaggttttaaaaaaataaagttatttattgtagaagttttttttttttaggttttttataatatttttttttagattttggagaagaggtaattgtaattagaggttttatttattgatagagttttttttgttaggggtggaggggaggtggttatagatttaaggaaaattttatttttttttttggttggtgatattgattatttaagatttttaattttgttttgttttttaattttggtaaagttttttagtgttattagtaagagaaattgttttgttttataagtggatttttgaaggttgatgtttttattagaattagaagggattagggtaaagtatagggtagtaaaagggaagaaagggtgataaaagtaatttgggaagtatggagtttagagagatttagaggattaggttatgagagaatagggagaagagaaagtattaaaagttaaagtgtagttttagagttttaagaagatggggattatttgtattatagattaggaaatttggtttttttgttgtatagttttttaattggttgttttgtgaaaaatttttaaattgttttgttttttttggtgaaatgggagtagataaggatttataaaatgttttattataggtaggttgaaggtgttttaataatttatagaatgaatggtttttgagtttgtaaaggtatattttttaaaaaaatatagtagttaaatgtttttttgtaaatgaaaaaattaaaattttgagagaaataaattaatttgaaggtgttttttaagtttaaaagtaattaaagttttataggtttgttgaaggagattgttaaaattttaaattggtttaggtgaaattttttttaggtataggtattttagtggaggttagttttaggttgagttttttatgaaatttgtttagaaaagtaagagatgaaatggagtaagggaattggaatttttataattttttttgtagtggaaggtgatttttttgatttttagtatggattttttttagttttgtttttttttttttataatatttaatttaatgtattgaatttttttttttgaatttagtgtaaagtatagtggtggatttttaggggatatttggatggggagaggtagggtgtgtatatagggttaagaattttttgtttttgggattataagtatgggaagtttagtattgtaagttttttgttgttattgggtatggtggtgtaaggtatagttttattagtgttgatgtgaatggagttgtgaagtgtataatttgtttagtttttatgttgaggttaggtttttgtttatgtagttgtttagttttggttttttggttataaatttaaagttgtttggttaagagtttttttatttattgtttttttttttttaatttttgttatttaagattttttatagaattatagtgagggggagaggagtgtagttttttatatggaaggtgatatgtttttttgatttatggatttggaaatttttgtggggtaggggtaattgaggggtgttatttttgtgggttttttgtaagttttttggttgttttgggtagggttgggaggggttattaggtggtgtagttggagtttagtgttttagtaggtgtgggtagtgtggaaagtttgtgagtgggagttttgatgttgggtgtggagatgtgggggaggaagttggtgggtgggtgttggttttgtgaagagttttggttttagtagattttattggatgagttttggttttgtggttgtttttttattattttttagttttagttttttttttgaaattttgggtgtagtgtgttgggtgttttggatatgtttgtttgttgtgttggtgttttgggattttggttgattttggtttttttttgtttttaattttttttggggtgttggggtgatgggtaggggttttttttttaagaaaggatataggtgtttttgagggttatggttgtttttatttattgtggagttttttttgttttgtttagggtgtttatggttgtggtttgtgtttttggtgttggtttatttagtgtggttgggtgtggtgtattgtttttgttattattgttgttgtttgttggtttttttttttttgggttttgtagttttggtgtttgttagtttttgagtttggtgagtttgattgaggtgtattgtaggtataaattttgtgtgagtgtgttttttttgttttgtgtgtgtgtttatatttgtttggtaattatttgatatgttgatgttggtggttgtaggaaatgtgtggtgttttgttgtttttttttgaaatttgttttttttttgtgggtgttttggtttgtgttttgtgtggtttttttatttttgtttgtttttgattttttttggttaaagggttaagttttaggggagttggagaggagtgggtttttggttattatgtttgtgttttgtagggtatttgtgtttgttgatttttattttagtttgggaaatgggttgtgtttagtggtttttatgggatttttttttttgtagttgatttgtagtttttatgtttttttttgtggttgttgtttggagtattgtagtgaggatgtttttttttttttagggttttttttgtatatattagagtgtggagtttggtaggggaaaggaatggaaagatagttgtgaagttgttttaatttgtgttttggggtttttaggtagttgtttgtaggattgggttgtagatatgtgttttgtgttttgtgttttgtattttggatgagggttgtttgtgtggaggtgtgttttataggtgtgatttatatttggtttagatgtggttgtttggtgttggtgggtgtaggagatgtggggataatttttatataatgttagtgtgtatagaagatttggttaagaggggtggtttatttgttgtttgtttaggtgatagtgttgataattttaatagttaatgattgagtgtggttgtgttaagtgttttttatatattattttatttaatttattttttttgatataaagagattattgttgtaaagatgagaaaatgaaggtttagagaatgttatgttttagattatataattaataaatagtagagagatttttgatttggattgaggtttgtttgattttttgtaattattgttggattgttttaataatatatttattattatggttatagattataattttagttatagttatagttgtttttttggttatagtgttttggattttaaagtttttttttgttttatttatatatttttttatatttatatgttattttgtttttaaaatagaatttgagatagtttataagagtatataatttataaaaagaagtgtgtgaaatgaaaaatgaggtatataagatggagttaaaaatgaatattatttgaaataaatgtattttatagagttaaatatttttgttataggtgggattaaaatttgttttttgtatttttagtagttaagtttaaagagaggttttgtttaaagtttaatttttattatatgtaagattaaaaataaaattgtttaagagaagattttttttttttgatattgagattagtaagaaatttttttagagaatttttatgaatattgggtgatataaagaattaagtttttagttatagttatagatgtagaaggggtaggtgaatgttaggagaatattaaatgatgatatttttttttatttattgggtttaaggtttaaatatttttagagttatttattatatatttttttttatgtaagttttataatttaaataattaagttggtggatgtttgaggatggtaaagatttgtatttatatatgaatttatttgattattttttaatagttttaagtttgtagttttagattttgtttatagagatttttttttattattaggtgaataattattttttattgatttttttattatagaatgagttttttattttatttaaatttataatatttatatttttaattgttatataatattttgtgtttttgttttatttttatagttaaattgtaaattgtttgaggttaagaattaggttttatgtttttttagtttttatagttgttaatttgaggtagtatttgtgggatattattaatgaattgttgtggatttgattttgaaaagtaaaatgtgttgattttaaagaagaaaataagattttttttgattatttttggagaaagggttttagtttttttttgaagtttgttgtttatggtaggagtgataagtttattggtattgtttttggtggtttttgtgggatttttattataggttatttgaggtttttggtatttttttattgttttatttttgaaaatagagttttttttatgttatttattgtattgagtttttggatagtaaaatttttgtgtgtggtaggggaataatttagttttatattgtatatgtataggtatgtatgttaaatggatgtttttatgtaaatgtattattatatttatatgtaaatatatatatatgtataatattaagtgtatatgtaggtagttatatatatttgtatatttatagtttatatatatataaatggttgaaattaaggttattaatttatttaatatatgagttttgttgagttttttaaagaaagaggtttatatatgtttagtgagtgttttttttttggattttttgagtattttgtattttatttgtatttgattttgtttttgggtttttttgagtttttttttgaggttttttggttatttttatttgagtaataagttttttttaaatatttaaaaaatgagaagtttgtttatgttttttttaattattggttatgtgattagtttgtttggtgttatatgaggtatttttgattttaagaataaatttttttttttttttataaaatatattatttaatataatatttttataaggtagttaatgaggataatatttgtgtttttaaaaaaattattatattttaagttttgggatatatgtgtagaatgtgtaggtttgtaatataggtatataagtgttatggtggtttgttgtatttattaatttgttatttatattaggtattttttttaatgttattttttttttagtttttatttttagataggttttagtgtgtgatgtttttttttttgtatttatgtgtttttattgtttaatttttatttatgagtgagaatatgtggtgtttggttttttatttttgtgttagttggttgagaatgatggtttttagttttatttatatttttgtaaaggatatgaatttatttttttttatggttgtatagtattttgtggtgtatatgtgttatgttttttttatttagtttattattgatgggtatttgggttggttttaagtttttattattgtgaatagtgttgtagtaaatatatatgtgtatgtgtttttatagtagaatgatttataatttgttgggtatatatttagtaatgggattgttgtgttaaatggtatttttggttttagatttttgaggagttgttatattgttttttataatggttgaattaatttatttttttattaatagtgtaaaagtgtttttatttttttatattttttttagtatttgttgttttttgattttttaatgattgttattttaattggta

SEQ ID NO: 603 - DNA, 6104 bp, Artificial Sequence
  chemically treated genomic DNA (Homo sapiens)
tgttagttagaatggtaattattaaaaagttaggaaataatagatgttggagagaatgtggagaaatgggaatatttttatattgttggtgggagggtaaattagtttaattattgtggaagatagtgtggtaattttttaaggatttagaattagaaatattatttggtgtagtaattttattattgggtatatatttaatggattataaattattttattataaagatatatgtatatgtatgtttattgtagtattgtttataatagtaaagatttggaattaatttgaatgtttattaatgatagattggataaagaaaatgtggtatatatatattatggaatattatgtagttataaaaaaggatgagtttatgttttttgtagggatatggatgaagttggaaattattatttttagttaattaatataggaatggaaaattaaatattgtatgtttttatttataagtgggagttgaatgatgagaatatatggatatagggaggggaatattatatattggggtttgtttgggggtgggagttaggggagggatagtattaggagaaatatttaatgtagatgatgggttgatgggtgtagtaaattattgtggtatttgtatatttatattataaatttgtatgttttgtatatgtattttagaatttaaagtataatgatttttttaaaagtatgaatattatttttattagttattttataagaatgttatattaaatgatgtattttgtgaaaaaaaaaaaaagtttgtttttgaggttagaggtgttttatataatattaggtagattaattatatggttgatgattaaaagagatatagataaattttttattttttagatgtttggaaaagatttattgtttaggtaggagtagttagaaaattttaaaaaagagtttgagggggtttagaagtagaattagatgtaagtgaagtgtagagtatttagaaagtttaagagaaaaatatttgttgggtatatgtaggtttttttttttagaaaatttagtaagatttatgtattgaatgaattaataattttggttttaattatttgtatatatgtggattgtaggtgtgtagatgtgtgtaattgtttatatgtgtatttagtattatgtatatatgtatatttatatataaatataatgatgtatttatataaaggtatttatttggtatatatatttatgtatatgtagtataaggttggattatttttttgttatatataaagattttgttgtttaaagatttagtgtaatgaatggtatggaaggggttttatttttaagggtgaagtaatagagaaatattgaaggttttggataatttgtgatggggattttatgaaagttattggggatagtgttagtaagtttattatttttgttatagatagtggattttaaagaaaaattgaaattttttttttggaaataattaggaaggattttatttttttttttgaggttagtatattttgttttttaaaattaaatttatagtagtttattagtaatgttttataggtattgttttaagttggtagttgtggaagttaaagaagtataagatttgatttttgattttggataatttatagtttagttgtggaggtaagatagggatatagaatattatgtggtaattgaaagtgtaaatattatagatttaagtagggtaaagagtttattttgtagtagaggggttagtgaaaagtaattgtttatttggtaataagagaagatttttgtgaataaagtttaagattgtaaatttaggattgttgggagatagttagatagatttatatatagatataaatttttattatttttagatatttgttaatttggttgtttaggttgtagggtttatatgaggaagggtgtataatagataattttaaaaatgtttgagttttagatttagtgagtgagaaagagtgttattatttaatatttttttgatatttatttgttttttttgtatttgtggttgtgattgaggatttggttttttatattatttagtgtttatgaggattttttggagaaattttttgttggttttagtattaagaaagggggatttttttttgagtaattttgtttttggttttgtatgtgataggaattgaattttagataaggtttttttttaaatttgattgttagaaatgtaggagataaattttggttttatttgtagtaagggtatttgattttatgagatgtatttattttaaatgatgtttatttttggttttattttgtgtgttttattttttattttatatatttttttttgtaggttatgtgtttttgtaagttattttgaattttgttttaaggataaggtagtatataaatataaggaaatatataaatgaaatagaggaaggttttaaagtttagaatattatggttaggaagataattatgattgtggttagagttatggtttgtggttgtgataatgagtgtgttattagggtagtttagtagtgattatagggagttagatagattttagtttaagttagaggtttttttgttgtttattagttgtatgatttaaggtatagtattttttaaatttttatttttttatttttataatagtgatttttttgtattagggagagtggattaaatgaggtaatgtatagaaagtatttagtataattgtatttaattattagttattgagattattagtattattatttggataagtagtggatgggttgttttttttggttaggttttttgtgtgtattgatgttgtatgaaagttgtttttatattttttatatttattgatgttaggtggttgtgtttgggttagatatggattatgtttgtggagtgtatttttatataggtagtttttgtttaaggtgtagggtgtagggtatagggtatatgtttatggtttagttttgtagatggttatttagagattttagggtataggttaaggtaattttataattgtttttttgttttttttttttgttggattttgtgttttgatatatataggagaggttttggaggggagaaggtgtttttattgtagtgttttgagtagtggttgtaggaagaggtgtggaagttgtgggttggttgtgggaaagggggttttatgggagttgttaggtgtagtttgttttttgagttgaggtggaggttgatgggtataggtgttttgtaaggtgtgggtgtggtagttgggagtttgtttttttttaatttttttgagatttaattttttggttaagagaggttgaaggtgggtaggggtgagagaattgtgtgaggtgtaggttggggtatttgtggaaagggggtaggttttggggaagagtggtggggtgttgtatgttttttgtagttgttagtattagtgtgttaggtggttgttaggtgggtgtgagtgtgtgtgtgaggtagagggggtgtgtttgtataaagtttgtgtttgtggtgtattttggttgggtttgttgggtttgagggttggtgggtgttggggttatgaggtttgggggggagagagttggtaggtggtggtggtggtggtgggggtgatgtgttgtgtttggttgtgttaggtgagttggtattgggagtgtgggttgtggttatgggtattttgggtaaggtgagagaggttttgtggtgagtagaggtggttgtggtttttgggagtgtttgtgtttttttttgggaaagaggtttttgtttgttgttttaatattttgagggaagttgagggtggaggggggttggggttggttggagttttgggatattagtgtgatgggtggatgtgtttagaatgtttggtgtgttgtgtttggggttttggggagggagttggggttgaggggtggtagaggggtggttgtgaggttagagtttgtttggtgagatttgttagggttgaagttttttgtggagttggtgtttgtttgttgatttttttttttatatttttatgtttggtattgggatttttatttgtggattttttgtgttgtttgtatttgttggggtgttgggttttggttgtgttatttggtggttttttttggttttgtttagaatggttgaggagtttgtagggagtttgtagaggtggtattttttggttgtttttgttttatggaagtttttagatttgtgggttagggaaatatattgttttttgtatgggaagttgtattttttttttttttattatgattttatagagggttttggataatagaagttgaagaaagagggatagtgagtgaaagggtttttggttaggtagttttgagtttgtagttaaaggattagaattaggtaattgtatgaataaaggtttggttttggtgtaggggttggataagttgtgtattttataattttatttatattgatattgatgggattgtgttttgtattattatatttagtagtggtaggaagtttgtgatgttggattttttgtgtttataattttaggaatgaaggatttttggttttgtatgtatgttttgtttttttttatttaggtattttttgagggtttattattgtattttgtattagatttagaaggaggagtttagtatattaaattgagtattgtaaggggaagaggatgggattggaaggaatttatattagaagttaagagagttattttttattgtaaagaaagttgtggaagttttagtttttttgttttattttattttttatttttttaggtggattttataaaaagtttagtttgaaattgatttttattgagatatttatgtttggagaggattttatttaaattagtttagagttttgatggttttttttagtaaatttatggggttttggttatttttaggtttggaaaatatttttaagttaatttgttttttttggggttttggtttttttatttataggaaaatatttggttattgtatttttttaaaaaatatgtttttatagatttagaggttatttattttatggattgttaaaatatttttgatttgtttataatagagtattttataaatttttgtttatttttattttattagaaaaggtagaatgatttgaggattttttataaggtaattagttaagagattgtatagtaagaaagttaggttttttagtttatggtgtagataatttttatttttttagaattttgaggttgtattttggtttttagtatttttttttttttttgtttttttatggtttagttttttgagtttttttgggttttatattttttagattgtttttgttattttttttttttttttattattttatattttattttgattttttttagttttggtaaaagtattaatttttaagaatttatttatgaaataaagtggttttttttattggtgatattaggaaattttattagaattagaaaatagggtaggattaggagttttgaatggttagtgttattaattaagaaagaaaatggaattttttttggatttgtagttattttttttttatttttagtaggaagagttttgttagtagatagagtttttagttgtagttgttttttttttaaggtttagggagaagtattgtggaaggtttgagagaaggagatttttataatgaatgattttatttttttaaaattttttttttattttgtttttggtggaggttttaatggtgataaaggtagtagttggggtagaaagttgagtaattttagtagtggttatgtagttttaggtgtagagagttgttagtgtttttaggaagggaagggtgtttatttggggtgtattgtatgggttataaggggttggtttttagtttgtttttgtagtggtggttaggtatgttgtttttttgattttggatttttatattgtagaagggggttttggaaaatgattataaagagtttgtttagttttagggatttgaggatagttttgagggtttgtaagaggaatatgggttgagatttagtttttatattattagttatgtttttgaaggattt

SEQ ID NO: 604 - DNA, 6104 bp, Artificial Sequence; identical to SEQ ID NO: 602
  chemically treated genomic DNA (Homo sapiens)

SEQ ID NO: 605 - DNA, 6104 bp, Artificial Sequence; identical to SEQ ID NO: 603
  chemically treated genomic DNA (Homo sapiens)

SEQ ID NO: 606 - DNA, 6167 bp, Artificial Sequence
  chemically treated genomic DNA (Homo sapiens)
ttttggttgttaggatttgtttgagttttttttgttttaagagaattaggaagagtttggtgtttatattttgattttttttggttgggaagagtgaaaggagtgttggagttggtttggttgggtattttattgagaagttggggttggatattttattttagggagtttggaatgagagtgggaaaagttggggttgggggattttatgttaaagaagggtatggaatattaagggttagtttttagggaagatgaatttaagttttaagttaatagtatttgggtttttagtgtgtgggttatagggttgggagtagaagaggttaggattgagtaaagggtttaggttagggaggtggtttgtagttgttagatggaatagggggtatggttgtgttagtttgattttatgaggttttaggattttaggttagagttttttggatattgaggttgtagtagaggtagttagattggtttggatatagttagatgagattgtataatgttaggatgggtttggtgtttggtgttagagtgttttgtatattttgttattagagtatttttatggggtgaggagtttatttttatttatgtttgttttttttaggggtttatagtttgtgatagttagtttttaggttgaggatataaaatatggaattaatatatgataggttaataagtttagtttagtgtgtattttttgtgtatttattatgtgtatggtttttgattttgttttagttatttaggggtttttagttaagagttggtttttatttttttaaaaattatttttggttttttagggaggaagttgtttgtttggatattggtaaaatggttttttgttgaaattaattttttattagatattagttagtttagttaaatagatggttttgtagatgttttttaatttaggtattttgtatatgtttagtagattgagttaaagttttttgtaggtttaagtttggttatagaatggtttggagttagatttattatgttaggttttgtggtttatgttatggggtatttaagttaaagagaaatatggagtagttgttggtattattgattttatttaaagattgagaaaagaaatagtgatgaatttttgtatatatgtgtagttggaaggagtaggatttagttttttataggagttaaagttggtttagaggtaaatggaatttatataaatatatgtgatttaagtatgagtttttaatagaaatttgtgttagattattatttgttatttttaatttggttttgtttttttgtgttaggagggttgtttttgtgaataaatttgaggatttttgattagtagtgttttggggaaatagttttgaatatgagtgtattttattaattagttttgtattgatgttttttttatgatttattgttaggatgatttaatatttgggttaagagttggatgatttgaaattaatgtagggttttatttttaggaatttttaggtattggatgaattttaggtttgattttgttattgatttattttgttgttgggtaattttttttttttgttttttagttttttggtttgtaaaatgggaaggttgtatttttgaggttttgtttgattttaatatttggtgatttaaatagttttgtttaggtgggtataatttagatttaattgtgatttgtttagatttaattaaaatgtattgggtgtttatttttatatatattatttaatgtagggtttttaaaattttagaaaggtaggtgttattatttttattttgtagattataaaatggaaatttagagaagtttagtaagttaattgaagttatatagttaggaagttatatagttgagatttagttttaggtttgtttgtttttatgtttagggggttgagaatagataatatgagtttatgttaatttggttttttttattttttattttttgtttatttaggagtttagttttgtgatttagtgtagtgggttgagggatggaggggggatttggttggggttggggtttgggttgtaggttttgggtaggtatgggtatatgggtagatattggttggagaggggtaagttttgaagggttgagagtaaattttttagtttggtttgggattggtttttttatatgagttttttaggttttatttgagttgaagtttaaggagttgtttgttttttgtttttttttttatttgggagtttttgtttattatatggtttgttatttttagggatttatttttaaaaatttttgtttatattttttagtttttagaaattattttttaatatttattggttgaaggtagggaaggaagagatgtgttagagagattgagtttggatttttgttttgataattgggaggaagattttaagtgatgtttttattttaattaatttaattattattagtttgtgtttttatgtagtagtggtttttgagattttggttgtttttttagaatattgggatggttttaataatttgtatgatgttgggtaagtgaatttttttttttgggttttagtgtttttatttaggtaattattagttgttaggttttatggatggaaggtttttgtttgtagtggtattttaggatttattattatttgttttatttttttagtggtaagggattggattagatgtttttggaaagtgtattaagtttaaaggtggttttttttgtaggtgttttttttttttttatgttagaggtttatttttattttgtttgggttttttgttagagttaggtttggttttttagttttgtagtttaggaaattagagtgtagtgttatagttgtgattgtggtggtggtggtggtgtagggggtgggggaggagagaagtgtttattttgttttgttgtttttgtagtagttttggttttagttttggtgtattagagtggtttttgggaatttttgggtttgttgttttggtggttgttagttgggagtttattattgtttgatggtattgaattgatttgtgtagttttataattttagtttaattttgaggagttagtgtagattgttttttgtttttagttgtggtgaggtaagggttggtagtgtttggatgtttttgttttgttttttttatgtttaagtgtggggaattatatgtttttggtgtagaatagatgattggggttattagggttgggtggtgggagtgggggttgggagtattatttttggttggatgtgtgtttagatttattgtttttggtttttaggattttatttttttttgtatttttaggtgttggtttttttgtatttgttttttatggggtttgtttggtgaagggtagttgtagtttatatttattttttgtttttaatttttgttttttttgtttgttgtagttatttgtttggttgggagtaagtttttttttttgttgagggtgtagagagtgtttagggtgttaagagtagaggggttaaagtttaagtgttattagttagttgaaggttttgagtttttagggttgtggttgggatgtagggaggttaggatgtgatgtttgttttatttgtttttttagtggttttttggttgatagtgttggtttgggggagggtgtgtggttgtagatgtagttttttagtaggtaaagttttgagggttgtgagtttgagttgtttttgaagtagaagagtaggttttgtagtagtgtgaattatttggtttgttattttgtgttgtttgaattttgtttgtttaggtagtttttgtgtgtgttgtttttgtgtgttagtagttttagggatgtgatgtggttattatttagttggatttttttttgtatggtgtttagaggttagtgagattttatgtgtttatattttttttgtgtagtagttttttgtttgtgtgtgttgtgtgttgtttttttttggtgtttgtttgtttgttttttttagtttttttttttttttaaatatttatattttaggatttggtgttgagttgtggttttttgaatttagatatattattttttgttggaattttttttttgttttgtagagttttagtatttggaagatgttgtttgatttttttttggtgttgggtaaattgagggattggtgatttgtgtgttggtgaggggtaggtggagttatgtgatgttgattttttgaagagtttgttttagtagtgtggatagggatatatgtatgtagttttgttgaggtgtagagttgtgtgtaggttgtaatttggtgttttttttttttttttagatatatatatatgtatatgtatatgtatatatttaaattttgttttttttttttttattttttttttttttttttggatgttaaaaagtaaattagattaatttttgtttaatttaatgaaattttgaaggtttgttattttgggagtttgtgtttttgtgttttattgtggtgtattgtagatttggggttaagtgttagttgttatttttttttttaaaggtttgttttttttttttattttatttttaatatgaggtggaaggaggaaggtgggtggtgaaatagagttgtaaaagtgtttagttttagtttttgtatagttagttgggttatattgaattttagtatttggttgtatttttggtggtttttttagttatttgaggatagtatagggggtgagatggggtggtggttggtgaatgttggttattttattttatattattttattttgagagttgttataattattggtgttattttttgtgtattttgaggtttggttggtgagttgttgttgggagttttttgtaaatattttttaaagtttgaaggtgggttttaaatgtaggtgttggggattatgggagtttttaaatagttgtgttggtgtaatgatattttaatgatagattttttgtttttatttttagtttttatttgtttatatagttatatggtatttatttgagaatgttatagtgtttgtatgttgtattgggagggtgtgtgggttgttgggtgagttgggagttggggtggggagtgtgtattgttgtttgttgtagagggtagtgagtttgttttgatttggagtaagttgtgtttggtttgggtgttttgtagtggggatgggtgtttgtgtagttttgtgaaggaaagatattatttttttgtatggaaattgtgtatattttttttttgatatatatatatatatatatatatatatatatatatatatatattttatatttatatatagtatatattatatatgtatagatatatattatatattatatatttatatattatatatattatatatatatattatatatattatatatatatattgtatatattatatataaattatatattatatatattatatatgtatatatatatgttatatatattgtatatataaatattatatattatatatatatattatatattatatattaatatattatatatatattatatatttaaatattatatatattaaatatatattatatattttatatatatattattttttatatttttttatattttattatatatatgttatatatattatatatagatattatatatatgttatatattatatatatattatatatatattatatattatatatatattatatatatgttatatattatatatatattatatgttatatatatattttttatatttttttatattttttgttatatatatatataatttatattatataaatattatatattatatataatatttttatattttttatattatatattatatattatatatattatatatattatatttatatattatatatatttttatatatttttatatattatatatatttatatttatatatatattatatattagattatatattatatatattatatatattatgtatattatattatatatattatattatatatatattatataatatattttttttatagattaaatttgggttgtatatatatatgtattatattttatataatatatgtagtatattatatatatatatatatatatatatatatatatattttagtttggagttttagggaagggt

SEQ ID NO: 607 - DNA, 6167 bp, Artificial Sequence
  chemically treated genomic DNA (Homo sapiens)
gtttttttttagggttttaaattagggtgtgtgtgtgtatgtgtgtgtgtatgtgtgtgtggtgtgttgtatgtgttgtgtgaggtgtgatgtgtgtgtgtgtgtagtttaggtttggtttgtgggaggggtgtgttatgtggtgtgtgtgtggtgtggtgtgtgtggtgtggtgtgtatggtgtgtgtggtatgtgtggtgtgtggtttggtgtgtggtgtatgtgtgggtgtgggtgtgtgtggtgtgtaggggtgtgtaggggtgtgtgtggtatgtgggtgtggtgtgtgtagtgtgtgtggtgtgtggtgtgtggtgtggggagtgtgggggtgttgtgtgtagtgtgtggtgtttgtatggtgtgggttgtgtgtgtgtgtggtggggggtgtgggggagtgtggggggtgtgtatgtggtatgtggtatgtgtgtggtgtgtggtatgtgtgtggtgtgtgtgtggtgtgtggtgtgtgtgtggtgtgtgtgtggtgtgtggtatgtgtgtggtgtttgtgtgtggtgtgtgtggtgtgtgtgtggtggggtgtgggggggtgtggggagtggtgtgtgtgtagggtgtgtggtgtgtgtttggtgtgtgtggtgtttgggtgtgtggtgtgtgtgtggtgtgttggtgtgtggtgtatggtgtgtgtgtgtggtgtgtggtgtttgtgtatgtggtgtgtgtggtgtgtgtgtgtgtgtgtgtggtgtgtgtggtgtatggtttgtgtgtggtgtgtgtggtgtgtgtgtgtggtgtgtgtggtgtgtgtgtgtggtgtgtgtggtgtgtgggtgtgtggtgtgtggtgtgtatttgtgtgtgtgtggtgtgtgttgtgtgtgagtgtggggtgtgtgtgtgtgtgtgtgtgtgtgtgtgtgtgtgtgtgtgtgttgggggaggggtatatgtagtttttgtgtggaaagatggtgttttttttttatagggttgtgtgggtatttatttttgttgtaaagtgtttgggttaggtgtggtttgttttgggttggggtgagtttgttgttttttgtggtagatagtgatgtgtgttttttgttttagtttttggtttgtttggtggtttgtgtgtttttttggtgtagtatgtgggtgttgtgatgtttttggataaatgttgtgtaattgtgtaggtgaatgagagttaaaaataagaatggaaaatttattattaaggtattattgtgttagtgtagttatttgaaggtttttatggtttttggtgtttgtgtttgaagtttgtttttaggttttggggggtatttgtagaaaatttttagtagtggtttgttaattagattttagggtgtatggggggtggtgttggtaattatggtaatttttaaaataaaataatataaaataaagtaattaatgtttattaattattattttattttattttttgtattgtttttaggtagttggggaagttgttgggagtgtagttggatgttggaatttaatgtgatttggttgattatgtaaagattaggattggatgtttttgtagttttattttgttatttatttttttttttttattttgtattagaaataaagtggggggggggggtgagtttttggaggagaaaatgataattggtatttaattttaggtttatagtgtgttgtggtggggtgtaaagatgtaaatttttgggatggtgagtttttggggttttattgggttaaatgaaaattgatttgatttgttttttaatatttgagggagagaaggggagatgaggggagggagggtagggtttgagtgtgtgtgtgtgtgtgtgtgtgtgtgtgtgtttggggagggggaggaggtattaagttgtagtttgtgtgtggttttgtgttttggtggggttgtgtgtgtgtgtttttgtttgtgttgttgaaatgggttttttgagggattggtgttatatgattttgtttgttttttgttagtgtgtagattgttagttttttagtttgtttggtattggaggagggttgggtggtattttttgggtattggggttttgtggagtggagaagaggttttagtggggaatggtatatttggatttaagaagttgtggtttggtgttagattttggagtgtagatatttggggggaggggagagttagagggagtgagtgagtgagtgttagagagaggtagtgtgtagtgtgtatggatggggggttgttgtgtggagaagatgtaagtgtgtggggttttgttggtttttgagtattatgtagaaggggatttggttgaatgatggttatgttgtgtttttgggattgttggtgtgtaaggatggtatgtgtaaaggttatttgagtaagtggagtttggataatataaaatggtaaattaagtggtttgtgttgttgtagaatttgtttttttattttgagagtgatttgagtttgtggtttttggggttttatttgttggagggttgtgtttgtgattgtgtgtttttttttaagttggtgttgttggttaaggagttgttggagaaataggtgaggtgagtgttgtgttttgatttttttgtgttttggttgtggttttgggggtttagggtttttggttggttgatggtgtttgaattttggtttttttatttttggtgttttaggtgttttttgtatttttagtgagaggggaggtttgtttttagttaggtgagtgattgtggtgggtagagggggtagggattgagggtggggagtagatgtgggttgtggttgttttttgttggatgagttttgtgggaggtgggtatagaggggttgatatttggagatgtagaggaagatggggttttaaggattagagatgatgagtttggatatatgtttagttaaaaatggtgtttttaatttttatttttattgtttagttttaatagttttgattgtttgttttatattgggaatgtgtaattttttgtgtttaggtatgggaagggtaagatggaggtgtttgagtgttgttagtttttgttttgttgtagttgagggtggagagtggtttgtgttagttttttggagttgggttggggttatggggttatatgggttggtttggtattattgagtggtggtgggtttttagttggtggttgttggagtaataagtttaaagatttttaaggattgttttgatgtgttggggttagggttagggttgttgtggaggtagtgggatgaagtgggtgtttttttttttttttgttttttgtgttgttgttgttgttgtagttgtggttatagtgttgtgttttggttttttgagttgtaaggttgaagagttaggtttggttttaatagggagtttgggtggggtgggggtgagtttttggtgtgaagggaggaggggtatttgtagagagagttatttttaagtttggtgtgttttttaaaagtatttggtttagttttttgttattaggaagataaagtagatgatagtggattttaaaatgttattgtaggtaggaattttttatttatagggtttaatggttggtgattgtttagatggggatattgaggtttagagagagaaatttatttgtttagtgttatgtaagttgttgaggttgttttaatgttttgaaaagataattgagattttaaaagttattgttgtatgaagatatagattggtggtgattgaattggttgaaataaaagtattgtttgaagttttttttttaattgttaggatagagatttgagtttagtttttttagtatattttttttttttttatttttagttaatgggtgttaggagatagtttttgaggattgggaagtgtggataggaatttttgagggtgggtttttggggatgataagttatgtggtgagtaggggtttttagatggaaagaagagtaaagagtaggtagttttttaagttttagtttaaatggagtttggggaatttatgtggaagagttagttttaggttagattagagaatttgtttttagttttttagaatttgtttttttttagttagtgtttatttatatatttatatttatttggggtttgtagtttaagttttagttttagttagattttttttttattttttaatttattatattagattatagagttgagtttttgggtaggtaggaagtgaggggtgggggaagttaagttggtatgggtttatattatttgtttttagttttttggatgtgaaggtagataggtttgagattgaattttagttgtatgattttttggttgtgtgattttagttaatttgttgaatttttttgagtttttattttgtaatttataaaatgaagataataatatttatttttttggggttttgagagttttatattaaataatgtatatgaaagtaagtgtttaatatattttagttagatttagatgaattatagttgaatttgaattatatttatttggatagagttatttaggttattagatgttaaagttgaatagaattttagagatatagtttttttattttatagattaagaaattgagaggtaaagaaagggagttatttaataatggggtaaattagtggtagaattagatttagaatttatttaatgtttaagaatttttgaaaatgagattttatattgattttaaattatttaatttttggtttaggtattgaattattttagtagtagattatgggaggaatattagtgtaaaattaattgatgagatgtatttatgtttagagttgtttttttagaatattattagttagagatttttaggtttgtttatgagagtagtttttttggtataagagaatagaattgggttaaaagtagtagatgatggtttggtgtaaatttttgttaaagatttatatttaaattatatatgtttatataggttttatttgtttttagattaattttgatttttgtggaaaattagattttgttttttttggttatatatgtgtataaaaatttattgttgtttttttttttaatttttgagtaaaattgatggtgttagtagttgttttatgtttttttttgatttgggtgttttatggtataagttatagagtttagtatgataggtttaattttaggttattttgtgattaggtttgagtttatgagaagttttggtttaatttgttgggtatgtatagagtgtttgagttgagaggtgtttatgaagttatttgtttaattagattagttggtgtttgatgaagaattggttttagtaggaagttattttattaatgtttaagtagatagttttttttttgaagggttagggatggtttttgaaggaatagaaattaatttttggttgggaatttttaagtggttggggtagaattagggattgtgtatatagtagatgtataggaaatgtatattaagttggatttgttagtttattatatgttaattttatattttatgtttttaatttagaagttgattgttataggttgtgagtttttgaggaagatagatatagataagggtgagttttttattttgtgaagatgttttaatagtgggatatgtaaggtgttttggtattaaatattaagtttattttaatattgtgtagttttatttggttgtatttagattagtttgattgtttttgttgtagttttagtgtttagggagttttagtttaggattttaaggttttatgaagttagattggtatagttatgttttttattttatttggtagttgtaagttatttttttggtttgggttttttgtttagttttgattttttttgtttttagttttgtagtttatatattgaaagtttaagtgttgttgatttagagtttgggtttattttttttagaggttggtttttggtgttttatatttttttttggtatggagttttttaattttgattttttttatttttattttaagttttttgaaataaaatgtttagttttagttttttagtagggtatttagttaaattaattttagtattttttttattttttttaattaggaagggttaaaatgtgggtattaggttttttttgatttttttaggatagaagagatttagataaattttggtagttagaa

SEQ ID NO: 608 - DNA, 6236 bp, Artificial Sequence
  chemically treated genomic DNA (Homo sapiens)
ggtttttgtttggttgatttttgttttattttaatttattttttaataggttttattatggtagtatatttgtgtatttatgtggtgaaggattatgggttttaggttttgtgggttgattgtattttgtgtaagttgtgtagtgtgtattgtaagatttttgtttagttggttggttatatgtagatttatttggggggggttgttttttttgttttgggagatgttttttagttatagtttatttgttgagggggatttttgtatttattaggtaaggtgtggggtatggttggggggtgggatggggggtgtgggggataatggggtttaaagggtttaataggggattttaggaaggtgagggatgtttatgtattatttaggttagggagatttttgggtatagggaggatttttgagaattgttttgtttgggtgaggatgtaggttgaggtttttggggtttagataggaagtgagtaatggttgtgttttaggggaagtaggttgggaaggtgtggggtgagggtaaggtttttgttatttagattgtgttgtgatttgtggtgttttttttgtgtaggtattggtgaggtttgtttaatggtggtggtagtggtagtggtggtagtggtagtagtggtagtagtagtagttttttttatagttgtgggtttttttttgggggtggagggggtgtttgtgagtttttagttattttttttttaattttggtgagttttaagttggttgtgggggagaggggagaatggagtagagttttttggtataagttttttttttttttttttttttattaatttttatttttttattaattaaggagtttttagaaggaaaggaggaagaaatgtttttttaggggaatttgttaggttttaatgatttgttttttttgttttttttttgttagatttgattttatataaatttgtttttttggttgtgttgaagttttttggatagtgggtaggggtggtagaggatatgagtagttattgtttgtatttttttttttttttgtaagtttatgttttgtttttttagggatttgtgagtttttttttttgatggtttttttttttttttttagttttttttttttgttgtttgtagtttttttttggggagttggtgtttttttttttttttttttttttttttagggggagggaggagaggaaggagggggattagagttgttttaaagagggaaagtggtgaggtttgaggaggggtagaagtagggttggtaaaggttgtatttttataaggtggtatggggggttggggttaggttttgaatattgttttatttgagaatttgttaggggaaaaagttaaggggagtaggaggaagagttaggagggttagaggtagagaagagatggagttttaggggttagggtgagtgaggggtttagggtttagaggtgttttttgggggtgggggaatgtagttagtgtttttttttttttttttattttagttttagttttggttttgtttttttattttttttttttatgatagaagaagttgtggttttggttatgttattgtgtttttgtgttttttgtatgtattttattttttattttttttttttgtgtggattttattataataaattttaaataaaattttgtttttggttttggattgaatgaattgtttttattaagaattgttgttaattttaagggtttttttttggtttggtgtttgttaatttagttttgttttgttttgtgaggttgtgaggttttggttttgttttttttaggggtagttttattggtggtagtatagatatagggtggggttaaggttgtggttgtggagagtaagttttaggtttttggggaatttttaatttggataggtttagaatagtttttggaggtttgaagaggttttgttagaaatttaaatagagttgttagatgggaatgttgtttttttttgtttatatttatggttgttgtttagtttttagttgtatttttttttatgtgtgttatggttttgaggttatggtgggtggatgtggttgtggaaaggttggggagtttgagttttaggattgggagtagtgaggtagagaatgaaagttgtatttgttttttattttgggtatgggttattttgtgtttatatgggtttttttgtttagttttttttgttttttggaatttttttttttgtttttgttttgttttttttagggttttttttttgagttttttagtgttagtttttgttgtttttttttgtaggttttattttttttaaattttattttgttttttttttgtagtttttttgtgttttgttttattttttttgtttttttgtttgtagagatgtttttatttggttttgtttgttttattggttttgtttttttgtagaattttttttgttttttttaaatttttgttttttttaggaattttggtgattgttggtgggaggggttggggatttaagaaggaggtgttttttttggaggtgtgtgtgagaaggggtagggagggggtgtgagtggtttttgggttggttgtttgggtaatgtgtggtttttttgggttggtgggaggggttggaggtttgtgaggggtgggggtggtgatggtggtggagtgtaggggaggggattggagaggaggggatgagtatatgggagaggagaagagggagatttgttgtttttttttttttttagttgatttgtttttttttgggttgtggttgttgtaaaagttagtagtggtagtgggagttgtttggaggttggtgttgaggtgagatttgggtagattgaggttgtgggtaggagtggattgattgatggttgatgttgggtggattgtatgggaatgtgggtgtttggagggttggtggtggtgttgggtgggttgaattattgggaggaggtgttagtttattgaaggtgagggaagttttgggagaggggttgataggggattgaaggagataattaggttttttagaaaggggtgggagtgtttttgttttaaatgtgtagtaagaaaatttgtattgtttgggagtttagggaggaggggaggatgtagagggagtggaatgtgaatgttgggttttttgtttagttggtttgttggagtgttatttgtatagtttgttgattttggggtgttgggatttgagagtttggattttgttggatggatttagggagagattttggagaaggttttgtttataaaagggttaattttttttagggttttttaagtagaagattttgagtagagtattttttttgtagggatgttttattttaaggtaaaggaaattttaatttttttttttttttttagaggtagtgtaaggttggttttgagataggaatgtggtttaattgggtttgtagtgttgagtgtttttttttttttttattttaagtttattttttttttttttagggtttgttgttgtttttgttattttattttttttataggggttttttttttttttttattttaagatggtagttagtagttttgagatttttgagatgaagggggttgaggagagttttaaggttttaggtgaagggtttggttattttgaagttgaaattggttttttttaggttttagtaggggtattagattagttagaggttttgtagttaggtttaaatattattgtggtttttgtggatttagggtttaaggttgggttggttttagaaattatagagattttggttggggttttagaaatagtttaggttatagattttagtttaagtttaggaggggaattaaaggttaattgtagttttgaagatttatgttaagaaatagtgtttaaattagaagtgagtaaagaggttattgtagattaggggtttaggttggagtttgtagttttatttgaattagttttagagtttgttttttaattagatttttggttagatttttagtttatttttaagttagttttttaattagagttttttatttaggaggattttatttttgagattttgtttgagagtgtaggggaaaagtaagagaatggggtagtggtgtttttgtaggttggtgatggggaagagggtttagtttttgagttttatttattatttttaaaaaaattttttttagttaatggggtttttttttgagtgttgtagtagttggttgaggaggattgaatgagaagggtatatagtgggtatttaggatttttttgaggtagtttgagttgttattttagtttttagttggtaggttttggggtggaggggggtgaaggtatttagaaattttgggattatattatttttgttattttgttttgtttttgttttatgtggtttgttaatattgtggtttttgtttatgttgttatggtgagttttatgggattttagtttaggtttgttgtggtttttagttttttgttagtgttgtaatagagtttttggagtaattatgttttttttttttttttttttttgtatggattttatttttttaattttagggtttttgtttgtttttttttaggatttaattttttgagttattattgttttgtttttttgggtgggagggatatggaaatatgtgttatatagttttgttgatttgtgtttttttttttttgtttttttatttttttttttttttttatttgttatttatggggttggttttttttttttttggatgatttttttatttgattttttttgggttggttttttttgattttggttatgtgtttttattttttgttttaattttagttttggaatagtttgtagtagggggatgtggatggggtttagtgtttgggttgggtagttaagtttttaagtattgtggtgttggtggggggagtttttattattattgttttttgtgttattaatttaggtggtgagtgggggtttgggataggtaggggaggaatggaagggttggtaagggtagttttattaatttttgtttttgtttttttttgtttgttttttttattttttttttgtttttttttgtttttttttttttttgtttgtttttttttttttttttttatagtgtataagtgaggggttttgttttgtattttaagatttttttttttgttgggagttgttttgggtttattttttttttggggggagtttaattgatggttttggtttttatttttaaggattaagggagtttgagtggttttgtttatagtttttgttttgtttttgtattttgttaggtttttttgttaattgtaggtttgttttatttttgtattggttttaatttttttgtattaatgtttgtattttttttggttttttggttttttatttttgtatttttggaaatttttttgtattttggaaatttttttgaatatttttttaattttgtgtttttagtttttttgtattttttttggtttttttgtattttttttagttttttaaattttttggatttttattttggttgtttttttttaatttttattgttttggtattttttaatttttagttttttttttttttttttttttattatttttttttttttttttatgttttgttttttttttttttttgtttttttattttttttaagtatttttttttttaattttttgttattgtttattttgtaaaattgatagtatttagatgaggtttgggggtagggagtagtgttgggagagggttttttaattttaggtttggattgttttttgttgggattatttagggttggatatttaagggtgtttggtaggttgtagagttggtaagttgggttttgtatggggatttgggtgagggtggtgagtattggttttgaatgtatgtaggggagaagggagggatgtggtgttgatttttttaggttagttggagttgatttgtttatttgggttttttaattttagtttgtgagttttttttttgaaggtgtgggggttagatttatttatgtgttttgtaatgaaataatttaaaaaataggattaaagtgtttattggtaggagtgagggtggggtgttgtgttttataattattttttaagatgatgggggaggtttgttgtatgtgatagtttgttgaggaggtggggattgagttataatgtggtttggatttggtgggggtttttttttttaa

SEQ ID NO: 609 - DNA, 6236 bp, Artificial Sequence
  chemically treated genomic DNA (Homo sapiens)
ttaaggaaaaaaatttttgttaaatttgaattgtgttgtagtttggtttttgtttttttagtgggttgttgtgtgtaataaattttttttattattttagaaaataattatagagtgtggtgttttgtttttgtttttgttagtgggtgttttggttttattttttggattattttattatgaagtatgtgaatgaatttagtttttatatttttaagaaagaaatttgtggattggggttgaaaagtttaggtgggtgggttaattttagttgatttggaagggttagtgttgtgtttttttttttttttttgtgtgtgtttggaattagtatttgttatttttatttgagtttttatatgaggtttggtttgttaattttgtgatttgttaggtatttttgggtgtttgattttgggtggttttagtagagaatagtttgagtttggggttggggagtttttttttaatattgttttttgtttttaagttttgtttaagtgttgttaattttgtagagtaaatggtgatgggaggttggagaagaggatgtttaagggagatgaggaggtaggaagaggaagggggtgggatgtggagaggaaaggggagatgataaagaagggaaggaagagaggattgagggttgagagatgttaagataatgaaagttgggaggaggtggttagggtggaggtttagagaatttggggggttggaagaagtgtagggaggttaggagagatgtagggaggttgagagtgtagagttggggaggtgtttagggaggtttttagagtgtagggaggtttttagaagtgtagggatagggggttaagaggttggaggggatgtaggtattagtgtagggaggttggaattagtgtagggatgaggtaggtttatagttggtagaggagtttggtaagatgtaggagtaggatagaagttgtaaataaggttgtttaggtttttttggtttttaggggtgggggttagggttattagttgggttttttttaggggagggatgggtttaaggtagtttttaataggaagaaaagttttgggatgtggggtagagttttttatttatatattgtgggagaggagagggaaggatagatggggggagggggagataaggagagataaaggagaggtaaggaggatagataggagagagtaggggtaggggttagtaaagttgtttttgttaatttttttattttttttttgtttgttttaagtttttatttattgtttaagttgatgatgtaggaggtgatgatgatgaggattttttttattagtgttatgatgtttaagagtttggttatttggtttagatgttgggttttgtttatgtttttttgttgtaggttgttttgggattggggttagggtgaggggtggaggtatatagttggggttaggagaagttagtttagaagggattaggtggaaaagttatttagaagagagagaggttagttttatagatggtgggtaagggaggaaggaggagtgaaggggtagggggaggagggtataggttagtgaggttgtgtgatatgtgtttttatattttttttatttaaaggggtagggtagtggtggtttagagggttaggttttagggagaggtaaataaaggttttggaattggggaggtgggatttatgtagagaggagaggggaaggaaggtatgattattttagaggttttattgtagtgttggtgggaagttgggagttatagtaggtttgggttagggttttatggggtttattatgatagtataagtgaaggttatgatgttgataggttatatggggtagaagtaggataggatggtaaggatgatgtagttttgaggtttttgggtgtttttatttttttttattttaggatttgttaattgggagttggggtggtggtttaggttattttggggagattttggatgtttattgtgtgttttttttatttgattttttttaattagttgttgtagtatttgggggggggttttattggttgggggggatttttttgagggtggtgagtgaggtttaggggttgggtttttttttttattattagtttgtaggggtattattgttttatttttttgttttttttttatatttttagatagaattttaggggtggggtttttttgggtagggagttttggttgaagggttggtttgggggtaggttgggaatttggttgggggtttggttggggagtaggttttggggttggtttaggtggggttgtagattttagtttggatttttggtttgtagtggtttttttgtttatttttggtttggatattgttttttggtatgggtttttggggttgtagttggtttttgattttttttttgggtttaagttgaggtttgtggtttgggttgtttttgaggttttagttggggtttttgtggtttttggagttagtttagttttgggttttgagtttataggggttgtagtggtgtttggatttggttgtggggtttttggttggtttggtatttttgttaggatttggggagggttagttttagttttagaatggttaggttttttgtttggaattttgggattttttttaattttttttattttagagattttagagttgttggttgttattttgagatgggagaggggagagagtttttatggggaggatggaatagtagagatagtggtaaattttggaagaggaggagataggtttggggtgaggagggaagagggtgtttagtattgtaggtttaattgggttatatttttgttttagggttagttttgtattgtttttagggagaggaagaaaagttggggttttttttgttttagggtgggatatttttgtgggaggagtgttttatttaaagttttttgtttggagagttttggggaagattaatttttttgtaaataggattttttttagggtttttttttgggtttatttaataagatttagatttttagattttagtattttaaaattaatgagttgtgtaaatagtattttgataggttgattgggtagaggatttgatatttgtattttattttttttgtattttttttttttttttgggtttttaggtggtgtgggtttttttgttgtgtgtttagggtgaggatgtttttgtttttttttgggggatttggttattttttttgattttttgttagttttttttttggggttttttttgtttttggtgggttggtgtttttttttgatggtttagtttgtttagtattattattagttttttagatatttgtatttttgtgtagtttgtttggtgttagttgttggttggtttatttttatttgtagttttagtttgtttgggttttattttgatgttggtttttggatagtttttgttgttgttgttggtttttgtagtagttgtagtttgggagggagtaagttagttagggagggagggaggtggtgggttttttttttttttttttttgtgtgtttatttttttttttttggtttttttttttatgttttgttgttgttgttgtttttgttttttgtgagtttttggttttttttgttagtttaagggagttatgtgttatttaggtaattggtttggggattatttgtgttttttttttgtttttttttatgtgtgtttttaggagagatgttttttttttaagtttttggttttttttgttaatggttattgggatttttggaagagatggggatttgggggaaatggagagggttttgtgaggagatgggattagtgagataggtaggattgggtggaggtgtttttatgagtaggagggtaaggaagatggggtaagatgtggggaggttgtagaggaggagtagggtggggtttggagagaatggagtttgtagaaaggagtggtagaaattggtgttggaaggtttaaaaaaggggttttggaaaggatggagtggggataggaaagggaattttaaggggtaggaggagttgggtagaggagtttgtgtaaatatagagtggtttatgtttaggatgagggataggtgtagtttttattttttattttgttgtttttagttttagggtttggattttttagtttttttgtagttgtatttatttattatggttttagggttgtgatgtgtgtggggagggatgtggttgggggttgagtagtggttatgagtgtggatgggggagggtggtatttttgtttggtagttttgtttgggtttttgatggggtttttttaaatttttaggggttattttgggtttgtttgagttgggaattttttagagatttggaatttgttttttatagttatagttttggttttgttttgtatttgtgttgttgttagtaaggttgtttttggggagggtggagttagaattttatagttttatagggtagagtaaggttggattgatggatattaggttgagaagaaatttttggggttggtggtagtttttagtgagggtaatttatttaatttagagttagaaataggattttatttaaaatttattgtaatggggtttgtgtaaaaggaaggggtggagggtggggtatatgtaggggatataggaatatgatgatatggttagggttataattttttttgttgtggggaagagggatgaaaagataagattagggttggagttggggtggaagaggggagggggatattggttgtatttttttgtttttaggaagtatttttaggttttggattttttgtttattttggtttttaagattttattttttttttgtttttggtttttttggtttttttttttgttttttttgatttttttttttgatagatttttaagtaggatgatgtttagggtttgattttaattttttatattattttatgaaggtataatttttgttggttttgtttttgtttttttttaaattttattgttttttttttttgggatagttttgatttttttttttttttttttttttttttttggaaaaaaaaaaaaaaggaaaagaaagtattaattttttggggaggggttgtagatagtagggggagaggattggaaggagagaagaggattgttgagggaagaggtttataagtttttgggaagatagggtatgggtttatagagaggagagggggtatgggtagtggttgtttgtgttttttgttatttttgtttattgtttaggggattttaatataattgaggggataggtttgtgtggggttaggtttgatagaagaggagtaggagaaataaattgttaaaatttagtgaatttttttaagaaaatattttttttttttttttttttggaggttttttggttggtagggaaataggagttggtgggaaaagaggggggagaggagtttgtattaagggattttattttattttttttttttttttgtaattaatttggagtttattagggttgggagggaagtggttgagagtttataggtattttttttgtttttgagagggagtttatagttgtgggaggggttgttattgttgttgttgttgttgttgttgttgttgttgttgttgttgttattggataaattttattagtatttgtataggagaaatattatggattatagtgtgatttgaatggtaagagttttgtttttattttatatttttttagtttgttttttttgggatatagttgttgtttattttttatttggattttagaggttttagtttgtatttttatttagatagagtagtttttaaggattttttttgtgtttagaagtttttttagtttgagtggtatatgggtattttttgtttttttgagattttttattgggttttttgagttttgttgttttttatattttttattttgttttttagttatgttttatgttttgtttggtgggtgtgggggttttttttagtaggtgggttgtggttggggggtgttttttgggatagggggggtggttttttttagatgggtttgtatgtggttggttagttgggtaggggttttgtagtgtatgttgtatagtttgtataggatgtggttagtttgtggggtttggagtttgtggttttttattgtgtggatgtgtaggtatgttgttgtggtgaagtttattggggggtggattgggatggggtgggggttagttaggtggagatt

SEQ ID NO: 610 - DNA, 6250 bp, Artificial Sequence
  chemically treated genomic DNA (Homo sapiens)
agaaagttagatgttaaaatattgagtaaaatggtgttgttaataatgaaattagtattgtaatatggagaatttttatgttaataattttaaggtaaatttgaaaatatatgttttagatataaatttttttattttttatttgtgatttatattttttttttttatttattatatttttttttattaaaagtaatataaagggaaaatgattttgaaattaaagtgagatttatatattttagttgtaattttaataagatattattatgattaagtttatatgatttataatttttttaaattatgtaatttataatagtttaattgaaattatttttggtgatttatagaggattttaaaaattaggttttattttattaggtattttttgttttttagaaaaatgttgttatatgtttaattgatattgagtattgtaatatagtagtatttgtaggataataaatataaaaaataaataataaagtatgttttttaattatgaaattatttgttagttttgattaatttaatttaatggtaaggttaagtaataaattatattgtaagttgttaaataaattgaaaaaaaaagttattttttaaaagaaaaatatttataaggtttatgtttattattgataattgatagtatttttttgagatttatttttttttttttttatttgaaaattagatttgatttttaagatttatttggtgataatatttgttataatgtattttagtatttttttttatgttgttttagaagtgttttaaatgaatgtttatttttttatgttataattatttgaagatggatattgtttgatttttgtatttttaatgttatgtataatatttgtgtgttttttaaatattttgtttaaaaaaaaaaaaagaggttgggtttggtggtttaagtttttaattttagtattttgggaggttgaggtgtgttgattatttgaggttaggagtttgagattagtttgaataatatggagaaattttatttttattaaaaatataaaaaattagttggatgtggtggtatatgtttgtaattttagttatttgggaggttgaggtaggagaattgtttgaatttgggaggtggaggttgtggtgagttgagatgatgttattgtattttagtttgggtaataagagtaaaatattgttttaaaaaaaaaaaaaaagaaagaaaaagaaaagaaaagaaaaaagaaaagtttatgtatttttttggtataggtggtttgtattttgtaaataaaaaataaatatatgggttaggagtggtggtttatgtttgtaattttagtatttagggaggtttaggtgggtggattatgaggttaagagttttagattagtttggttaatatggtgaaattttgtttttattaggaatataaaaattagttgggtgtggtggtatatgtttgtaattttagttatttaggaggttaaggtaggtgaattgtttgaattttgggaggtggaggttgtagtgagttgagattgtgttattgtattttagtttgggtaatagagtaagattttgttttggaaaaaaaaaatggtttaaaaaattttatgatttgtaaatgttatgaattgatttagaaagtaatgtttttttttaaattgtatgtttttttgggatttatgtttatttttatttatgaataatagattaataatataagtgaaatagttgtgttagggtggtgtaaatataattttaatattttaaaatatatatttattttttttattaatatttatttttaaaatgaagatttttattttatttttttattttaattataattttattttaaaatgttttttaatttgtattgatttattattttttagtattttttaataagattttttgttttttattagttatttgtaatttattttaattggaaagaattataagatagttgtttaagtgataatatttttaatatttttagtatttatattaatttattataatttttgtttattaaatataaagaaaaaaaatattatatatggtattatggtgaaatttgggaattagtataattatgtaagtttataattttatatattgggaaaatattattttatattttattattaattaaagtattttatatgttaatttttgaaagataaaaggattttaaaatatattaaaagtttatgtaaatttatttttattaaagtttagattttttaatgtatttttatttttaaaatttaatttttttggaaaatttaatgaaataggaattttttattttttagtttttaaatttattaaatttgttatttttgataatttttttgtttaaaagtgtaaggaaagtatttatagtggtagtattatgagttggtttattaggtttttgtttttttttattttttaagtatttttaataagttataattgaaataattaagaatgtgtttaggatgtttgtaaaaatataatttttaagattttaattttagtttttgttttttaatgagattattgtataagtattttttatagtagaaattttagtttttttttttgaggattaggaagaattttggagttttgggttttttttttttggttttggtaggaatatataatattagatttgttttttattaaggtaagaattttgattatatttttttttttaaataagatttagttattttattttttattgtttttttaatattttttttgaatataaagttagggagtaaattttttttaggtgtttagttattatatggagtttgtttagtagtttttttttatttagagataggtttattttttttattttttttttaaattttgagagttatatttttttttatattgaaaatttagggatgtgttattattgttaatattttgtttttaaatatttgatagatttagtttttttgttttttttttaaatgagtgttttaggtgttggtttaagttaatttttttgggtttttattgagtttttggtgggggttgaagtttgggttatttggaggttgtggtgttagtatgaaaggaattatgttggttaggaataggagagattgttttatgtttttggttttgttattgattttatttttttgggtagtttttgtttgatggggttttggaaaattgtttatattgggggaggatgggatttgtttggtttagttttttaattttttttttttttttgtgttgtttattgggaagattttattgttaggtttgatgtttttagaagtgtaggtggtgttattaaaggttggtttagttagtttttggttgttgttgttttttgtattatttatagttggaagttggttgttgtgtggtattttgggaggttttgtttgttttgttttatgttggtgtgttgtgggtttttggtttgttgttgtgtttggttttgtttgttatgtttagttggggtttgtttggtgtttttttggatgtagatgtatgagttttaattttatttagtttggtttggtttttgtttttgggtgattgtggaatgggggggtgggagttagtgagtaggtttttaagtgtgtttggttgttttttttgttttgatgtttatgtttggttaggatttttgttgtttattttattaaaggagttgtagaaagtggtttggggtttagtgatttgtttagggtggatgaggaggtgtgattggtttgatgttgtaggttttttgtttagtgtgtttaggtgggagggtggggatatgaattgagttatagagtgttttgggtatggattttttgttttttttggttttgggttttgagttttgagttttgagtttggttattgaagtttgtgttatttgttagtttttgtgagatgagttttttgagtgtagtttaggtatttggtttagggttttattgttggagttgtttgaggtttttatttgtttgttgttatgaaaaaggttttggggggattaataagtattttttgaatgtatatttgttttatgtttttgttgtagggagagggtttgtagatattttaataaatagaattttaggattttatttgtgagtataagagttggaatttttttattaattttttaaaatttaattttatatttggtttatttagtttagattggaaattttttaaggtagtttgttttgtaattttttgtatgattttagttttgtatagtttagtgaatgtttatggtattgaataaaatagtttaaaaatgttgggtatatgttgttgttttatttagtttaattaaagtttataaaagtaggatataatatgttttttatttaagagtgagatagtttttattatgaaatggtaaattgttaggaatattagttttatttaagttttaaggtttatttttaataaaatatttaaattgtggttaaaatttatgttaatggtggtttgttgtagtaaaatattagtgttttttttaataatatattgttggttaaaattaattggatttggtttgtatatttgaagtataaaatatttttattaaatatatttattagtggtatatttagttaaaaagtaagtagaattttatatgtaaattgtatataatttgtaaaaattgtattttataagaatgtgatagttgagtatggtttttggggggtttttttggtgtattataataatgttatttggttttttttttgaatatttagttattataatgtttggtttgtaattttagtagattgtagattgtattattttggtatttttaatagtttttgtatagtgttttgtttatagaaggtatttagttgtttagtaaatgttgtttaaaaaaaaaattttgatttattttttttttttttttttgggggggggtggtgggggaaagagttttgtttttattgtttaggttggagtgtaatggtgtgattttggtttattataattgattgaatattttttaggtttaagtgatttttttgttttagttttttaagtaattgggattataggtgtttgttattatgtttagttaatttttgtatttttagtagagatggtattttattatgttggttaggttggttttaaatttttgattttaggtgatttatttgttttggttttttaaagtgttaggattataagtgtgagttattgtgtttggtttgaataattagaagttttagatttttagggatattttaaattttaagtaatttttttaatttataaattaggatttaaattattttaatttgtagtttattttttatttattaattgtgtatatttttaagataaaagagtattatgtgggggagataaagagttaaaggaatatggtaagaggggtattggatagattaattagtttatttttttttttttttttttttttttttgagatggagttttgttttgttgttaggttggagtgtagtggtatgattttggtttattgtagtttttgttttttaggtttaagggatttttttgttttagttttttaagtaggtgggattatagttgtgtgttattatgtttagttaatttttgtatttttagtagagatagggttttattatgttggttagattggtttggattttttgattttgtgatttgtttgttttggtttttaaagtgttgggattataggtatgagttattgtgtttggtttttttattttttgagatggtttggttttgtagttaaggatggagtattgtgatataattatagtttattgtagttttgattttttgggtttaagtaattttttagttttattttttttagtagttgggattataggtatgtattattatatttggttaatttttatattttttttatagaagtggagttttgttatgttttttaggttgattttaaatttttggttttttagagtgttgggattataggtatgagttattgtatttagtattaaaataattttttaaaattatatattttttggttagatgtggtggtttatatttgtaattttagtattttgggaggttgaggtaggtggattatgaggttaggagattaagattattttggttaatatggtgaaattttgtttttattaaaaatataaaaaattagttagtgtagtggtatgtgtttgtagtttaagttatttgggaggttgaggtaggagaattatttgaattttggaggtgggggt

SEQ ID NO: 611 - DNA, 6250 bp, Artificial Sequence
  chemically treated genomic DNA (Homo sapiens)
atttttatttttagggtttaagtgatttttttgttttagttttttaagtagtttggattataggtatgtgttattgtgttggttaattttttgtatttttagtagagatggggttttattgtgttagttaggatggttttgattttttgattttgtgatttgtttgttttggttttttaaagtgttgggattataggtgtgagttattatgtttggttagggggtatatagttttaaaaaattattttggtgttgagtgtagtggtttatatttgtaattttagtattttgggaggttaggagtttgagattagtttgaggaatatagtgagattttatttttataaaaaaaatgtaaagattagttaggtgtggtggtgtatgtttgtggttttagttattgaggagggtgaggttggaggattgtttgagtttaggaggttgagattgtagtgagttgtgattgtgttatggtattttatttttggttgtagagttagattgttttaaaagataaaagagttgggtgtggtggtttatgtttgtaattttagtattttggaggttaaggtgggtagattatgaggttaggagatttagattagtttggttaatatggtgaaattttgtttttattgaaaatataaaaattagttgggtatggtggtgtataattgtagttttatttatttgggaggttgaggtaggagaattttttgaatttgggaggtagaagttgtagtgagttaagattatgttattgtattttagtttggtaatagagtaagattttgttttaaaaaaaaaaaaaaaaaaaaaaaaagataaattaattaatttatttagtgttttttttattatatttttttggttttttattttttttatgtggtgtttttttattttaaaagtatgtataattgataaatgaaagatgaattgtaaattggaataatttgggttttgatttgtgaattgaaaagattatttgaaatttggaatgtttttggaaatttaggatttttggttatttaggttaggtgtggtggtttatgtttataattttggtattttgggaggttgaggtgggtggattatttaaggttaggagtttgagattagtttggttaatgtggtgaaatgttatttttattaaaaatataaaaattagttgggtgtggtggtgggtgtttgtaattttagttatttgggaggttgagataggagaattgtttaaatttaggaggtgtttagttggttgtagtgggttaagattatgttattgtattttagtttgggtaataagagtgaaatttttttttttattatttttttttaaaaaaaagaaaagaaaatggattgggattttttttttaaatggtatttattaaatagttaagtattttttatgagtaaggtattgtataagagttgttggggatattaaaataatataatttatgatttattaaagttataagttggatattatggtgattggatgtttagaaaagaaattagatgatattattatggtatattaaaaaagttttttaaaaattgtatttaattgttatatttttatggaatataatttttatagattgtatataatttgtatgtgaaattttgtttattttttgattaggtatgttattaatgggtatgtttaataaagatattttatattttagatgtatagattaggtttggttaattttagttaataatgtattgttgaaaaagatgttgatattttattgtggtaaattattattaatataaattttaattatagtttgagtattttattaggaataagttttgaaatttgaataggattagtatttttaataatttattgttttataataaaggttgttttatttttaagtggaaaatgtattatgttttatttttataaattttggttgaattaaataaaatagtaatatgtatttaatgtttttagattgttttatttagtattataaatatttattaaattatatagagttaaaattatgtaaaagattgtaaaataaattgttttgggaaatttttagtttaagttaaatggattaagtataggattgaattttaagaagttggtgggaagattttagtttttgtatttataggtaaggttttaggattttatttgttgaagtgtttgtagattttttttttatagtaggggtgtggagtaaatgtgtatttaggaagtgtttattagtttttttaaaattttttttgtgatgatagatggatggaggttttagatgattttggtagtaggattttgaattaaatgtttgagttgtgtttgaaaggtttgttttgtaggagttggtgagtggtatgggttttggtggttgggtttggggtttggggtttggggtttggggttggggggggtggggggtttgtgtttagggtattttgtggtttgatttatgtttttgtttttttatttgagtatattgggtagagagtttgtggtattgggttagttgtgtttttttgtttgttttgggtaggttgttgggttttaggttgttttttatagtttttttaataaaatggatagtaggggttttaattagatgtgggtattaagataaaggaggtggttagatgtgtttgagggtttgtttgttagtttttgtttttttattttgtggttatttggggatagaggttaggttggattgggtggagttgggatttatatgtttgtgtttaggaaggtgttgggtgagttttagttagatgtgatgggtggggttgaatatggtagtggattagaggtttgtggtgtattggtgtggggtggggtaagtggagttttttgggatgttgtgtggtagttggtttttggttgtgggtggtgtgggggatagtggtggttggaagttggttgagttggtttttggtaatgttatttgtatttttgggggtgttgagtttggtggtagaatttttttagtaggtggtgtgggagggaaaagaggattgaggggttaggttgggtggattttgtttttttttgatgtgagtagttttttgaaattttgttaggtgaaggttgtttagagaggtggagttggtagtggggttgggaatatgaggtagttttttttatttttgattagtgtggttttttttgtgttggtgttgtgatttttggatgatttgggttttggtttttattagagatttggtaaagatttaggggagttggtttaggttggtgtttggagtgtttgtttgagggaagagtaggggagttgggtttattaggtgtttgggggtggggtattggtgatggtggtgtgtttttaagtttttagtgtagaagggggtgtggtttttggagtttggggaaagaataaaggagatgggtttgtttttgagtgggaaagggttattggatgggttttatgtagtgattgagtgtttgagaggggtttgttttttagttttgtgtttggggagggtgttgggaaagtggtaaggagtagggtggttggattttgtttggagagggagatgtggttagggtttttgttttagtagggaataaatttagtgttgtgtgtttttattagagttagaaaggaagggtttaaagttttagaattttttttggtttttgaaggagggaattagaatttttgttgtaggaggtatttatgtagtaattttgttgggaggtggagattggagttggagttttaagagttgtgtttttgtgaatattttaagtatgtttttggttattttaattgtagtttattggaggtgtttgggagatggggggaggtggaaatttggtaagttaatttgtgatgttgttattatgaatgttttttttgtatttttaaataaagaaattattaagagtgatgagtttgatgaatttagaggttagaaagtagagggtttttattttattagattttttagagagattggattttaaggatggagatgtattaagggatttgaattttggtggaagtaagtttgtgtgaatttttagtgtattttaaaatttttttattttttaaaaattgatgtgtaagatattttaattagtaataaagtgtgaaataatgtttttttagtgtgtgaaattgtaggtttgtatggttgtattggtttttaaattttattatgatattatgtgtagtattttttttttttatatttagtggatagaaattgtaatggattggtatggatattaaaggtgttgagagtgttattatttgaatagttgttttatgattttttttgattgaaatggattataagtgattaatgaaaggtaagggattttgttaggaagtgttgagaagtggtaagttagtataaattgaaggatattttgaggtaggattgtggttaggatggagggatagggtaagggtttttattttaaggataaatgttagtaaaaagaataaatatgtattttgagatattaaaattatatttgtattattttgatataattgttttatttatgttattaatttgttgtttgtaggtaaaaataagtatgagttttaaggaagtatatagtttaaagagaaatattattttttagattaatttataatatttgtagattgtaaggttttttagattattttttttttttaagatagagttttgttttgttgtttaggttggagtgtagtggtgtgattttagtttattgtaatttttgttttttggggtttaagtagtttatttgttttagttttttgagtagttgggattataggtatgtgttattatgtttagttaatttttgtatttttagtagagatggggttttattatgttggttaggttggtttagaatttttgattttgtgatttgtttatttgggtttttttaagtgttgggattataggtatgaattattgtttttggtttatgtgtttgttttttatttgtaaaatgtagattatttgtgttagaagaatgtatagattttttttttttttttttttttttttttttttttttttttttttttttgaggtagtgttttgtttttgttgtttaggttggagtgtaatggtgttattttagtttattataatttttgttttttgggtttaagtaatttttttgttttagttttttaagtagttgggattataggtatgtgttattatgtttggttaattttttgtatttttagtagagatggggtttttttatgttatttaggttggttttgaatttttgattttaggtgattagtatattttggttttttaaagtgttgggattaaaggtttgagttattaggtttggtttttttttttttttttaaatgaaatatttgaaggatatataagtattatatgtggtattggaaatataaagattagatgatatttatttttaaatggttatagtatagggaaatagatatttatttaggatatttttaaaatagtatagaggagagtgttagagtatgttatagtaagtgttattattaaatgaattttagagattaagtttagtttttaaataaaggaggaggaaaatgagttttaggaagatgttgttagttgttaatgatgaatataggttttgtgggtattttttttttgaagaatgatttttttttttagtttgtttgatagtttataatataatttgttatttaattttattattagattgagttggttaagattagtaaatagttttatagttgaaaaatatgttttattatttattttttatgtttattgttttataaatattattatattgtagtatttaatattgattaggtatatgataatatttttttgaaaggtaaaaaatatttaataaaatgaagtttggtttttagagttttttatgggttattaaaaatgattttaattgaattgttatgaattgtataatttaggaaagttatgagttatatgagtttagttatgatgatattttgttgaagttgtagttggggtgtataagttttattttgattttaaaattgttttttttttgtgttatttttaataaaagaggatgtagtgggtgggaggaaaaaatataggttatagatgagggatgagaaagtttgtatttgaaatatgtatttttaaatttattttgaggttattggtatggggattttttatattgtagtgttgattttattattgatagtattattttatttagtattttgatatttggtttttt

SEQ ID NO: 612 - DNA, 6152 bp, Artificial Sequence
  chemically treated genomic DNA (Homo sapiens)
ttagttagaagggttttgagttttaggttatagttttttaatgagttttttttttttgttaatgttgtttaatttttatttttttatagtttgggttaagaagtttatgtagtttagtttaaattttagagaatggttattaatatttattggtgttattttttatgttggggaaattgtgaagtatataattagggagtatataaaagagtttatgggattttttttttagagtgggttttttttttgaggtgattgatatagtttggttgtgtttttatttaaattttattttgaattttagtttttataatttttatttgttgtgggagggatttggtgggaggtaattgaattatgggggtggatttttttgtgttgtttttgtgatagtaagttttatgagatttgatggttttataaaggataatttttttgtatatattgttttgtttgttattatgtaagatgtgtttttattttttttttattttttattatgattgtgaggtttttttagttatatggaattgtgagtttattaaatttttttttttttataaattatttatttttaggtatttttttatagtagtatgaaaatggattaatatagtgatttaagtaaattttggtattttttggtattggtgttagatgagttatatgttgataatgggggtagggtgtttatggttagtttttgttggtagttttttattattattggtgtgagttaggaaaatgtggtgaaggagagtagtttggtattatttattgggttgggtgttaatttgtagataaataagatatttagtgttttaggtattggggttattgttttaattttttttttggattgaatttgtaattatagtaataattatagttgtatttagaatttgtgatttgtatttattatgtttattagttttttgagtagtgatgtgttggggttagttggtgagagttaattgttaaatttttaggaattttgtaagttagttgttaaatatagttaatatttaaaattaaattatttaagttttaataaattgttttaaagataaaggtaataatatttaaaatttattattttttttttttgtttttttttttttatttttttttttttttttttttttttttttttttttttttatttttttttttttttttttttttttttttttttttttttttttttttttttttgtttagaattgtagggtattaatatttttaggggtaaaattttattaaggtagtatagaagtttattttatattttttgggtggaaaattggatattttttagaaggatttagtaggatttaggtttttttgtttatagtagtgatgttgaggttatattttattttgtttttttttttttttttatattattttttttaaatttttttttttgttgtttggaattattttttaaataagttatttgtttttaggtttttgattgaggttttgtttttgggagaatttaagttaaaattatgtgaataaggtattatgagtttagtatatagtaaaaattttttaaaaggtgatttttatgatatagttatgtattattttatatattttttataataatttagtaagatgggtggtagggttatattatatgtttattttatagataaaaatattaaggtatagagagtttagagtatttgtttaaggttttattgttggaaagtggtgagatgggaatttaaatttattgtttgttgattttagtgttttgttattttttttagtatttttttatattgtttttttataaagtgattataaattggttgaaaaagtggatagttagagattttttggggttaggaataatagtttatgtttttattttttaatttttattttttattttggagggtttaaatgtgtgtgtttttggtttagatagagatgttgggagaagataatgtagtgtttgtttattatagagttgttatttggttttttgttgtttagagaataaattatagggttttgttttatgtagaaaaggtagtattttataatgttatggttagtataatgttaataatatatataataatataatatgttgtaaggttgagtatgtgagtttagaaattagattatttgagtttttattttggattttaaaaatgattttgttttttttttttatttgtttttaattttttggaatgtgatttggtagtttattttattaaaaagttgagtttgtttttttatattttgaatataagttggtttgtgatttgttttggttaatagaatatagtgaaaaaagtggtgtgttagttgtaaatttgaattttaagaagttttgtatgttgttatttatttttttggaagtttgttatattattgtgtgattgagtttgggttagtttgttggaggttgagtatatgtggggtttagttgttttattgttttagttaatagttggtttatttttagtagtatagttattttgttgtataggagtaagtttggttaagattaaatgaattatttagttgagtttagtttaagttgttttattttatgggttatttattaaattgtaagttaaatgagtggtaattgttttaagttgttaagtgttgagatagtttgttataaagtaaaagttatttggtaaattttaggtaagttatttaatttttttgtgtttgtttttttatttattagataaagatagtaatagtatttttagggagtttgtgaggagtgaatgagaagatatttgtaaagtatttggataggtttggattatggaaagttttttttaaatttgagttattgttttttttttattaaaggataggaggaggtaaggaagtgagtgattgataaatgaatgaatgtgtgtatgggtggatggataaaaggatgagtagatagagtagtagatgggttgtaggagtagtgtttatttttttgatggatatttttggaggttttgttttggtttttttttttgttttttttttgatttattttgtatagggttgtattgggattatggtttttaggttggggttatatttttttgtaaaggatttttgttggttttgttggtttagatttgagataaggtagggttttttatttattattttgatggtagtttggagttttgggtttttggtttggggatatttttattttatggtagagaaatggtaaaggttattgagaggtgaggatgtttgattgggattaggtagtttttattttatttagattagtttttttgttttgatttttgagaattgtttttattaatgagttttttatatttgtaggggagtgtggttagaagatttgttatgttttttaatgttatgttgaggtttttttattagtaggattatttaatttttttttttttatgttgggttggttaagagtagaaaattttatggtgtggttttggttgggagttggtttaatgattaaggttgagttttagtttagggaaagagttttaagaaaatgggtttttttagtattatttagagttaagtttggttgatatatatatatatgtatatgtatatatgtatatatatgtatatatatatttatatagatgtatatatgtatatatatttataaatatgtatatatattgttatgtgtatatatttatatatatttatgtatatatatgtatatattttttttttttttagatttttttagatttttaggagtttttgtatttatattttttttattttgatatttattggttagagaattttaataatattattttttaggattagttatatttggataggtttatattttttatatttttgtgattgttgttttaaatgaaaattaataatttaggtggagaggatattttttgtaatgtttgtttagtttttaagttagttattttattttttagttatttaaatttaatttatagagtatgatttttgaaggttttttatgtttagttttagtttttttttgaggtttttttttatttttgttttagggttttatgatagttatttttttatattttatagataaattttttttttttatttaaggtatgttgagttggtttttgttatttgtaaataaaggttttattattatatataaatggggttatatttttatgagttttttttggaagtttttatagttagaagtagtagataaattaatttttattaagttgttagtggttgataaaattatggtatggtagagttggaagtgtttttagatgtaattttttatatattttttattatatagaagaggaaataaaggtttagagagaggaaggatttatttaagagtatatagagaatgagtagtatttattttatttggggtattttggatataggaaattgatgtttttttttttttttaataattttataataatttttgtttatattatataataagaggtatttttttggaataatatatgtattttttataatagaatttgaaaattataatgtttttattttaaaaagataaattttttaatgtggaaattgaagatttgtagttagatggagaagtttatatgttttagagttagtagttgatgaaaagttttttaattattgttaatgaatttaaagtttttgttgttattgtggttgttgtggagatggagttttattttgttgtttaggtgggaatgtagtggtgtgattttggttaattgtaatttttgttttttgggtttaagtaattatttagttttagtttattgagtagttgggattagaggtgtatgttattgtgtttggttaatttttgtatttttagtagagatagggttttgttatattggttaggttgatattgaatttttgattttaggtaatttatttgttttagttttttaaagtgttgggattataggtgtgagttattaaaaaaaaaaaaaaaattgagataggattttattttgttgttaggttggagtgtagtggtattattttagtttattataatttttgttttttgggtttaagtgattttttttttttagttttttaagtagtagggattataggtgtgtattattatgtttagttaatttttgtatttttagtagagatgaggttttgttatgttgtttaggttggttttaaatttttgggtttaagtaatttgtttgttttagttttttaaaagtgttgggattataggtatgagttattgtgtttagtgtagttaatgaatattaatgatataaatattatagatttagttgtagatttttaatttaatgagagtattagtagttattagagattttttaaatttttggttaaattgtatattttattttttattttttatttgtattattgaatattgtattttagttatgtggaatattttattattttttggataaattgtttattttttttgttttttagtttttgtatttattattggtataatttggaattatttagtatttttttttttatttgattaatttttgtttagtttttaaggtttagtttaaatatttttttttttaagaaaatttttttatatatttttttatttttttaaataaattgtgggttttttgtttgttttgtttgtagttatatttttaatatttagtatagtttttggtatattggaaatgtttaatatgtatttgttgaatgaatgaataatagtaagtatgagaaataattaagatgtaaattttttttttagaaagtgaaaaataagtatataataatatatagtaaaatataaattattttgaaattaagtatgggatgatataaaaataataaataaagtataaattataatattgtgttagttttagaaaaaatattttttaaaaagggttaaagttaagaagttagttaaggaaataaaatgaaatattaaatagtagattaattaaaaaaaaaaaaaaaaaaaggtaggtaaggagggatagaagaataaaatataaaaggaataaatagaagataaatattaatagtaagttaatagatttaaatataattatattaataattatattaaatataaatggagtaaatattttaattaaaaaataaagattgttagattgaat

SEQ ID NO: 613 - DNA, 6152 bp, Artificial Sequence
  chemically treated genomic DNA (Homo sapiens)
atttagtttgataatttttgttttttaattgaaatatttattttatttatatttaatgtaattgttgatatggttgtgtttaagtttattggtttgttattaatatttgttttttatttattttttttgtgttttatttttttgtttttttttgtttatttttttttttttttttttttggttaatttattatttagtgttttattttatttttttgattgattttttagttttaattttttttaaaaagtattttttttagggttaatataatgttataatttatattttatttgttatttttatattattttatatttaattttaaaataatttatattttattgtgtgttattgtgtgtttattttttattttttggggaaaggatttgtattttagttgttttttatatttattattatttatttatttaataaatatgtattaaatatttttgatgtattagggattatgttaggtattggaaatatagttgtaaataagataaataagaagtttatagtttgtttggggaaataaaaaagtatgtaggaaagtttttttagaaaaggaaatgtttgaattgagttttgaaggttgagtagaaattggttaagtgaagaaagggatattagatggttttaggttgtgttagtagtaaatataaaaattaaaaagtaggaggaataaatagtttgtttagggagtagtaagatattttatatggttggagtgtagtatttaatggtataaatagaaggtggagagtagagtatgtagtttggttagaggtttagggagtttttggtagttgttaatatttttattgaattaggaatttatagttgggtttatgatatttatgttattaatatttattaattgtattgggtatagtagtttatgtttgtaattttagtatttttgggaggttgaagtaggtagattgtttgagtttaggagtttgagattagtttgggtaatatggtaagattttgtttttattagaaatataaaaattagttggatatggtggtgtatgtttgtagtttttgttatttgggaagttgaggagggaggattatttgagtttaggaggtagaggttatgatgagttgagatggtgttattgtattttagtttggtgatagagtgagattttgttttaattttttttttttttttggtgatttatgtttgtaattttagtattttgggaggttgagataggtggattatttgaggttaggagtttgatattaatttggttaatatggtaaaattttgtttttattaaaaatataaaaattagttagatgtagtggtgtgtatttttagttttggttatttagtaggttgaggttggataattgtttgaatttgggaggtagaggttgtagttagttaagattgtattattgtatttttatttgggtgatagagtgagattttgtttttataataattataataataataaaaattttaaatttattaataatgattaaagagttttttattaattattagttttaaaatatgtgggtttttttatttgattatgagtttttagtttttatgttgggggatttatttttttgagatgaagatattatgatttttaaattttgttgtaaaaagtatgtatattattttagaggagtgttttttgttatataatataagtaagggttattgtagggttattggaggagggagggaatattagttttttgtatttagagtgttttagatgagatagatgttatttattttttatatatttttgagtaagttttttttttttttgggtttttgtttttttttttgtataatgagaaatgtgtaaaagattgtatttgaggatatttttagttttgttatgttatggttttattagttattaataatttgatgggagttggtttatttattgtttttagttatgaaaatttttagaaagaatttatgggaatgtgattttgtttatatataataataaggtttttgtttgtaagtggtagagattaatttaatatattttaggtaaaaaaggagaatttatttatagggtatggggaagtggttgttatgggattttagggtaggaatagagggaggttttaggaaaggattaagattaggtatgggaaatttttagggattatgttttatggattggatttaggtggttggaggatggggtggttggtttggggattgaatagatattgtaaaaagtgttttttttatttgggttgttggtttttatttggggtagtagttatagaagtgtggggaatgtgggtttgtttagatgtggttggttttgaggggtggtgttgttgaagttttttgattagtgggtattaggatggaggggatgtggatgtaaaaatttttggggatttgagagaatttgaaagaagaaggggtgtgtgtatgtgtgtgtgtgggtgtgtgtgggtgtatgtgtatggtggtgtgtgtgtatgtttgtggatgtgtgtgtatgtgtgtatttgtgtggatgtgtgtgtgtatgtgtgtgtatgtgtgtatgtgtatgtgtgtgtgtgttagttaaatttaattttgagtaatattaagaaaatttatttttttggggttttttttttgggttgggatttagttttggttattggattggtttttaattaaaattatattatagggttttttgtttttggttaatttaatatgagaaaagaggaattaaatggttttattaataagaaagttttagtgtagtattaagggatgtagtaggttttttggttatatttttttataaatgtggaaagtttattggtgaaaatagtttttaggggttaaagtaaaggaattgatttgggtaaagtagaggttgtttgattttaattagatatttttattttttaataatttttgttatttttttgttatagagtgaaagtgtttttaggttaaaagtttagggttttaggttgttattaggatggtgggtgaaggattttattttattttagatttggattagtgaggttggtggagattttttgtagaaagatatgattttagtttgaagattatgattttagtgtgattttgtgtaaggtaagttagaagaaggatagaagggagggttagggtaggatttttaggaatgtttattaggagagtgggtattgtttttgtaatttatttgttgttttatttgtttgtttttttgtttgtttatttatgtatatgtttatttatttattagttatttatttttttgtttttttttgttttttggtgaaaaggaggtagtagtttaggtttaaggagagttttttatgatttagatttgtttaagtgttttataaatatttttttatttattttttataaattttttggaggtattgttattatttttatttgataggtgaggaaataggtatagagaggttaagtgatttgtttaaggtttattaggtagtttttgttttgtaatagattgttttaatatttagtagtttaaaataattgttatttatttagtttatagtttgatgggtgatttataaaataaagtaatttgggttgagtttagttgggtggtttatttggttttgattaggtttatttttgtatagtaaggtggttgtgttgttggaggtgggttggttgttggttggggtaatggggtaattggattttgtgtgtgtttaatttttagtaggttagtttaggtttggttatatagtaatgtggtaggtttttaagggaatgagtgatagtatgtagggttttttgagatttaggtttgtaattggtatattattttttttattgtattttattggttaaagtagattataagttagtttatatttaaagtgtgaggaaatagatttgattttttgatggaatgagttgttaggttatattttaaggaattgggaatagatggggagagaaaatggggttatttttgaaatttaggatagaaatttaggtagtttgatttttgagtttatatgtttaattttgtagtatattgtattattatatatattattagtattatgttaattataatattatgaaatgttgttttttttatatggaatgaggttttgtggtttgttttttgagtagtagaaggttaagtggtaattttataataagtggatattgtgttatttttttttagtatttttgtttgggttaaggatatatatatttaagttttttaaggtgagaggtggaggttggaaggtgaggatgtgggttattatttttagttttaggagatttttaattgtttatttttttaattagtttataattgttttgtggagaggtaatgtggggaggtgttgaagggaatgataggatattggagttaataagtagtgggtttgaatttttattttattattttttagtagtaagattttgggtaaatattttaaattttttgtgttttgatgtttttgtttatgaaataggtatataatatgattttgttatttattttattgagttgttgtgaggaatatatgaagtaatgtatgattgtattatgaaagttattttttagggaatttttattatgtgttgagtttgtagtattttatttatatgattttagtttgaatttttttaaaagtagggttttagttaagaatttggaggtaaatagtttatttgagaagtgattttaagtagtaagaagaaagatttagggagagtgatgtagggaaggaggaaaaggtaaagtgaggtgtggttttagtgttattgttgtgagtagaggggtttggattttattaggtttttttagaaagtgtttagttttttatttagaggatgtgaggtggatttttatattattttagtgaagttttgtttttgggggtattaatgttttgtaattttgggtaggaggaggaggaagaagaggagaaggaggaaaaaaaggaagagaaggaggaatgggaggggaaaaaagaaggaagaggaggggaagaagaaatgaaggaagaagaataaaaaaaggaagtgatgggttttgagtattattatttttgtttttaagataatttattaaaatttaggtaatttaattttgaatattgattgtgtttaataattaatttgtaaaatttttgaaaatttaataattggtttttattagttggttttagtatattattgtttaaagggttaataaatataatgaatgtaagttatagattttgagtgtagttgtggttgttgttgtagttataagtttaatttagagagagagttggggtaatgattttagtgtttggaatgttgagtgttttgtttgtttgtaggttagtatttaatttggtggatgatgttgggttatttttttttgttatatttttttggtttatgttggtgatggtgaaaggttattggtaaaggttgattgtagatattttgtttttattgttgatatatgatttatttgatattaatgttaaaaggtattaggatttgtttgggttattgtattagtttatttttatattgttatgaggaaatatttgagagtgggtaatttataaagaaaaagaggtttaatggatttatagttttatgtgattggggaggttttataattatggtggaaggtgaaggaggagtaaaggtatgttttatatggtggtaggtaagatagtgtgtgtagaggaattgttttttgtaaaattattagattttatgagatttattattataagaatagtataggaaaatttatttttatgatttagttattttttattaggttttttttatgataggtggagattatgggagttaaaatttaagatgagatttgggtggggatatagttaaattgtattagttattttaggagagaagtttattttaaggaaggggttttataaatttttttgtgtgttttttagttgtgtgttttataatttttttaatatggaaaatgatattaatgggtgttggtaattattttttgagatttgggttggattgtatgaattttttggtttaagttgtggggaggtgggaattaggtagtattagtggggagagaggatttattgaagagttatggtttgaggtttaggatttttttggttga

SEQ ID NO: 614 - DNA, 6224 bp, Artificial Sequence
  chemically treated genomic DNA (Homo sapiens)
aaatagtatttataagattgtatgatggttttaaatgtggagggttaagggaaaggaggtgttaaaggtgatttttgggtttttggttaaagtaatttgatggatagtggtgttatttattaggttaagaaggattagaaagttgttagtttgtttttgttgttattattgtttttgttatttaatgtattttggtttttttgtatttgtttggaaggttagtaagaaggatggaaggtaatattaataaattaattgggggtatagtatgtttgagatattttagaagatttaggttttgggttgttttggtttttaggtaagtgatatgtataaatgaggtatttttgaattttgtttttttttattatggttgtgtatataaagttttaaataggttagtttttttaaataatttttaaagtattttttgaatttatgttattttatttttattttttatgttaatataatgttaatgttgttattaaatatagtttatagggatgttggtgtattgggttgaagagtgttttttaagaatttatgtttatttagaatttgtgaatatgatgtttagaaattaggtatttgtaaatgtaatttggttaatttgaggttatattgaataaggaataggttttaaatttaatatgaatgatgtttgtataagaaaagggaaatttggatatagggatagagatagagaggaagatgttatgtgaatatagaggtagagattggagttatgttgttataaattagggaatgtttggggttattagaagttggaaaaggtaagtaaggatttttttttagaggttttggagggtgtatggttttgataatattttgattttggatttttagtttttagaattatgagagaataaatttttgtggttttaagttatttagtttttggtaatttgttataattgttttaggaaattaatatagttgggaaatttaagggaattaatatgtttgagtttgaattattatatagggtatatagtataggtttagtaaatatttattttttttttatttataatagttattattatttttttggtggtttaaattatgattaatttgtatatttatttatttagataagttttattattttgaggattgttttataagtgaggaaattgaggtttaggaaagttaaataatttttttagaattataaagttaaatatagaagagttagagtttaaatatttgttttttatatttatagtattttagtaggttttgatagagtggagaggtattgttagattagatttttaatgtttagatattaattgatttaatgtttagatattaatttttaattaaatttatatttattaataaaataataagttgtagagatttagtataatttttatttatttatagaagaatattaggtttttagtttaaggttagtgttattaaggaatttgttattggtttatattgtttttatttagtagtgtatttgttttgtatatatgtattttaagttaaggtattattagattggatatttatggttttaatttatttaaatgtattttttttatgtatttttttattttattttgatgatattgatttatttttgttatttaataagattataaaaataaatagtgtgagtgtagaggaaattgtttttaaattttatatgttaagatgtttattttttaaattataaagtaaaaaataaatttatgttttaaatttatttttttttttaattaatttggttatttttttttttaagattgagttgttgtgttgttgaatataatagatatataaatttaaggtggtatagttgttattataaggtgttaattttatagaattttagtgtaggagggatttttaaaaagtattttgtttatttatattaggtaagagaaagagtgtttatagtttttaagttttagaagagaagtggttgtattagaagatttttgtgagttatttaagattttgtggttatgttttggtagaattttgtagaatgttaggttttttgatttttttaaaagtgtgtttagttttttaagttgttattaattattaataatgatatttttttttggttttgtgttaatttttttttttgtttattattttggttataaaaagattattataaatagttttagtgttttaggtttttttaattgatatttaatgttgataaattaatttagtttgagttgaaagttttatatatatatatatggttttaagaagggtgattgtgtttattttttaaattgagtagtgatgatttttggattttttaagtttattttttaggaggttgatatggtatataattttgataagagtttggaattaagatttttttttatgttttgtttataagggtgtttataagtagaagttttttttttgtttttttattataatttattaggtgtgtgtgtatatatatatgtgtgtatatatatatatatataaataataaaggaaaatatagttttataaaggtttagttattgtattttttagtttatatttgttaaaagataaaaattatgtgggaattttgttttggtaatatgtttaatattttttgggaaaagtagtgttgtggtatttttagggtgtgtgttgttgtatatatataaagaattggtgttgggtttgtgagtagtttggggtattagtatgtttttagggttggaatttggggtttttttttatgtttttttgtttagtaaaatggaattattttttatttggttggtagagagtttaggttggatagtagtgtatgggttgagggtgggtggttttttatttttattttttaggtagtaggtttttagtttttgtattttttaggagatgtaggattgtgttgttatagtggttttttttgtatttttttttggtaaagagagatgttttggttattagtggtgtgtatttttgtaggtgtttttttttttgttgatatttatttaggtagttttgataggtgtgtttgtttatttggtggttggttgttagtgaagtggtggtgttttagtttttttttagttgttatagtgtttttagtgttatgtttttggtttttttgggtgtatgttggggaattattattggttgggtaggggtaaggggggtgggggttagtgggagggggtgagaggtagagttatagttttttattttttatttaaattttttttagttattgagtatgtttagttgtttggttttgttttttggaggattgtttatgagtgtatgtagttgttttgggtttttgtggtagttggtgggaggtaggttgtagtggtggttgggggtggaggtgagggggagggttggggggtgtgtttatatttagggtgtaggagttaggagttgggagttggagtaggtgattaatttaattatgtttatttttagttgtttttggtgggggtagtttttgtatgtttttttttttaatatttgggatttgtagaaatgttgtttaggattattgtaggattgagttttgtttaagaggttagtagaggtggggaggaggaggggttgagaagtagaatagtgggttggtttttttgttattatttggattggtgatttttaaatttttatgtgtttgtgaattaaaatgtagatttagatttaattggttgggttttgagattttgtaagtttaataattttgtaggtgatgttgttgttgttggtttttttattattttgagtagtaaatatttagagaattttttatttgtgattttttagtggttattttttaatttgttagtttagtaatggtttttggtgtttatagagatttttttagtttggggttgttgagttttatttggaaggagtgtttgtggggttaggttgtgattatttagtttttttttggttgttgtttgattttgaatttaaggtttaggggaagaaggatttttggatttttttatgtttattttgttagttggttagtaagttagttgttggatgagttgttttggttaagtttgaattagtttgttttggttgtttttttgttttttttgagttgggataaaaatttagattgggtattaaagtgtttattgtatatttaatagtaagtttgggtttgtttagttaagaaagttgatagattatgataaatatagagtgtatttttgtattaagagatgttaggtttttgtgtttagtgatgtttgggttgaagtttgtaatgatatttgtggtttaatttaaattttttagttgtttattgtttttttagatttttgaagtttttagtattattaagattttagtgaatgaaagatatttatgaagtagttttgagtttttatttttggaaatgaagaagttatgtttttgtttgtttttagttgttataagagtatttttatgagttagtagtggatatggaatttgattttataattagatagtaggttataaaataaggatttgtatttttttgttttttattatatttaatgattttagatagttttttagttaatagtatagtagttattatttttttttgtttgttttttatttatttagtatttttaatattgtattggttatattaaaatagaaattataggataaatggatgattattttttttttttagtagttttatgtttttgtgtattatatttatttttttttttttaaagttgtatatagttttaataatttatttattgttattattgttatttttataattatatgtataaatattttttatttttgatttttttatatgtgtgtttatatagatgtaaaagttagaatatatttttattgagatattgtttatttgttattggttagtattagttaaaatttttatttgaaatattgaattttaattatttaaaatagtttttttgttatatataaagtttgtgtttgtatatttgtttttgttagttaaatatgatgatgattgttagttgttttaaatttattttggaagtgtgtaaggtaaaaattatagatgaataataatgttatttttgtaaatattgtattgtatgaatttttaagggttttttttatatgtaatgttattttttgagggtttagtttgtagtatttgattaaggattaatatttgtgggtgggagggatataggaagtaggagtaggtagaggtagaagttaagttgtgatgtaagttaattgtagtttttgttagttttttatggagtttattagttagggtgattttttagaatgattatgagttggtttgagatagttagttttttatatttatattaattattgagtatgggttgtttttaggaggggtatgaatttaagataggtagttttggtaatttttataggtaataatagttaaaggtttttgttagttgtagtttttgtggttgtagtaataaattttttatttaaggggaatttaggtaaaatatttttttgtttattatattgatgtatttattgaatatagtatttttgaatatataaagtagaattttattgatttgttagatagattttaaaattttatttttgaataagtaatagattttttttttggtttaaagatttaaaagttggaaaataatttgtaattagttattgagagtatattatttatttaggtatttggttgtatgtattttttatatgattagtttaattatgatttattgagtaggtatgtatttattgtttattatttaagatataattttttttgttaaaatttgtatttgtaatttgtaatggggtaggaataagtgtttgatagtaaatagaagtgtgttttttaataaaatagagttattgattagttaagattttatgagaaattaatgttaattaattttgttgatattaaaaattgtgataagatgaatttgaggggtggagaatttggtagattggttgatagggatgtgtaagatagtatgttggaatttaggtttagattatttagtttattttttttattttttttaggttatgtatttataaatggttggaatttttgaaagatgaattgtaattataagggaattagtatagattttagaaatgaagtaggatatttgtttagatagtggaggtagggaaagaataggaggtggaaaagaatgttttaaggaatataaataaaagtatataaagaa

SEQ ID NO: 615 - DNA, 6224 bp, Artificial Sequence
  chemically treated genomic DNA (Homo sapiens)
ttttttatatgtttttgtttatgttttttggaatatttttttttattttttattttttttttatttttattatttgagtaaatgttttgttttatttttagaatttatgttggtttttttatggttgtggtttattttttaagaattttagttatttgtagatgtatagtttggagaaggtaaagagaatgagttgggtagtttgaatttgggttttagtatgttgttttatatatttttgttagttaatttattaagttttttattttttaggtttattttgttatagtttttggtgttaataaggttggttgatattagttttttatgaaattttgattagttagtagttttgttttattgaaaaatatatttttatttattattaaatatttatttttattttattataaattataaatatagattttgatagagaaaattatgttttaaatggtagataataaatatatgtttgtttaataaattataattaaattagttatataaaaaatgtatatagttagatatttaaatagatagtatatttttaatggttgattataggttattttttaatttttaaatttttgagttagagagaaagtttattatttatttaaaaataaagttttaaaatttgtttgataaattagtagagttttattttgtgtgtttaaaagtgttgtatttaataaatatattaatgtggtggataaaggaatgttttgtttaaattttttttaagtgaaggatttgttattgtagttatagggattatagttgatagaggtttttagttgttgttatttgtaagaattgttagagttgtttgttttaagtttgtgttttttttaggaatagtttatgtttaatgattgatgtggatgtaaaggattgattattttagattaatttatggttattttgaaggattattttagttagtgagttttataaggggttgataaaggttgtaattggtttgtattatagtttagtttttatttttgtttgtttttgttttttgtattttttttatttatagatgttggtttttagttaaatattgtaggttaaatttttaagaaatggtattatatataaagaaaatttttaggaatttatgtaatgtagtatttatagaaatagtattattatttatttataatttttattttgtatgtttttaaaataaatttgaggtagttaataattattattatatttaattagtagaaataaatgtataaatataaattttatgtataataggaaggttattttaagtgattaaagtttaatattttaaataaaaattttaattgatattaattaatgataaataaatgatattttagtaaaaatatgttttggtttttgtatttatgtgagtatatatataagaaagttaaaagtagaaaatatttatgtatatagttgtgggggtgatgatggtggtagtgggtaggttgttagggttgtgtgtagttttgagaaggaagagatgagtatgatatataaggatatgggattattgagggagaaaagtaattatttatttattttgtggtttttgttttgatatggttagtataatattaaaggtattaagtgaatggaaaataagtaaggggaaatgataattattatattattagttagaaaattgtttaaggttattgagtataataaggaatggagagatataaatttttattttgtaatttgttatttagttatgggattagattttatatttattattagtttataagggtatttttgtggtagttgaagatagataagagtgtggtttttttatttttaagggtgaaaatttaggattattttgtgaatgttttttatttattagagttttgataatgttggagattttaagagtttgggagggtagtaggtaattgggaagtttaagttgaattataaatattgttgtaaattttagtttaaatattattgaatataaaggtttgatattttttggtataaaaatgtgttttatgtttgttataatttgttggtttttttaattaggtaagtttaagtttgttattagatgtataataaatattttgatgtttagtttgagtttttgttttagtttaggaaaggtaaggggatagttaaggtagattggtttagatttgattggggtagtttatttagtaattggtttattagttagttagtaaagtgagtatgaaaaggtttaggaatttttttttttttgggttttaaatttgaaattagatagtagttaaggagaagttgggtggttatagtttagttttataaatattttttttaggtaaggtttagtaattttaggttggaggagtttttgtggatattagagattattgttaggttggtggattgaaggatggttattgagaggttatagataaggggttttttagatgtttgttatttggagtggtgggagggttagtagtagtagtattatttgtgaggttgttaggtttgtagaattttaggatttagttaattgaatttgaatttgtattttaatttataggtatatgaaagtttgagaattattggtttaggtggtggtaaagaggttagtttattgttttgttttttagtttttttttttttttatttttgttagttttttaagtaaaatttaattttgtaatggttttgaataatatttttgtaaattttgagtgttgggggagagggtgtgtaggagttgtttttgttggggatgattgggagtaaatgtgattggattggttgtttgttttagtttttggtttttggtttttgtattttgagtgtagatatgttttttgatttttttttttatttttatttttggttgttgttatagtttgttttttgttggttgttatgaaaatttggagtagttgtgtatgtttatggatagttttttgaggggtgaagttgggtagttgggtatgtttagtagttgggggaggtttgggtggagagtagaaagttgtggttttgttttttatttttttttgttggtttttgttttttttgtttttatttagttagtagtagttttttagtgtgtgtttggggagattgggaatatggtgttgggagtgttgtagtagttgagaaggggttgaggtattgttgttttgttgatagttggttattaggtaggtaggtgtgtttgttgggattgtttgggtgggtattggtgagaggagaggtgtttgtggggatgtgtgttgttggtaattggagtatttttttttgttgggagaggatgtgaagaggattattgtgatagtgtgattttgtattttttaggagatgtaaaggttagggatttgttgtttggagggtagggataggggattgtttatttttaatttatgtgttattatttagtttgggttttttattaattaaataaaggatggttttattttgttgggtgggagggtgtggaggagaattttggattttagttttgagagtgtgttggtattttgaattgtttgtaagtttagtattagttttttgtgtgtatatagtagtgtatgttttgggggtgttatggtgttgttttttttgagaagtgttggatatattgttagagtaggatttttgtatggtttttgttttttggtaggtgtggattggaggatgtaatagttgagtttttatgaggttgtgtttttttttgttatttgtgtgtgtgtgtgtgtgtgtgtgtgtgtgtgtgtgtgtgtgtttggtgggttgtaatggagagatagagagagaatttttgtttgtgggtatttttgtgagtagggtgtggaagaggattttggttttaaatttttgttaaaattgtgtgttatgttagttttttagagggtaaatttgagaagtttagggattattattgtttagtttggaggataagtgtgattgttttttttgaaattatgtgtgtgtatatggagtttttaatttgggttgagttaatttgttaatattagatattaattaagggaatttgaaatgttgaggttatttatggtggtttttttatggttagaataataaataaaaagaaaagttggtataaagttagaggaaagtgttattgttaatagttgatgatagtttgaaagattgaatatatttttaggaaaattaggaaatttggtattttatggagttttattaagatatagttatagggttttaggtaatttataaaaattttttagtgtaattgttttttttttggggtttggaggttgtagatatttttttttttatttgatatagatggataagatgttttttagaagttttttttatattagaattttatgaaattgatattttataataatagttgtgttattttagatttgtgtatttgttatatttaatagtataataatttaattttggggagaaagataattaggttagttagggagaaaggtaaatttaaagtatgggtttattttttgttttataatttaaaggatgggtattttagtatatgaagtttggagatagttttttttgtatttatattatttatttttatagttttgttaggtggtgagaatgagttagtattattaaaatgaagtgggggaatatataaggaaaatgtatttaagtaaattaaagttataaatgtttaatttgataatattttgatttggaatatatatgtgtaaggtagatgtattgttaaatggaagtaatataagttaatggtaagttttttggtaatgttggttttagattaaaaatttagtgtttttttgtgagtgggtagagattgtattaggtttttgtagtttgttattttattaataaatgtgagtttaattgaaaattgatatttaagtattgaattaattgatatttaagtattgaaaatttagtttggtagtgtttttttattttgttaggatttgttgaaatgttgtaggtatgggaggtaggtgtttgaattttgatttttttatgtttagttttgtgattttgggaaaattatttaatttttttaagttttagtttttttatttatagaatagtttttggaatagtaagatttatttagatgagtagatgtatggattaattataatttaaattattaggaaaatggtggtgattgttatgagtaagagggaaatggatatttattgaatttatgttatgtgttttatataatgatttaggtttaaatatgttaatttttttaaattttttaattatattagttttttagggtagttataataagttattaaaaattgggtggtttaaaattatagaaatttatttttttatggttttggaggttagaggtttaaaattaagatgttgttagggttatgtattttttaaaatttttaagggaggatttttgtttgttttttttagtttttggtagttttaggtattttttggtttgtggtagtataattttaatttttgtttttgtatttatatggtatttttttttttgtttttgtttttgtgtttaaatttttttttttttatatggatattatttatattggatttaggatttgttttttatttaatatgattttaaattaattaggttatatttgtaaatgtttgatttttaaatgttatatttataggttttggatgggtatgaatttttgggagatattttttagtttagtatattaatatttttatgaattgtgtttgatgataatattaatattatgttagtataagaggtaaagatagagtagtatggatttagaaaatattttaaagattatttaagggaattaatttatttgaggttttatatatataattatggtagggaagagtagggtttaaaagtattttatttatgtatgttatttatttgggagttaagataatttaggatttggattttttagagtattttaaatatattgtgtttttagttgatttgttgatgttgttttttattttttttgttaattttttaaataaatgtaaaaaaattaaaatgtattaaataataaaaataataatagtaataaaggtaagttaataattttttagttttttttaatttggtaaatggtattattatttattgagttgttttaattagaaatttaagaattatttttgatatttttttttttttgattttttatatttaaaattattatgtagttttataaatgttattt

SEQ ID NO: 616 - DNA, 6103 bp, Artificial Sequence
  chemically treated genomic DNA (Homo sapiens)
ggtataatttgttttttaatataaggttattaaagtaatgttttgattttttttttttttttttttagtgatgatgtttattgtgagaataattaatgggtagttgagtatggtggtttgggatttggggtaaaatgagtttaatagggatatatgaataagttgttaaagttaagtggaaatgagaagtagagggaatttggagaggtagatgaagaaggtattagggagtattgagagaatatggagtgaatgttgttagattgtggttttaggaaagggaatatttgtttgtatttgtttagttgtagtattatagtatttttttttgtatattggatttattttattaggtagaaaaaatgggagagattataggaatattggtagtggtggggatgggtaatgaattaggagtgtttgggaaaagtaattttttgttttaaatagttgatagtagtatttgttataattttagagaggtttgtaggaaagtttttatttgttatataagaaaggttgggtaagtagatttttagttgggaagtagatttttagtatttatagaaggtagatattgggttagtttttatttaagatggtagtgttttatattggaaagttaaaggaatttggatttaaaggattttggtttttttttttttgtttataatttttggaattataatttagtattattagattaaggtatgttttattaaattaaaaattaaaagtttttttatggggaaagttttaatgttatagttgaaagaggtgatagttgtattattgttattaaaaataatttattaattttgtttgtgtaaagtattttggtaggtattaaattttaggggttttttgttttaatgtattttttgttttttgtagtttttttagtgtaatgtttggttttttttttgtgaataaaatggatattttgaaaattttatttttgtggagattattataggataagagaatgtgggttttattatttatgttaattagatagtgttgggggaatgtattagaaagttgttttttttaattttatatttttaatgtttgtaaataaaaattttttttttttggtttttattttagattaggaaatttggggagagttggtaagtaaggttttgtattgttggtatatgttatgttaatattggttttttgttttttgttttggtaggtattatatagtgttggagaaataggtatataggtgtttttttagttaagggaagaaagtagtaatggaatttgggagtttaattttaaatttttttatatttattttttataaatatttgttttgtaatgtgtgtatttgtgtgtatatttataggtaaagataatattttaaggtaagtttatataaatggtttggagatatttgataggtttgattatataaaggttttttgttttatttgtattttttaggaatttaggtaaaggtggttttttatttagttgtattgttatttggtaggggagggtataggtatttttttatttgtatttgtttttgtttttttgtttagtagtgttagtttttgattttattggatttgtataggagatgatttataattggttggaagttgtttttgtttttttattttattgtaaatgggggtttgtttggattatttatttattttgtgtgtattaagaaattagtattagttgttagtgggaggtgttattttgtttgaattttagtttgttgtggtgattttgtatatatatatgtattagtttggtagttagagtttgtttggagatgtttttagtttggggtttgtgttttttgggatttttgatgtagttttttgtttttgttttttatgtttaattgggtagggtgttggggtgtgatttttgattttttgtttgtttgttgggttttttggaggtgggttagattgtatttgttgtgggtgtttggtgtgtttttagtttttggtttgtggtggtgatagtggtgttgtttgttggagtttgattttttggtggtggtggtagtggtgtgtagtagtgaatggttggagtaaggtgagttgggttgttagttttttgtgttgtgttgggattggtttttttagaagagtgttggttgagggttggttgtgggttggttgaagaataggtgtattttattgtttgggtttgtggagtagttgttgaagattgtggtggttaggtaggttttttgtgttggaatgtgggtggtgggtatttggtattttgtgattggttgttggggttattgaaggtggtgtgaggtttaggtgtggtgtgagtgggtgttttagggagtgggttgggtgtggtgttttgaggatgttggtgtttttggagtgtatgtaggtggtgggtagtagtagtagtagtgggtgtggggatttggtgtgtaggaggtggtttggagggttgtagatgtgttttgttgttttttgattgattggaggtgttgggggtttgttttgttttttttttgagttttttattgttttttttttggttttgtttttttttttgttttttttttttttgtttgttgtttgttttttggggggaggggtgtgggggtagggagtggatttgtatgtggttgttgtggttgttgtttgtgtttgagtttgttgttgttgttggagtttgtgtttgtgtttgtgtttggtttgtgtggttttatgtttttgttgtggtttttgggggggtgaaggtgaagattggtttttaggatgagtgaaggggtggttgttgttttgttatttggtgttgttttggtagttgttgttttggttgaggagggtattgtggtggttgtggtggtggtagtggtgggtgggggtttggatggtggtggtgaaggggtggttgagtttttttgggagttatgttgtagtgattgtattgtgtggaattggtagtagatgtggttgtgtgtggtatttttgtttattggttttattggtttggggtttagttttatgttttttaaatggattgtggtgggttttgttaaggagtatgtgtttattgatttagtggattttaaggggatgggttaggattttttttttttttttaagtttagttttttttttaaggttatggagattattattattattatttttattatgttttttgttattttttttgttgggggtgttgttttttttaggatgtttaattggattagtatttgtttgattattattatgtgggtgtttatttgtttttttgggtattgggtgtttatttgggttagtttgtgttttattatagtatggaatattgtggtttttgtgatggttttgtttattatggttttgttttttagtagtagtatgttgggtttttgatttttggtgttaggaattttaagtatttaggtaatgtttttttggtttattgtggtatatgttatttttttttatttttatgattttatttttttttggattttgttttttttttaggatgttgtttttttttttttttttttttttttttttgttattattattatattagaaattagtattagttttaaattttgtaagtaaatattgtgttttaattatgatttattattgagttttttttttgtttttttgttgttttttttttttgttgtttgttttttagtaagtttttttttttattttaggtttggggtagagtgagagttgattaaaattggttattagtggggaagaaggtgttagtttgttttggttttgggggggtgggggtgtgtaggaatgggagggagattgttaggttttattggttttattttagtgggttttaagtgagaatagattttttaattttttttaaagggttaatgtgagtgtgatttttttttattgtagatttgttggtgagttgttggattttgttttagtagagggttagggagggagagagggtttttttgaaggtattgagttttttttttgtttgttggtaggaaggaaagaaagtaaagtatatgtaaattgattgatgataaattataaaaggaagttatgtttttgtgtggggtgatgagttgatggagataatggtagaatgttgttgaggatgtttttagtagttttgatttgggtaggaattagaaagggttaattagaagttattgggagatttggggaaaggaggtgatttaaggtaaagggttaaattgattttttagtttgtttgtggttattttaaggtgtagatatagattttgtgattgttgagagtgagttaattaggaggaaatatgaagggagttttgtagagttgttatttttagggttttgatgaaggaggagttttttttagttttgttaagtttttgtttttgttttgtttttaaaggtggggtgtgaattttattttttttttttttgtgtttgaaaaatatagatgagttgagagttttttgtatttaagggtgagaatatttaattgtttggaaatatgttattgttagaatgtagtatttttaatttgggtttagtatgagttagtatatttaaagtatgatagttttttgtttatttgtatagaaagtgtgtatttttttaatatttttataaatgttgtaggtgattaattgattttttattttaatttttattttgtttttatttaaaggaaattttaggtgttttttaagttgatttgattaggatatgggaatagtttgtgtaatttgtgaaggttatttaggataaattttaggttgttagtttaagttttgtgtaaggttattttgtaaaaaattgtttggttatgttgtttttatattgtatttgtgttttgagttatagtatttgagataaaggaagagtgtttattattaattttttagtgatgatgggaatattgggtttgtttttagttatttgttaattttttatttttttgttttatgattttattttgggtgttatttaatttttgaaatttttttttttttaaagaatgtagtgtatttgtaagtaaggtttaggagagggaaagggggaaaaaaaagtaaatttattttgttttggaaaaaattgtttagaagataaattgggagataggaaggagggaaggaaggaatttgttataaattagaatggtagtagagttagtaatttgttgttttttttttttttggttgaagtagttatttttgagagtatatttttttaggaggtgtttagagtttttatttaataaatttagtttgtgttttgtagaaggataaaggatttatgagtgtatgtgtgaatatatttaatggattgaaaatgagtttattttgaagattttagatttttgatttgtttttttgatgtagttgatagaataatggagtgtggtatatttttaatttttgtatgtgttgggagaggagggggattatatatggtaggggtattttatgtttttttttaattgatttttttgtgtattattttggaggtttttaaagaaaagtttaaggtaattatttttatttttttatgttttttttttatattttgtggatgggaatggtagtttgtttaataagtaatgattattgatagggtttttagttttaaggaaaagaggggaaaaatttgtaaatggtgttaatgtttatatagatatataagtagtatttgttgtatttgtattttagttttagtttttttttttttttaaatttttataagaagttgaattaaggtatgtaatataagtatgtaaaatttagttgaaattgatttggtttgtatttataaataagggaaattttaaggaaaagtggattatgtagtttttataaaatgtgtttaaataggtaagttgtatggtgatttgaagaaagaggatagtttagttattttttttatttaagattgtaggatgattaataaaaggaaattaagattttatttgagagattattagtagtgttattgtaggatgaaaaaagtttgaattattggtgtttatattttttttatttgttttgattatgtttgtaaagtttttaggagagaaatttttttttttttagtttttatttttatattttagtggg

SEQ ID NO: 617 - DNA, 6103 bp, Artificial Sequence
  chemically treated genomic DNA (Homo sapiens)
tttattaaagtatggaggtaggagttggggaaaagaaaattttttttttgggaattttatgggtataattaagataagtaaaaaaaatatgaatattagtgatttaggttttttttattttatagtagtattgttgataattttttaaatgaaattttaatttttttttgttaattattttgtaattttggatgaaaaaaataattaaattattttttttttttaagttattatataatttgtttatttaaatatgttttatgaaaattatataatttatttttttttaaaattttttttgtttatagatgtaaattaggttaattttagttggattttgtatatttgtattatatattttaatttaattttttgtaaaggtttaaaaaagagaaagagttgaaattaagatataaatataataaatattgtttatatgtttatgtgaatattgatattatttatagatttttttttttttttttttggggttgagggttttgttaataattattatttattaaataggttgttatttttgtttatggaatgtaggaagagagtatagaggggtagaaataattattttgggtttttttttaaagatttttggaatggtatataaggaaattaattgagaaagaatatgaaatatttttattgtgtgtagtttttttttttttttaatgtatataagggttggaggtatattatattttattattttattaattgtattaaaagagtagattaaaaatttggggtttttagggtagatttatttttaatttattgaatatgtttatatatatatttatgaattttttatttttttataaaatataagttagatttgttgagtggaggttttaaatattttttgggaaaatgtgtttttaaaaatgattgttttagttaaaggagagagaagtagtaagttattggttttattgttattttggtttgtggtagatttttttttttttttttttttgttttttaatttattttttagatggttttttttaaagtaaagtaggtttgttttttttttttttttttttttttttggattttatttataaatatattatattttttaaaaagaaaaaagttttaagggttaagtaatatttagggtaagattatagggtagggaaatgaaaaattagtagatgattgaaagtaaatttagtatttttattattattgaagagttaatgatgaatattttttttttattttagatgttatggtttaaaatataaatataatataaagatagtataattagatagttttttgtaaaatagttttgtatagaatttgaattagtagtttggggtttgttttaaataatttttataggttgtataaattgtttttatattttgattagattagtttaaaagatatttgagattttttttgaataagaataaggtgggggttggggtgggaggttaattagttatttataatatttataaaaatgttgagaaaatatgtattttttatataaataaatagaaagttattatgttttgggtatattggtttatattgagtttaggttgaagatgttatattttaatggtgatatgtttttaaatggttggatgtttttatttttgagtgtagaaaatttttaatttgtttatattttttaggtatagagggagaggagataaggtttatattttatttttgggaatggaataaaagtaaaggtttggtagggttgaaaaaaattttttttttgttaggattttagaggtggtagttttgtagggttttttttatatttttttttagttaatttatttttggtggttatagaatttatgtttatattttggaatggttataggtaggttaggaggttagtttagttttttgttttggattgttttttttttttaagttttttagtggtttttaattaattttttttggtttttgtttaggttagggttgttggaagtgtttttagtaatattttattattatttttattaatttgttattttatataaggatataatttttttttgtggtttattgttggttaatttgtatgtgttttgtttttttttttttttattggtgggtggagaaggggtttagtgtttttgggaaggttttttttttttttttggttttttattggagtgggatttggtagtttgttagtaggtttgtagtgaggagggattgtatttgtgttaattttttgaagggagttgggagatttgtttttatttgggatttgttaaagtggggttagtggagtttgataattttttttttgtttttatatgtttttatttttttagaattagagtaggttggtatttttttttttgttggtggttagttttaattagtttttattttgttttaaatttgggatgggggagggggtttgttagaaaataggtggtgagggaaaaagatagtaggagggtagaagggaaatttagtagtaaattatagttgagatatagtgtttatttatgaaatttggggttggtgttagtttttggtgtggtggtggtagtggaggaggaagaagaggaagaagaggaggtagtattttgaaagggagatagggtttaggagggagtagaattgtgaaggtaggaggaggtagtgtatgttgtagtaggttaggagggtattgtttgggtatttggagtttttggtattgggggttgggagtttagtgtgttgttattgaagaatggggttgtggtggatgggattgttgtaggggttgtagtgttttgtgttgtggtggagtgtgggttggtttggatgggtatttggtgtttggggaagtgagtgggtgtttgtgtgatggtggttaggtgagtgttaatttggttgggtgttttggaggaggtggtatttttggtggagggggtggtgggggatgtggtggaagtggtagtggtggtggtttttatggttttggggaaagagttgggtttggagaggaagaaggggttttggtttatttttttggagtttattaggttggtgggtatgtattttttgatggagtttattatgatttatttgagaagtatgaggttgagttttaggttgatgaagttgatgaatagaggtattatgtatagttatgtttgttgttggttttatatgatgtagttgttatagtgtaatttttgggggggtttggttgtttttttgttgttgttgtttgggtttttgtttgttgttgttgttgttgtagttgttgtggtgttttttttggttgaggtggtggttgttgaagtggtattaggtggtgaggtagtggttgtttttttatttattttaggagttggtttttatttttgtttttttgagggttgtggtagaggtatggggttgtgtgggttgggtgtgggtgtgggtgtgggttttggtggtggtggtgggtttgggtgtaggtagtggttgtggtggttgtatgtaaatttgttttttgtttttatgtttttttttttgagaggtgggtggtgggtggggaggagaggagtgggggaggggatggggttggggagggggtggtaaggagtttggaagaggggtgagatgggtttttggtgtttttggttggttagagagtggtggggtgtgtttgtagttttttaagttgttttttgtgtgttgggtttttgtgtttgttgttgttgttgttgtttgttgtttgtgtgtgttttaggagtgttgatatttttggggtattgtgtttagtttgttttttggggtgtttgtttgtgttgtgtttgggttttgtgttgtttttagtggttttggtggttggttgtggggtgttgggtgtttgttatttgtattttgatatagagggtttgtttggttgttgtgatttttggtggttgttttgtgagtttgggtggtgaggtgtatttgttttttagttggtttgtagttaatttttggttagtatttttttggagagattaattttagtgtagtgtggagggttagtggtttggtttgttttgttttagttgtttgttgttgtgtgttgttgttgttgttgttggagagttaaattttagtgaatagtgttgttgttgttgttgtgagttaggggttgggggtgtattgggtgtttgtggtgggtgtggtttgatttgtttttgagggatttaataagtaggtagaggattggaaattatgttttggtgttttgtttggttgagtgtgggggatggaagtgggagattgtgttgggggttttggggaatgtagattttgggttgagggtgtttttagatgggttttggttgttaggttggtgtgtgtgtgtgtgtagaattgttgtggtgggttgggatttgggtagagtagtgttttttattagtagttaatgttggttttttaatgtatataagatagataaatgatttaagtaaatttttgtttgtggtggggtgggggggtaaaagtagtttttgattgattgtgagttgttttttgtatggatttagtggggttagagattgatgttgttgggtgagggggtgggggtggatgtgggtgggagggtgtttgtgtttttttttgttggatggtggtgtggttggatggaaggttatttttgtttgagtttttgagagatgtaggtggagtagaagatttttgtataattagatttgttagatatttttaagttatttatgtgaatttgttttaaaatattgtttttatttgtaaatgtatgtataggtatatatgttataaggtaagtgtttgtgagaggtaaatatgaaaggatttggggttggatttttaaattttgttattgttttttttttttggttggggaggtatttgtgtatttatttttttagtgttgtgtggtatttgttgaggtaaggggtaaagagttagtgttagtatgatatatgttgatagtgtaaaattttgtttgttaattttttttagattttttggtttaaagtgaaaattgaagaggaggggtttttatttataagtgttaagaatatgaggttgagaaaggtaattttttaatatatttttttagtattgtttgattggtgtggatgatggagtttgtatttttttgttttgtgatagtttttataaagatgaagtttttaaggtatttattttatttatagggggagagttaaatgttatattgaagagattgtagagagtagaggatgtattgaaataggaagtttttggggtttggtgtttattagagtattttgtatagataaggttaataaattatttttgatggtagtaatgtggttgttattttttttagttataatattgagattttttttataggaaagtttttgatttttagtttgatggaatatgttttaatttagtagtgttgaattatggttttaaaaattgtaagtaaaaaaaaaaaaattagaattttttgaatttaaatttttttagttttttaatgtaaagtattgttattttaagtaaaaattgatttagtatttattttttgtaggtgttaggaatttattttttagttaggaatttatttgtttagttttttttgtgtagtaaataaaagtttttttgtaaatttttttggaattatagtaggtgttattgttagttatttgagatagaaaattattttttttaagtatttttagtttattgtttatttttattattgttagtatttttgtggttttttttattttttttgtttggtagagtaaatttagtgtatagaaagggatgttataatgttgtagttgggtaaatgtaggtaaatgtttttttttttgaagttatagtttgatagtatttattttatgtttttttagtattttttaatgttttttttatttgtttttttaaattttttttattttttatttttatttggttttaatagtttatttatgtatttttgttgagtttattttgttttagattttaagttattgtatttagttatttattggttgtttttatagtgaatattattattagagagagagaaaaaaaaaattaaaatgttgttttgatagttttgtattggggaataggttgtatt

SEQ ID NO: 618 - DNA, 6103 bp, Artificial Sequence; identical to SEQ ID NO: 616
  chemically treated genomic DNA (Homo sapiens)

SEQ ID NO: 619 - DNA, 6103 bp, Artificial Sequence; identical to SEQ ID NO: 617
  chemically treated genomic DNA (Homo sapiens)

SEQ ID NO: 620 - DNA, 6250 bp, Artificial Sequence
  chemically treated genomic DNA (Homo sapiens)
tatgtatatgtttatatatatttatatgtataagtttatatatatttataggaaaaagagtatataattgagtatttgggagtgggtatttaaaaagttattgtttattagaggttttttttatatttattaaaaatgaatagaattaggaaagaatttaggatattatttgatttaggattttatttaggttataaatgtgtattatttgatatttgtgggatatttgttaagtttaaattttagttaaaaattttagaattgggttttttattattgtttaattgaattttagttaagaaattatagatatttattttttattggtattttatattagtgtttattattatttttattggtgagttttttaaagggaagggattgggaaataagaatgtttataggataaatttaatttttaattaaaatgggtaaaagtgatttttatataatattaatttaaattttaattaataattattaatagagtaaaattttattgttttaaatatttatttatatatgattttagtaagagttgtttttttagttttattattgttaggtttatttttttgtgtttgatttagtataaaatatgtttttttattatttttttaatatttgattaaattttgatttgtattatgtggtataataggatggtgagtttatggtggggaggagatatatgaattttattggttattttgagagattgattaggaattgtatatttagttttagggatattattaataaattttaatagtgtttttttattttaagaagttattgttaattaatggtttttgttggaatgttttaatgttttataaagatatatattggtagattttatttgttttttatggatatggtggaatttgtttgtttggagaaaagaaatgttattggtaagaaaagttttgttttaaatgtatgtgtaataaagatattgtttaatttattattagtgttgtaaagtgtatagatttttttttgtttttttaggaaaggtttatgttttgaaggagagttaggggtgatattttagttttaaaatttgttagtggttaaaggaattaaagataggttggtttttgtatttgggtggttttagtatagagattgtttttttataaggaaattaaatattttgtttagttattgattttggttatattggaaatttttagtaatggtttttttgaggaaattttttaaaaaattttgtattttttatatttttatgtaatagtatttagatatttttattttgttattgaagggtttgtttttatgataaaataaaaatttattttgagataattataattaagtttttgggatgtagttgtatttttaatatgatttattgggtttttatattttataaatttattaggtttgtaatttattagtaagattatgattattattatatggtttttgtaaattgttgtttgtatgtatgtaattaaaatgggtaaaagatatttttttattaagttttttggggtttggttttattttgttgatttttttttaagttaattaaattgaagtatagtaggttaaatggatagttattaaaatgaattttttgttggagaagggaggtgtttttggttttgtttttataaggattttatttttgttatggttttatttttttagtaggtaaataataagattttgggggtaaaatttaagttaaagtatttttagttttttttgtattttttaaatgtttttttttgtttgattaaaaagagatgttaaaaaatggtgtgattttgtaatggtaagaatattgattgtttttttaaaagatgttttgtaggtagagataagttatttattttatttatgttttatttagtattggtattgaattgattgattaatattttttttgggttaaagggtgtagggtaaagaaagtataattttatgttttttttttagaggttatatgatgttatttttatttagtttttttttttggggattttaaagtttttgttattgatatataagagttttttttgtatgggttgtgagaaatttggtttatgatatttgtttttggaatgattttagagaggtagggtttgaaaaaatgtagtgtttttttaattttgtttttttttaatatttatatatttttggtatattttttatgtttatttgttttgattattggtagtttataggtaagagtagaggatgattggagagtgggggttgttatatttttagtttgtagtatttttggggttttttggttgggtggtgttagtggatgtgagtttaggtttagtggttgtattttgtgagtggttttgagatatataatgtagtagaagtaaattttttagtagtaaagttgtttggttgtatagaagtaagtaattaattgggtaattatttagtattatttttttgggtataggagtggagatttggttttaattataattttaggttagtagtatagatttaagaattgtgtggttaggtttttttgtgtagttttgtttgtgtagttttgttaaatagttaatggatgtgtagtttgatgttttgtgtatttttgttaattaattagaaaaggttgagtagatgggtggggttattttgttttttgtttttgttttttgattttttttttgggttttatgttttttttttttttgtgttgaatgtgttttttaattggatttgttgatttttttaggtgggtgtgtttggtagttgatggggtggggtggatatgattggtgggttgattagtgttggttgttattgttggtttagaaattttatttttgtgttggggattggatttttttttatgttagtgtagttaggtgatgttgggagtgagtttggattgagggtttagttgtgttagtgttgtgtgtgtgtttgttgggtgtgtgtgtttgttgggtgtgtgtgttttttggttagatttggggttttggtagggttggaaaatgatggaagaggtggaggtggaggtgattgagtgttgagaggaatttgtggaattggttgagatggggtttggtgtgtgtttttttttggggattttttgtgtttggtggttgttgttgtttggtttggtgggtttagtttttggtgtggtgtggttaggtgggtgtttgtgttttgggttggttgggatggttgttttttagggatggggtgtttggagtgaatttgtggtgtttgggagtggaggggtttggtttggggattggatttggggttggggggtgtggttgttttaggtgtgtgtggattggggttgtatttgaggtgtggggtttggtgttttaagttttttttggtttgggttttttgtttggtattgttttttttgtgttttgtttgatggagttgtttttagtgtttttttattttttgttgttttgtgtgattttgggttttttagatgttttgaaatttgttttggggtgggtgttgattttggtgggttggagttttgtaggttgggtgtgtttgtgggtgtttagttttttaaatgtttgtagggagggagttggtttttgtttgtggagttaatgttgtttggaaagagattgagagatgaaatttttgttgtaggttataatttgaaattttgatgtttatggtatttttgggttaatatagttaaatttaatggtggaataaaggtgggtgggaggatgtttattttttttgggttatttttgtagtaagaatattttgtaaatgatgtgttatttttttatagttaaattatttttaaaaaatttgtgtttttattgggtttgtattgtgttaaatttggatagataatttttgtttttttgaatttataggattattgtaggaattaaattatttgtgtgaaattgtttttgaattgtgaaattgtttttgattatgtaagatatttgtattggagatgtttaaatatagtggaagtagattgttagtatgttggtgtttttttggaaataagttgtttattttggattttgtatgatataattgtttgtatggttgtattttttttattagtgatagaggatgatggagaatgggagtttttattaaattattgattgaaagttatttaaaggtgatgatagaagattttaatgtaggattgttgatttttaggaaattaattatttgttttttttatttttggttgttttatttgaaattaagtaaatttgttttagtgtggaaatgttgaaattttgataatgttttgaatgggaagttgttaaattttttttggttaaaattatttttttggtggtattttagatggttaatatttattgatgtttaaggtgaagatgattatatatttggagttttattaatttgtgatttttttttgtgtttgtaaatgtaaataagattgtatttttaaatgttaatataaattgttagttattattgatttgtattaggtgagtggaatattttgatggtttttaattgtggttttggttagttttttattttggtatgtgtatgtttttttaaagtttagttattgtttatggaatttttataaatattatatagttgattgtagaggggtagaaggtgattaaatatgttaagtgtatttgagagatgttggggaagatttttagagaaaataatatttgaattgggttatattggtgattttttaagtagaatagtagatatattttaagtagaggaaagtttttgtaagagtatggtggggtggggggtgtatgaaagaatatgattttttaggaaatgataaaaatgttaatatgtttttatgtagattataaaagggagggatggaagattaaattaaggtaggttgttattagttgggaagagttttttatgttgaattaaggggtttggattttattttgtaggaagttttttgggtagtggaggttttaagtaggggtgtgatttaattttattttttgttaagaaaatgggtaatatggtggaggatagaatttaggagggagagattagaggttgggatattggttaagaggtttttgtaatagtgtgtagtgagttaatttttgttttttttggggaatgtttatataaaattagttgattatatttttgtagtataaggtgtttaaaatgtgtattgaaatattttttaggattgaaagaggaatttgaggtattaggtatatgttagttatattaggagttaattaggttttataggatttttattattttttataatattgttttaatgaggaaatgtagtataatttttaaatagttaatttttagtaaattttttttttttttttaaattgataaaggtaattgtgttattgtaaaaaataagtggaattaggtatgaaattttttttgattttttaaggtagtaattatgaggaatagatttagaatttttttttaaataaagattggtattttaaagaaaatgattttgaaagtttatttatggtgagttattgtaaaattatttgtgtagtaagaatttaggtttatattaattttgtttttagatgttagtaaaatatttgaatttgatatgtttgtgtttgtgttgataggagaatgtagttttttatatttaagaatgatttggtttttaattttttaagtaaaaaagaaagtatatataattaaaatatgtataaatttagtttttggtttttaagatagtttttaaaaagtatttgaagttttaatttattaaatttatatttgttttttgtaaaaaatttgggtttataatagaatttattatggaattttttaaaagatgtaagttttaagtaattggaagtttttttttgggaatatttgtaagtttaaatatatgatatagttttatattttttttttttttttggtatgtaatatatattggaggtttggagttatgttatttttttgagttagtgttatggaattgttttataaatgaatgtagtttttttgtattttagtagttaattttttatagtttttttttttttgagatggagttttgttgtgttgtttaggttggagtgtagtggtatgattttggtttattgtaatttttattttttgagtttaagtaatttttttgttttagttttatgtttggttagttttttgtatttttagtagagatggagttttatggtattagttaggatggttttgattttttgattttgtgatttgtttattt

SEQ ID NO: 621 - DNA, 6250 bp, Artificial Sequence
  chemically treated genomic DNA (Homo sapiens)
aggtgggtggattatgaggttaggaggttgagattattttggttaatattgtgaaattttatttttattaaaaatataaaaaattagttaggtataaggttgaggtaggagaattgtttgaatttgggaggtgaaggttgtagtgggttgagattgtgttattgtattttagtttgggtgatatagtaagattttattttaaaaaaaaaaagattgtgagggattagttattgagatataaaaggattgtatttatttatgaggtagttttatagtgttgatttaaaaggatggtatgattttaagtttttagtatatgttatatattaaaaaggaaaaagaaatatgaggttatgttatatgtttgagtttgtggatatttttaagaaaaagtttttagttatttagagtttgtattttttgggggattttataataaattttattataaatttagattttttataaagagtaaatataaatttggtaagttaaagttttaagtgttttttgaaaattgttttggaaattaggaattaggtttgtatatattttaattatatatgtttttttttttatttaaaaggttgaaaattaaattatttttaaatgtaaaaggttatatttttttattggtataaatataaatatattaaatttaaatattttgttggtatttgaaaatgagattagtatggatttaagtttttattatataaatgattttatagtgatttattatgagtaagtttttaaagttattttttttagaatgttagtttttgtttaaaaaaaaattttaaatttgttttttataattattattttagaaaattagaagaggttttatatttgattttgtttattttttataatgatatagttatttttgttagtttaaaaaaaaaaaaaaagtttattgaaagttagttgtttggaaattatattgtatttttttattgagataatgttataaaaggtagtaaaaattttataaaatttaattaatttttaatgtaattgatgtgtgtttggtattttaaattttttttttgattttggaaaatgttttagtgtatgttttaaatattttatattgtaaaaatgtggttagttgattttgtatgaatgttttttgagagaaataagagttgatttattgtatattattataaaagttttttaattggtgttttagtttttagttttttttttttagattttattttttattgtgttgtttgtttttttaatagaaaatgagattaggttgtatttttatttaaaatttttattgtttaaagaattttttatggggtgaagtttaaattttttagtttagtatagaagattttttttaattggtaataatttattttagtttgattttttattttttttttttatagtttgtatgaagatatattgatatttttattattttttaaaaagttatgtttttttatatgttttttgttttattatatttttgtaaaaatttttttttgtttagaatgtatttattattttatttgaaaaattattgatgtagtttagtttaaatattattttttttaaaaattttttttaatattttttagatgtgtttagtatatttggttattttttgtttttttataattaattgtgtggtgtttataggagttttataaatggtggttaaattttgaaggggtatatatatgttgaagtgaggagttggttaaaattatagttaaagattattaggatattttatttatttaatgtaggttggtaatgattgataatttatattaatatttaaaaatatagttttatttatatttataaatataaaaaaaaattatagattaataaaattttggatgtataattgtttttattttaaatattggtgagtgttaattatttagaatattattggaaaagtagttttaattagaagaaatttggtaattttttatttaaaatattgttagagttttaatatttttatattggggtaaatttatttaattttaaataaagtagttaaagataagaaaaataagtaattagttttttgaaggttaatagttttgtgttgaaattttttattattatttttgaataatttttaattaatgatttagtaaaaatttttattttttattattttttgttgttgatagagaaaatatagttatgtaaataattatattatataaaatttaaaataaataatttgtttttagaaagatgttagtgtgttgataatttgtttttattatgtttgggtatttttaatataagtattttatatagttaagggtagttttataatttaaaaatgattttatataaatgatttaatttttataataattttgtgagtttaaaagagtagggattatttgtttggatttaatatagtatgaatttaataaaaatatagattttttaagaatggtttggttatagaaaggtagtatattgtttataaaatatttttattataaaaatgatttaagagaaatgagtgtttttttatttatttttattttattattaaatttagttgtgttgatttaaggatattatgaatgttaaaattttaaattataatttgtagtaaaagttttattttttagtttttttttaagtgatattaattttatgagtgagagttagttttttttttgtaggtgtttggaggattgaatgtttgtgggtgtgtttagtttgtagggttttggtttgttgaggttagtgtttgttttagagtgggttttggggtgtttgggggatttggggttgtgtgaggtggtgagggatggggggatgttgggaatggttttattgaataggatatggaggaagtggtgttgggtagaggatttgggttaagaagggtttggggtgttaaattttgtgttttgggtgtgattttggtttgtatatatttggagtggttgtgttttttgattttgggtttgatttttaggttgggtttttttatttttaggtattataggtttattttgagtgttttgtttttaggaagtagttgttttaattgatttggggtgtggatatttatttggttgtgttgtattgaggattgggtttattaggttaagtaatagtaattattggatatgaagggtttttgagggaaagtgtgtgttagattttattttggttgattttgtaggttttttttagtatttggttgtttttatttttgttttttttattattttttaattttgttggggttttaagtttggttgggaagtgtgtgtgtttgatgagtatgtgtgtttgatgagtatgtgtgtggtattgatgtaattgagtttttggtttgagtttgtttttgatattgtttagttgtgttgatgtagggaaaaatttagtttttggtgtgagaataggatttttaaattggtggtggtaattagtattagttggtttgttagttatatttgttttgttttgttggttgttgggtatgtttatttaggggggttgatggatttgattggagaatgtatttggtgtaaaagaaggaggagtatgagatttagaagaggaattgagaagtagaagtagagggtggagtagttttgtttgtttgtttgattttttttagttggttggtggaggtgtgtggagtgttgagttgtgtgtttattggttgtttggtggggttatgtgggtggggttatgtggaaaggtttgattatgtagtttttgggtttgtgttgttggtttggggttgtggttgaggttgggtttttgtttttgtgtttgggaagatggtgttaggtggttgtttggttagttatttatttttgtgtggttaggtggttttgttgttggggaatttatttttgttgtattgtgtgttttggagttatttgtaaaatgtgattgttgagtttgagtttatatttgttggtgttgtttagttggagggttttgggggtgttgtgagttgggaatatggtgatttttattttttggttattttttgtttttatttgtaagttattagtggttgaggtgggtggatgtggagggtgtgttaggaatatatgggtgttaagggaaggtagggttggggggatgttgtatttttttagattttgtttttttgaggttgttttggaggtaaatattatgaattaggttttttatagtttgtgtagagaaaatttttgtgtgttagtgatagaggttttgagatttttaaagaggaaaattgggtaggagtaatattatatagtttttggaagaagggtgtaaggttgtgttttttttgttttgtgttttttagtttaaggagagtattagttggttgatttggtgttagtattgagtaaggtataaatggagtaaatgatttgtttttgtttataaggtattttttaaaaaagtaattaatatttttattgttgtagaattatgttattttttaatatttttttttgattaaataagaaaaggtatttgggaaatgtaaagaggattgagaatattttggtttaaattttgtttttagaattttgttgtttgtttattgaagagatgaaattatggtagaagtagaatttttatagaaataggattagaaatattttttttttttaataaaaggtttattttggtggttgtttgtttgatttgttgtgttttagtttaattggtttggaaaggggttagtagggtgaaattgaattttagaaaatttgatgaagaaatgttttttgtttgttttgattatgtgtatgtaaatagtgatttgtaaagattgtatgatgatgattatgattttattggtgaattatagatttgatgaatttatagaatgtgaagatttagtggattatgttggaaatgtaattgtattttaggaatttggttatggttgttttaaggtgagtttttgttttgttgtaagagtaaattttttgataatgaaataggaatgtttgaatgttattatataaaagtataagaggtataaagttttttgaagaatttttttagaaagattgttattggaaatttttagtatggttagggttagtgattgaataagatatttggtttttttatgaaggagtaatttttgtgttaaaattatttaggtgtaaagattaatttgtttttggtttttttggttattgatagattttgaaattaaaatgttatttttgatttttttttaaggtatgaattttttttgaaagagtaaaaggaagtttgtgtattttgtaatattggtgatggattgggtagtatttttgttatatatgtatttggggtagagttttttttgttaatgatattttttttttttaggtaaataggttttattatgtttgtaggagatagatagagtttattggtatatgtttttgtaggatattaaagtgttttagtggaagttattggttaatagtggttttttggaatggaaaaatgttattaaggtttattagtaatatttttaaagttgagtgtatagtttttaattaattttttaaaataattaatgaagtttatgtattttttttttattatggatttgttattttattatgttatataatgtaagttaagatttggttagatgttaagagaatgatgggaaggtatgttttgtattaaattagatatagaggaataaatttgatagtaataagattaaaagggtaatttttattgaaattatgtatagataaatatttaagataatgaaattttattttgttgataattattgattaaagtttgagttaatattgtatagagattatttttgtttattttaattaaaaattgagtttattttgtaagtatttttattttttagttttttttttttgaggaatttgttaatgaaaatagtaataagtattgatataaggtattagtaaaaaatgaatatttgtgattttttggttagaatttagttaagtaatggtaagaggtttagttttgaaatttttggttggaatttaaatttaataggtgttttatagatattaggtaatatatatttatgatttaaataaagttttgagttagataatattttgagtttttttttaattttatttatttttaatagatataaaagagatttttaataggtagtgattttttaaatatttatttttaaatgtttagttatatgtttttttttttgtaaatatgtataagtttatatatataaatatgtataagtatatatata

SEQ ID NO: 622 - DNA, 6134 bp, Artificial Sequence
  chemically treated genomic DNA (Homo sapiens)
tttttgtaggaattttgtttttatgttttattttaaagttattatagtatttgtaattttttttgtagttatgtatgtttaattttggaagattgttaattatttttttaggtttatttaaatgaaaatgtattataaaattgtaggttttttttttattttattgaaaaattattttaaaaatgattagtaagttgttttgttgaagtaaaatatttagattttaaataaaagtagtagaattataatatttttatagaaatggattttgagttttttttttttaattggggaaaattttattttttaaaaaagaattttagaatatatttttgtttttagttttttaattttaatataatgttatgttagagaatatgtggtagtgtatattaagtttttatgttgttttatatttttgggataaaatatttgttttgaaaggatttttttgaattttgttattttttgtttattgagtagtggtttttttttgggaaaatagagttattttagttagtgtttagattttattttgtatatgtttttgtggaatattaatagtgttattgagatatatttattattttttttttgtttttgttgtttttatagtttagtgaaatttatatttggtgtttgtaggaaggttattagaagttatttggatattaaatttttaaattataaataatgatggtaagattgttaggatatttttttatagttaaatttatttaatagagttttgtttttatgatagtgtaaattaaattagaataaaattagtgtgattttaggatagttttaaagtgaatatatttttttttttttttttttatttatatattaaggagatattttagattgtatttttatttaaattgtggttattagaaaatattgtgagaaggtagtgtgtaggtaatggtttagttagtattgattttagaaaatggaaaattaagagtaagttatttttaaagtgaagtaatagattttgaatatggattgttttaatttattattttttgattataatataagagtattttattgtaaattaagagtttaagttaattatagttgtggtataattttgagaatgttttttttatatgtagataattttggatttttttgtggtgtttgttattttggtttttaatttttgttttttgtaggggaggggttaatgtttttttatttttttgttttttagaattttttattagagggaggataagggaaggagtaggttttatgtgtagttttgagtaaagtttgaatttgagaaattttatatttatgaattaaggatttttagttttgtgtttttattttatttttttttgtttgtttttttatttggtagaattgagtgatttttagtggttgtagtaattttaattattttgagttgtgttttgaattatgttttttattagtttttttgaaaattaagttgtagtaagagatgtagtttaagggtatttttttagaagaggttaggttattttttaaggaaaagttgaagatttttaataggtatttattaaatatatatatatatatatatatatatatatatatatgtatatggtgtagatttagtaggagagtgtaatttagtatttttaaggtttgtttagttttttttgtgtatttggaaggaagttttattttaaatttttttttatttagagtttatttttgtttgtgtgtgatagggtttttgtatttaagtgagttaaggaatgaattttgaatttttttgggaaagttattaatgttttttttgtattttttttagggtttttgattatggagattttgtttggggtataggtgtgggagttgtaaatttttttttgtgttgtttttttttgtgtggaatgggatggagtagtttttttaggtgttgtttggttgtggaggggagtgggtagtgagagttttgggtttttgtttgggtttttgggtttttggggtgttggttttggtttttgtgtagtgtttagtgatttttgttgggggtttttggtagttgtgttgttattttttgtttggttagtgtgggaggaaaaggggttgtgtttgggagtgttgagtttaggttttttttggtggtgtgtttgtgttttggggtgggggtgtggtggggaagagggagggggtgaggttaggggagggtgtgaaggaggtgtttgtttttaatttgtgggtgggaggtgggtggttgtggggtaattgaaaaagagttggtgaggagttttttgaaatttgttggaattttgggtttgtgtggaggttaggagttgagtggtggtggttgttggatgatgggagtgtgagtaggatggtgataatttttttttgattgggttgtgagggtgttgggtagaggttaggatgtgagttgttagtggtgggatttattgatgattttttggggtgataggagtagttttgagagttagggtgagtgtttgttttaggtggttggattgtttgttgtgtttgtgttgtgttttttgtaggtaatgggagatgtttttgtgtagtgtgagtgttttagtgtggttgtttgtttttttttttgagggataaattttttttaaatttgatttgagtttttggattaaatttgtttgtgttgagagttgtttgtgtagagtgttttgtttttggtgagatgtttgagtgtaaagaaggtagaggtaaagggaagggtaagaagaaggagtgaggttttggtaagaagttggagtttgtggtgggtagttagagtttaggtgggtgtgtagtgtggtttgggttttatgattttttttttgttttttttatttttttttttttttggatgttgtggttttttttttttttttttttttgtttgttttttttgttttgtgttttgagtgtttgttgagttgtgtggtgtttttttttttgggggttgttgtttatttgggtgttgagttttattgggtgtttatgtttagagtttagggtaagggatagtagttttggttgtatttttttagagttttgggagtgttttgttttttggtatggtttttttttagtgttttagtggttgagtttagtttgggagtgggatttgggttataggagttgaggttgtgtgtgtgtgtgttttgtgttataagtgttttgtatgggggttgtgtgttttttagtgggaaatgttggaatgggttgtttggagggagagttggtttttttggtgtgtttggtagtgtagaagtgggtggttgagtaagaggttgtgtgggaagttagttttggtgttttggggtatagggtaagtgatgtagagtgtgtgttggtttattttgatttagttttgtgttatggagatttaagagtagtggtagggatttttaaaggttagtgaagtagatgaaatttagtttagtgttaggaattagttttgttttaaataagttttataaatttttggtttaatagttttattttttaagatttttgtgataaatatggataatttatttttttaagagatgtaagaaaataattgtttatttgaatttttgaatttaattgtttgttggttatttatataataaaatggtaattgaagttttttagaaataaattttgtattttattattagaatatgagtatgaataaaagttttattttagatgtttttaggaagtgttgatgttttggatattattttggataaaagaggtatgttgaataaatatttgtttatgagtgattggtaggtagttgataaaagaggggaggaaggagatgggggagaatttattttttgtttttgtaatttttaattattaattgatttagatgttttaagttgttttgagtgtatttttaatatatattttatgaagtatttttgtagaattaatttattagtatttgataatattgtggttatagtaatattgtagaagtatttgttttttgttggaagaaaataaattatatttgtttggtttttttattggtattattgatagtattttagaatttgggttattggtagagatttttagtagagttttgagtaaaatagaaattgaatagagagtaattgttttattattggttatttttgtgtttgtttttttaataagattttgttgattatatttattttaattattgattattgttttttatgagggtgtattgaatttttttttatttttattttatattttggggagagattatagtattttatttaataagataggaaattggggagttggattagttatttttttgtgtgattttgtttattgttttttttaaggttattatagtatattatggagattttagatttagtttaaattgttgtaaagagttattttgggggtttttattattgtttgtggttgtgtttttttgtttttttgtttattggttttagaagaagtttttgtggttttttgtagatggtttaatgaattaagaaggggttagtggtttgaagtagtattttgtttaggtaataggtgtgtattttgttaagggtttttagtagtagtattgtaatatagtaatttgataagtttagtgggggaggggtaggtatttttgtgttttttagattttatttattaggtaggtagttgttttgtgattagttatgtttttttgatatagagtattagagtttttttggtggtttttatttgttttttagtggtatagtagtgattttttgtaaattagttaagttagtatttttaagtgatatttgtttaattgttttttttgaaaaattggggtgaatttggttgtaggttagtttttagtatatttgtttttgttttttattagattataattttttttggggagggattttttattttttttgaagtattttgtgttttttaaattagataagaatatgtattttttatttgatttagaaagaatggttaataatttgaaattagttttatatagaagtatatggtattaaatataatgttttagaattagtgtttttttttttttttgttattttttttataatggtaagtgttagtgtagttttttttgttttaggagaatttatatttgatgattataatggtttgtgagaaaaatttatattttaggttttaggtatttttaaaggaatgatttatagatgttataattttagtatttatatttgttgtgttagtttaaattaggatttaggaggataagttttttttgtattgtttttattttagtgtttgttagttttaagttttattttttttttaaaatagttattgtaattgtttgtttttgatgatatgtatgtaatagttaagtttttttttagttgttttaatattgttttatgatagttaggggagagataatggggtgggattttagttatttagttttgttgtgtgttatattgtatgtataggtataaatatatttgttggagggaaatttttagggggaaaaggtttttttaatttttatatggtatgagtgattgatatgtgatatatatatggttattttagagtatttgtatttttatataattaattaaatgttgaattgtatattattggggttgtagatgtttaatataattatttattttataataatagttttaataggttttaagtttttggagttattgattttttttttttgtttaaaataagtaagttaagaatagttttgggtgttgtattattgatttatgtattaagagttttgtaatagtttgggtttttttggtgttggattttttatatttagtttttttatattgatttagtttaatagatttttttttttgaagtttgaattataaaattagagtttttttttttttttttttttgatggagttttgttttgttgttaggttggagtgtagtgggtgtaattttggtttattgtaatttttgttttttgggtttaagtgatttttttgttttagatttttgagtagttgggattataggtgtgtgttattatgtttagttaatttttgtatttttagtagagatagggttttattatgttggttaggatggtgttgattttttgattttgtaatttatatgttttggttt

SEQ ID NO: 623 - DNA, 6134 bp, Artificial Sequence
  chemically treated genomic DNA (Homo sapiens)
aggttgaggtatgtggattgtgaggttaagagattgatattattttggttaatatggtgaaattttgtttttattaaaaatataaaaattagttgggtatggtggtgtatatttgtagttttagttatttaaaagtttgaggtaggggaattatttgaatttaggaggtagaggttgtagtgagttgagattgtatttattgtattttagtttggtgatagagtgagattttgttaaaaaaaaaaaaaaaaaaaagttttggttttgtaatttaggttttaagagaaaaagtttgttgagttgaattagtatgaagaggttggatatgggaggtttagtattaaggagatttaggttgttatagggtttttggtatgtggattagtgatatagtatttaagattatttttagtttgtttattttgagtaaagaaaaggaattaatgattttaagggtttgggatttattagagttattattatggaatagataattgtgttgaatatttgtagttttaatagtgtgtaatttaatatttagttaattgtataaaagtgtagatgttttgaaatagttatgtatgtattgtatattagttatttatgttatatgaaagttaaagaagttttttttttttgaaaatttttttttaatagatgtgtttatgtttatgtgtataatatagtatatagtggggttgagtggttgagattttattttattattttttttttgattgttatgaggtaatgttaaaatagttgaagagaggtttggttattgtatatatattattaaggatagatagttgtagtggttgttttaagaaaggagtgaaatttggaattgataggtattaagatgggagtaatataagagaaatttgtttttttaagttttaatttgggttggtatggtaagtgtgaatattagagttatggtatttataggttgtttttttgggaatgtttgaaatttagagtgtgggttttttttataaattattatagttattaggtatgaatttttttaagataaggaaaattatattggtatttattattataaggaaaatgataaagaaggaaagaaatattgattttgaagtattgtatttaatgttatgtgtttttatataaagttggttttaagttgttgattattttttttgaattaaataaagaatatatatttttatttggtttaaaaagtataagatgttttgaagggggtaaaaagtttttttttaaaaaagattataatttggtggaaaatagagataaatatattaaaaattaatttatagttaaatttattttaattttttagggaagatagttaagtaaatgttatttaaagatattgatttagttggtttatagggaattattgttgtattattggaaagtagatgagagttattaaggaagttttggtgttttgtgttaagagagtgtagttaattataagatagttgtttatttagtagatgagatttggagggtatagaaatgtttgttttttttttattgaatttgttaagttgttgtgttatggtattgttgttgggagtttttgataaaatgtatatttattatttgaataggatgttattttagattgttggtttttttttaatttattagattatttatagaggattatagaaattttttttgaagttaatgagtagggagataggagaatataattataaatagtgataagagtttttaaaataattttttataatgatttgagttaggtttgaaatttttgtaatgtattatgatgattttagaaaggatagtagataaagttatgtagggaggtaattaatttagttttttaattttttattttgttgaataaagtgttatggtttttttttaaaatatagggtaaaaataagggaaaatttaatatatttttatgaggggtaatgattagtaattgaagtgaatatgattagtaggattttattaaagaagtaagtataagaatggttagtggtgaaataattattttttgtttaatttttgttttgtttaaaattttgttgaaggtttttgttaataatttaggttttgaaatgttattagtgatattagtaagaagattaagtaaatgtggtttgtttttttttagtaagggataaatatttttatagtattattgtagttatagtattattaagtattagtgaattaattttgtagaagtgttttatgaaatgtgtgttgggggtatgtttgaagtgatttaaggtatttggattaattaataattgggaattgtagaggtaaaaaataaatttttttttattttttttttttttttttttattagttatttattaattatttataaataagtatttatttgatatgttttttttgtttaaggtaatgtttaaagtattagtgttttttagggatatttaaggtaaagtttttgtttatgtttgtgttttgatgatgaaatataagatttgtttttagaaagttttaattgttattttattatatagataattagtaaataattgggtttaaaaatttagataaatggttgtttttttatattttttgggaaagtaaattatttatatttattatagaggttttgaaaaatagaattgttaagttaaaagtttgtagaatttgtttggggtagagttgatttttgatattggattagattttatttgttttgttgatttttaggaatttttgttgttgtttttgagtttttgtagtataggattgaattaagatgaattggtgtgtattttatattgtttgttttgtgttttaaaatgttgaagttaattttttatgtggttttttgtttgattatttatttttgtgttgttaggtatattgaggggattggttttttttttaggtggtttattttagtgttttttgttagagggtatatggtttttgtgtaaagtgtttatggtgtggggtatgtgtgtatgtagttttgatttttatagtttaggttttatttttgggttgggtttagttgttaaggtgttggggaggggttgtgttagggagtgaagtgtttttgggattttgggagggtgtggttgggattgttgttttttgttttgagttttgggtgtaggtgtttggtaggatttggtgtttaggtgagtggtggtttttaggaggggaagtattgtgtgatttaatgggtgtttagagtgtagggtgaagaggatgggtgagggagagggggagggagaggttatggtatttgaggaggaggaggagtaggaggagtaggaggaggattgtggggtttgggttgtgttgtgtatttatttgggttttggttgtttgttgtggattttggttttttgttggagttttgttttttttttttgtttttttttttgtttttgttttttttgtgtttggatattttgttggagatggagtgttttatgtggatggtttttggtgtaggtgagtttggtttaagggtttggattgggtttgggaaaagtttgttttttgagggggagagtgagtggttgtgttgaggtgtttgtgttgtgtgggggtgttttttgttgtttgtagggagtgtggtgtggatgtggtgggtggtttggttatttggaatgggtgtttgttttggtttttggggttgtttttgttgttttgggaagttgttgatgggttttattgttggtggtttgtgttttggtttttgtttggtgtttttgtaatttgattggggagaggttattattgttttgtttatgtttttattgtttggtagttgttgttgtttagtttttggtttttgtgtgagtttggagttttaataagttttggggaattttttgttggtttttttttaattgttttgtagttatttattttttgtttgtaggttggaggtaggtgttttttttgtatttttttttggttttgtttttttttttttttttattatatttttattttgaggtgtggatatgttattgggaggagtttgggtttggtgtttttgggtgtagttttttttttttttgtgttggttgggtggggggtggtggtgtggttgttgggaatttttgataggggttgttggatgttgtgtggagattgaggttagtgttttggagatttgggaatttaggtggagatttgaggtttttgttgtttgtttttttttgtagttaggtagtgtttgggagggttgttttgttttattttatgtggaaaaggatggtgtagagaaaagtttgtgatttttatatttgtgttttaagtagagtttttgtggttaggaattttgggaggggtgtggggggaatgttggtggtttttttagaagagtttggggtttattttttaatttatttaagtataaaagttttgttgtatgtaggtgaaaataaattttaggtggaagggagtttaagataaggtttttttttaggtgtataggaagggttaagtgaattttaaagatgttaggttgtgtttttttgttgggtttgtgttgtgtgtgtgtgtgtgtgtgtgtgtgtgtgtgtgtgtgtgtgtttagtaagtgtttgttagaaatttttagtttttttttaaaaaataatttggttttttttaagggggtgtttttaaattatgttttttattataatttaatttttagaggaattgataaaaaatatagtttggagtatgatttagaataattaaaattattgtagttgttgaaagttatttagttttgttgagtggaaaagtaggtagggaggggtagaataaagatatagaattggagatttttaatttgtgaatgtggggttttttagatttaaattttatttagaattgtgtgtgaaatttatttttttttttgttttttttttggtggagaattttaaagagtaaggaaataagaaggtattgattttttttttgtaaaggataaaagttaaagattagggtaatgggtattatggaaggatttagaattgtttatatgtagagaaaatatttttagagttatattatagttgtggttaatttagatttttaatttatagtgaaatatttttgtgttgtggttgggaagtggtgagttggaataatttatatttaaaatttattgttttattttaaaagtgatttgtttttggttttttattttttggggttaatgttaattgaattattatttatatattatttttttatggtattttttgatggttgtaatttaaataaaagtgtagtttggagtgtttttttgatatgtagatgggaagggagggagggaaatatgtttattttaaaattgttttaaaattatattaattttattttagtttaatttgtattgttataagaatgaaattttgttgaatgggtttaattgtggaaagatattttagtagttttgttattattatttatagtttaaaagtttgatgtttaagtagtttttgatagtttttttataaatattaaatataaattttattgggttataaagatagtaaaagtagagaaaagatgatgaatatattttagtagtattattaatattttatagagatgtatgtaagatggagtttgaatattggttgaaataattttgtttttttaggagggggttattgtttagtaagtaggaaatagtaaaatttagagaagtttttttaaaatagatattttgttttaaggatgtgagatagtataagggtttagtatatattattatatattttttaatatggtattatgttagaattgaaggattgaaagtaaagatgtattttgggatttttttttaaaaaataagattttttttaattaaaaaaaagaagtttaaaatttatttttatggaaatgttgtaattttgttatttttgtttagggtttggatgttttgttttaataaaatagtttattggttatttttagagtaattttttagtgagataggggaagagtttatgattttgtgatatatttttatttgaatgaatttgaagaggtagttgatagttttttaaaattaagtatatatgattataaaagagattatagatattatggtggttttaagataaaatgtaaaagtaggatttttataggaa

SEQ ID NO: 624 - DNA, 6103 bp, Artificial Sequence
  chemically treated genomic DNA (Homo sapiens)
aagttttataaatatgttttttaatttttaatttttttatataaggttttttaaaatggtatttatttatatatttttttttgaatattaatttaaagtaatttttttttgtattttaaaatgtttattgttatatatatttttgatttttgataatttgtgatatgtgagggttttttttttattagtgattgtagttttaaatgtatttttttaagaattatattatatatgttattttgataatatgagatgattataatttagaaatagattatatttttgttttttaaattttttatgatttttgtatttaattgttaagttattgaatatttattagaataaataatgtgtaattgataaggtgtattgtgttgggggaaggagaaagtaggaggagggagataagggagtagagaagttagttattttatggggttatttgataaagattattaagtttttagtggtttagattagggattatgtggagatgtatattgtgtaaatgtaggagtaatttattaataattaaatagaagttgtttttggataagatttaataaatatttttattatttattttttattgtataatattgttttatagttttttaaggtattttagagtattttaatattttttaagtattaaaatatttaatagaataaaaaattagaaatttttagttggtttttatttgtttttataaaatattttagaatataaaattaataataaaaagtagttaataatatttttaaggataatgttagagtgataaattgttgttattttttaaagtttttttttttttattaagatattgttaagattttttttattaaagtgattatagtttaatatagttagtgtttagatatatttttattattaaatttttaaaatttgttttttgaagggggtgggggaggaaagtttttaaaaattataggtattgatttagaaagatgaaggtagtaaaatttattataagttgttatatatattttgttatttaaataaagtttgtttatattatttagaattagttggtaaaattggtaaatatattaatttttatgagagtataggatatttattataatttagtgattatatagtttagtaagttatattgtatgttaataaatttagttttagttgggataaaatgaaattttaatttgaataagtatgagataggtttatattaaatattttagtgtgggataatttgatttgaaatattttattaagaagtaagtattggatttagggataagaagaaaaagtttttagattgatatttttttgatttttgatatgggagatttttatttttagttgtagagatttatagattttagtgttttgtttttaattatttgtatttttgtgtagtatttaatattatgaagatgagagatgtagttaaatatatttggtgagtaagatgttagagttgaatttaaagtatttagtagaagttatttttttttattattattataattaatagattttgtaatttttttagaaatagttaaaaaaaaaaaaaaaaaaaggtgtttgtttgttagttttaagagaaggatgtgttatttgtttagtaaagataggtaattatgatgaagaaaaaaattggagttatatggaggatggaaaatagtagtagaaaaagtttaattttgtttgtgttagtggtgtggatgagtagagtaatgagtttaggagaggaaggagggggtgggggtgattattttttaggagaatttgtaagtggaggtttttatagtttgggagtttgtttagttgtttttgtagattttgttagtttgggtatggtaggtttgtggtagtagggtaggtaaggtttttgagggttatttttgatttattgagttttaggttagtattgttaggatttttttgtttttttttttgttattgggttatgatggtagttttttagttttatatgttatatattagttgtagatttttgttggtataggttagtgtttttttttgttttttatttttggtatattttgagtttgattttttttttttttaattttaatttttttatttatttgtgttaggtgttttgtttaggggtggttttatttttttagtgtttggatgttgttaggtttgggtatttgtagtatttttttgttttatttttattttttattattttgttttttttttttttttttagtaaagggagggggtgatttattgtagttagtgtataggattttgtttattttttttttgagatttttgttgttggtattgaggggggtaaaggttgttttaaagattaagggttgttttgtgggttttaggaaaaagatgtagtgttggttttttttgagtggtatataggagtttatgttgattatttgtttgtgttgtagttttttgttttggagtggttatttgtttagtatttttattaatgttatttgatttgaggtgggtggtttttgggtgttgttggagttggagttgttggttgggattagtttttgtattttgttttttattattatgggtgttttgtatgtttggttttgtattgatttgaggttgggtgagtagtaggtgagtgatatattgaagagtagtatggagaagttgggggttgggttgtgttttatgttgttggtggttgtggtttgtgaatgggtggtggttttttgggttgtggggttgtggggttgtggttgttgttgtggttgtggttttgggggtgtagtgggatgagagatgttgttgttgttgttgttgtttttgttgttgttgttgtttttgttgttgttgttgttgttgttgttgttttttttgttgttgttgttgttgttgttgttgtagttgttgtattgatttttttttagtggtggtggtggtagtgttgagtagtaaatttgttgtatttggttaggttatttggggggttttgttgtttagttgttgttgttttgggaggggaaatagagtttgttggaaaattggaaatagtgtaatgttagtgttttttagttttttattggtagtttggggaggtggtttagttagggtagggggtaggtggtaagtgggttgtgatgtgtagtgtggtgtagtgtagtgtttttattttgtgtgttaggatttggaggaggatgtggaggatgggatgtttgtttatttgtttttttgtgttttttttgtttttggattgagtagggagtgtggtttttgtaggggaagtttgggattgtattgttttagtgtttgtttttagtttgtaggggtgtgggaggaattgtgttattttttgtttttgggatttattggtatgatagtgggggtggtgtgtgaggagaaggtgaagaagagataatgggtttttggtattattttatgaatgtggtaatgggatgtagggtgtgttttttgtttttggttagtagttgtaggagttagagaggttgttatggttagggtggttggttagttttttgttttttgggttgtttttttttttaggaggattttggagtttagtttttaaatgatattatgtgtttggttttgttattgtttggtgaatgttggatatttgatttgaggtgggggagaattttagttttgttattttggaaagagttgggttataaggtgttttgttttagtattgaggatatttaagtagaggtggtagttgagaaagggtttagtttttaatattttgggttttttttagtggttatgtggggatttggttgagtattgtataattttattttttaaaaatttgatttttaagaaaggtggggggttttttgggagttaatagagagttagagtttgttagggttagaggttgttttataaaaaaggttttttttgttttgttttgttttgtttttaaggttgatgtttgtaagaggtagaagagtttgttgtattggagttagtatttgatttaaaatatatatatatatatatatatatatatataggtttataatttattagtttattaatgagggtttagggagtttttaatatttagtttttaattttgaaggatgtggagtttaggaatgttagtgagtttttggggaattttatattgtattgggttttataggaaattggtttaaggatgagtgatttaggttaggattgttattttggaaaggaagtagagagagttatatttttttttttagttaagagatattttaaatttaatatatttaaagttaatattattattttttttattttattttaaattttttataattattaatgttattgttttatttttttagattatattaatttattataataagtttttttattttattttttatttttttttatttaattaattattaaggtttttgggttttttttttaaaataatttttaatttatttatttttattttaattttgttgtaaatattttaagtttaagtttttattattttttatttggataatttttaagttttttaattggtttttattttttttattttattatttatttttagttttattaatgttagagtgatttttttaaaaataaaatgtaagtataatttggttatgttattgtttttagaagttaagtttaaattttttagtaaggttttttatgggttttttttgtttagttagttttatattttgagagttaattttttattttagtaatttttagtattttatgtttttttttggtgtgtttttgtatatgatgttttttgtgtttagaaagttttatttttattttgattatatggaaaatttatttttttaaggtttagtttagtattatattgtatttttttttttatatatttatttttatttttattaatatatatatgatggaattaattttttttttttttgtattgttatgagttttatatatagtattattgttgggatattggtttatattgtattttaagtagttatttaatgggtttgtattttttattaggttaggtatgttaatgttagggattatatatattttatttatttttggatttttattatttttaatataatgtttggtataaaataaggattagtaaatttttagtgaaagaaggagagaaggaagaaaataattgaaaattggtatgtttaaaggtattaagttaatttttttggtttttttagtgttttttattttatttttatagattatagattttataaattataaaatattattataaggaagatagtgatatttatttttttattttataatgaaagaaaaagttttagaggggataggggatttatttaatattttatatagttaggattgaatttagttttttgtttttgagattagggttatagtgaagagtttgtgttttggagtttagtagagttgggttttaaagtaattttgtgatttattaattttgggatgagtttattttattttttaggttttagtttttttattagtatgaaggagaaaataatagggtttattttgtaaagttgttttttgtttagtatgtatttttaataaatatttaattgaatggtttttttgtgttaagtattgaggtattgtatgttattggatgtattgtggtgaattaaattgtttaatagtatatgtttgtgtttttaaagtttatattttgattgggaagataatagtaaataagtatataaatgggtaattaattatttgtattgttgagtgttttgaaggaaataaataggatgaaatgttagagaataatggaaaggggagaggataggtttatttggataagggaaggtttttttgaggagataatatttaagttgagattagaaggatgatgaggatgtggattatgtgagataatatgtaaagtgtttagaataatgtttggtgtatagtaagggttaaaattaaagttgaagattattaatattttatttatattggtggtttttaatttaagagttgagaatttttaagtggtatttattttttgtatattaaaaatatttattaggattttttgtatattaaaaaatgtggttgggtgtagtg

SEQ ID NO: 625 - DNA, 6103 bp, Artificial Sequence
  chemically treated genomic DNA (Homo sapiens)
tattgtatttagttgtattttttaatatatagaaaattttagtgaatatttttaatatatagaaaataaatattatttagagatttttagtttttagattgggaattattagtataagtaaaatattagtaatttttaattttaattttggtttttattgtgtattagatattgttttaagtattttatatattattttatataatttatatttttattatttttttagttttagtttaaatgttatttttttagagaagtttttttttatttaagtagatttatttttttttttttttattattttttagtattttattttgtttattttttttaggatatttagtaatataagtaattagttatttatttgtgtatttatttattgttgtttttttagttagagtatgagttttgagagtatagatatgtattattgaatagtttggtttattatagtatatttagtaatatatagtgttttagtgtttggtatagaggagttatttaattgaatatttattgaaagtatatattgagtaaaaaatagttttatgaagtagattttattatttttttttttatattgataaggaaattaaggtttagagagtgaaatagatttattttaaagttggtaagttatagagttgttttaaaatttagttttgttgggttttagagtataagttttttattatgattttggttttaggaatagaagattgagtttagttttggttgtgtgaaatgttgagtaagttttttattttttttgggatttttttttttattgtaaaatgaaagagtggatgttgttattttttttatggtgatgttttgtgatttatgaggtttgtgatttatgaaaatgaaatgggggatattgaaggagttaagaagattggtttgatgtttttaagtgtgttgatttttagttattttttttttttttttttttttttattggagatttgttaatttttattttatgttaggtattgtgttggaggtaataggaatttaaagatgaataggatatatatagtttttgatattaatgtgtttggtttgatgggagatgtagatttattaaatggttgtttgaaatatggtatgggttagtattttaatagtaatattatgtgtgaagtttatggtaatatagaggaggaagggattaattttattatgtatgtgttggtgggagtagaggtggatatgtaggaagggggatgtggtataatgttgagttgggttttgggaaaataagttttttatgtggttaaggtggaggtgaggttttttggatataagagatattatgtgtagaagtatattaagaaagagtatgaagtgttgaggattgttagagtggggggttggtttttaggatatgaagttggttaggtaaagggagtttatgaagagttttgttgaggagtttgaatttaatttttgagagtagtagtatggttaaattgtatttatattttatttttagaaggattattttggtattggtaggattggagataggtgatgaggtgaaaggagtggagattagttagaaggtttagaagttgtttaggtgagagatgatgagggtttggatttaaggtatttgtagtagagttggagtggaagtagataaattggagattattttaaaagagagatttaaaggttttggtgattaattggatgaggaagaataaaagatgagatgaagggatttattgtaatggattgatgtagtttaaaagaataaaatagtggtattaataattataggggatttggagtgaagtggaagaaataatgatgttggttttggatgtattgagtttaagatgttttttagttaggaggaaaggtgtagttttttttattttttttttagaatagtagttttagtttaagttatttatttttggattagttttttgtggagtttagtgtggtataaaattttttaagagtttattggtatttttgagttttatattttttaaggttaaaagttgggtgttgaaaattttttggatttttattgataggttaatggattatggatttgtgtgtgtgtgtgtgtgtgtgtgtgtgtgttttaaattagatgttggttttagtgtagtaaatttttttgttttttgtaagtattagttttggaaataaaataaaataaaataaaaaaaattttttttatggagtagtttttggttttgataggttttggttttttgttggtttttaagaagttttttattttttttagagattagatttttaaaagatgaggttgtatagtgtttagttagatttttatgtggttgttgaagaaagtttagagtgttggggattgggtttttttttagttattatttttgtttgggtgtttttaatgttaagataagatattttgtggtttaattttttttaaaatgatggggttgggatttttttttattttaagttgaatatttagtgtttattaggtggtggtaggattgagtatgtggtattatttaggggttgggttttagggtttttttaggaaagaggatagtttaagaggtgagaggttggttggttattttggttatggtaatttttttggtttttatagttgttggttaaaggtagggggtatgttttgtgttttattattatgtttataggatggtgttaggagtttgttattttttttttgttttttttttatgtattatttttattgttatgttgataaattttgggagtaaagggtggtatgattttttttgtgtttttgtgggttgaaggtgggtattaaagtagtgtagttttaagttttttttgtagaagttgtgttttttatttggtttgggggtagagggggtgtgagagagtaagtgggtgggtgttttattttttgtatttttttttaggttttggtgtatagggtgggagtgttgtgttgtgttgtgttgtgtattgtggtttgtttgttgtttgttttttgttttagttgggttatttttttgggttgttggtggagggttaagaggtgttaatgttatgttgtttttggttttttagtgggttttgtttttttttttaaggtggtggtggttgagtggtggagttttttaaatggtttggttagatgtggtaggtttgttgtttagtgttgttgttgttgttattggagaagggttggtgtagtagttatagtgatagtagtagtagtagtagtgagaggagtagtagtagtagtagtagtagtagtgagagtggtagtagtagtaggagtagtagtaataatagtagtattttttgttttgttgtgtttttagagttgtggttgtagtaatagttgtagttttgtagttttgtagtttggagagttgttgtttgtttgtgagttgtagttgttggtggtatgaggtgtgatttggtttttggtttttttatgttgttttttggtgtgttgtttgtttgttatttgtttagttttaagttagtgtaggattaggtgtataaggtatttgtggtggtggagggtaaggtataggggttggttttagttggtggttttagttttaatagtatttgagagttgtttgttttgggttgggtggtgttggtaaaggtgttggataagtggttgttttggagtggggggttgtagtgtgagtaggtgattagtgtgggtttttgtgtgttgtttgaaaggaattagtgttatattttttttttggagtttatggaatagtttttagtttttaagatggtttttgttttttttgatattaatggtaaaaattttaagaaagaggtgggtaagattttgtgtattgattgtggtgagttgttttttttttttgttggagaaaggggggaggggtgaggtggtggagaatgggggtggggtggggaggtgttgtaggtgtttgggtttggtagtgtttgggtgttgggggggtggggttgtttttgggtagggtgtttggtatgggtgggtgagggggttggggttggagagaagaaggattaggtttaaagtgtgttaggggtggggggtggagggaggtgttggtttgtgttagtggggatttgtggttgatgtatggtatgtggggttggaaagttgttattatagtttagtagtggaaggaaaaatggagaggttttggtggtgttggtttgaggtttagtgagttaggagtgatttttggaggttttgtttgttttgttgttgtgggtttgttgtgtttaggttggtagggtttgtgggagtagttgggtagatttttaggttgtgaaggtttttgtttataagtttttttagggaatggttgtttttgttttttttttttttttttgggtttgttgttttgtttatttatattgttggtgtaggtagagttggattttttttgttattgttttttgttttttatgtggttttagtttttttttttattgtgattgtttgtttttgttaagtaggtagtatattttttttttaagattagtaagtagatatttttttttttttttttttttagttgtttttgggggaattataaggtttgttgattgtgatgatgatgaaagagagtaatttttgttgaatgttttaagtttagttttaatgttttatttgttggatgtatttgattgtattttttatttttatgatgttggatgttgtataggaatgtaggtgattagaaataaaatattgaaatttgtagatttttgtagttgggaatggaagttttttatgttaaaagttaaagaaatgttagtttaagagttttttttttttgtttttgaatttagtatttattttttagtaagatattttaaattaaattgttttatattggagtatttggtgtaagtttgttttgtgtttatttaaattgaggttttgttttgttttaattaaagttgaatttgttggtatgtggtatgatttgttggattgtgtaattgttgaattatgatagatgttttgtatttttatagaagttggtatgtttattagttttattaattgattttgggtagtgtagataggttttgtttgagtagtaaaatatgtgtaatagtttatagtaagttttgttgtttttatttttttagattgatatttatgatttttggaagttttttttttttattttttttaggaggtaaattttaggagtttagtgatgggagtatatttagatattaattatgttaaattgtgattattttaatgagaagaattttggtaatgttttaataaggaggggaaaattttgggggataatagtagtttattgttttgatattatttttaggaatattgttgattgttttttattattggttttatgttttgaaatgttttataaagataagtagagattagttaagaatttttaattttttattttattaagtattttgatatttggggagtattaaaatattttgagatgttttggggagttgtgaaatagtattgtatagtggaaaatagatagtaaaaatatttattgaattttgtttaaggatagtttttgtttggttgttggtgagttgtttttgtatttgtatagtgtatatttttatataatttttagtttgggttgttgaggatttgatggtttttgttagataattttatagagtaattggtttttttgtttttttgtttttttttttttatttttttttttttttaatataatatattttattaattatatattgtttgttttagtgggtatttagtagtttaatagttgaatgtagaaattatgaaagatttgaggggtagaaatatggtttgtttttaggttatgattattttatattattaaaatagtatgtgtagtatagtttttaaaaagatatatttagaattgtaattattggtaaaggaagggtttttatatattataaattattaaggattaggaatgtgtatggtagtaaatattttagaatgtaaaaaaaaattgttttgaattgatatttaaagggaagtatataaataggtattattttggggagttttatataaggggattagaaattaaaggatatatttgtgagattt

SEQ ID NO: 626 - DNA, 6245 bp, Artificial Sequence
  chemically treated genomic DNA (Homo sapiens)
taaggaggtagtttaaggttaaatttaatttaatttaatatttttagtttgaaagataaaattaaattaaattaattaagaaatagaaaaaagaaaatttaaagatgtatgagtatgtataattttgataaaaataaaaataataattatttgaattggtaattagaaaatagttatatttttaggtaatagatgtttttaggtggatgagattgtgggtggttttttttgttgttgatattttttgtgtatttttaaaaaatatttaatgttttgtaaagaatataagaaatagattagtatattagtggttttggaggaaataattttagtaaaatatgtgtttattaatgaatgtatttttttatttttttttaaaaaagtttataggtgtagttatagttaaaggtaagaggtagttttgttagagttagtaaagtaattaattattttggtttgtttaagattaagtagttttttaagatattagatttttagtgttaaaattagagaagttttatttatattaggagagttgattattttagtttgtgtaatttgtaaagattttttatattttttggtttttgtgagttttaaatttatttagtgaggtataggtgggttggtggatggttatttttattttagaagagaggtagttaaggtttagggaatttttttatttttgatttgggaaaggttttaagagaaagtggttttttaaattgtgtgtatatattattttgataaaattaaaaattagttttaaagaagagagagggttaggtgtagtggtttatgtttgtaattttagtatttttggaggttgaggtgggtaggttgtaaggttaagagattgagattattttggttaatataggtgaaattttatttttattaaaaatataaaaaaaaaaaaattagttgggtgtagtggtgggtatttgtagttttagttattttagaggttgaggtaggagaatggtgtgaatttgggaggtggagtttttagtgagttgagattgtgttattgtattttagtttgggtgatagagtgagattttattttaaaaaaaaaaaaaaaaaaaagagtgagggttaggtgtagttgttatgtttgtaattttagtatttttggaggttgatgtgggtagattatgaggttaagagattgagattattttggttaatatggtgaaattttgtttttattaaaaatataaaaattagttaggtgtggtggtgggtgtttgtagttttagttatttaggaggttgaggtaggagaattgtttgaatttgggaggtagaggttgtagtgagttaagatggtaatattgtattttagtttggtaatagagtgagattttgttttaaaaaaaaaaaaaaaaataaaaataaaaaaaaaagagtgggaatttagaatgatagaaagaaaatgagtttgggagggatgaattgtagaggattataaggtaatatgggagtagttttgtaggtgtatataattgttaaaatttattgattgtatattttaattgggtgtagtttttgttgtttttaaattatgttttaattagagagaaagagagagaatataaggaaatgggggtagttatggtgtttttggagaatttatatttgggatgataattgtttatttgtgtatttttttttttttatttgttttttattttatttttgtttttgatggaatatttttttagttaagttattttttttaaggtagtttaattttttgtggggttgttatagtattaaattgttttttgtgtttttaggattttaatttgtttgtgtatatagaaaatttggattttattttttgtttttagaattttttgttggtttgggtgttttgtatttatttgtgggttgttttgttttgttatttgttttatttgtggtattattgttgtggttatattatttttttttatttgtttaagtttaagatggttagtggtttagggattttttattgatggggttgggttttggggattttgtttttattttttaatttaattaaattaattaattaattaatttagagatagagttttattttgttgtttaggttggagtgtagtggtatgattttggtttattgtaatttttgttttttgggtttaagtgatttttttgttttagttttttgagtagttgggattataggtatgtgttattatatttagttaatttttgtatttttagtagagatggggttttgttattttggtaggttggtttttaatttttgattttaggtgattagttttttaaagtgttgggattagaggtatgagttattgtgtttagttagtattttggttttaatgaggtttttttttatttttttggttggattgggttttttagttttatttgatttgtttggggttatgggaatttgataattgagaatatatatagttagttgatatattttttatttgggaaagtttaagtaagtttagtaatattttttttatttttagtaagtttttggttagttttatttttagattttagtgttagttttaggtaggtttagtggattttggtggttttaggtataaagatttttttttagtgaggattgtttttgtttttggggatgtggattttaatttgtgttttttttgtaggttttgggtgttttgttgtggtgtgttttttgggtggattttttttattttttttatggtttggtttatggttgggtttttgtttttgttttttttgttatttttttggtggtgggggttattatggttagtgtggggttttgggaaagtggatgggggaggtttttattgggttgtggattgtgatagggaaattgtgggttttgaggagagggttggatatattgggaatgggaagaagaagggggtggttttagaaatttttggttatgtgggatggggagaaatggaggtaggtttagatgtgtgtgttttgtttgggtttttttgttttttttgtatagttgttggttattttgttgatatagtatgagtggttgtagggtgtatagtttttgggggtttttattattttttggtttttgtgtgtggtttgtgttattgttttattttgttttaagatttttttagttaaggtagaggtaaggttgggggagaggggaatttgttaggtttagttttgataggagggtgattttagggtttaaagttattgttgggttttaggttttttttttgaggttttaagtataaatataattgtgttgttttttatttgttatatttttatttggaagtaggttgaggagggggtattagtgtaatataggaatgagttaagatgttattattgttggattattatgtgagggtagggggttgttttatagtatttatttattaagtgtaatatttgatgtgggtgttagttagtgtttgtgtaatgaatatatgtatgtagataagtgtgaagagttttggtttatttagaggttttattagtatgttttttttttttttttttattttttttagtttttggttttttttttgatttttagtggttgtgatgttgggttggtgggatggaatattgtaggttaatttagtgttttttatttttttattttagtgggaagtaggtaaggagagtagtaaagaatataggttgtgaataatttatttattttttatgtgggtttgggtgggttgttgaaatttttggagttttatttttttaattgtagaaagggtgttatgagttgttttgtttgtaggttgatgttttagttagataaggttatgtaggtaaggtgatggtattatatttggtataggtgttatatttggtttttgttgaattagagtttttttgtgatttttttttattttttagagttttttgagtggggatttggaggtttttaggtgttgttttttgttttagaggagattgatgttttaagggattttgtagggtaggggttgtaggtttaggtttttttagtgtttttgatgtttttttatttttttatttagggtgagattttagattttttttgttttattattttttatatttattttgttttggtattttttgtttttattttggtttgttttagggagaaatttttatttttttttgtaaagaatgttgattttgtgagttttttatggagggtgtgggggttttatagttgagtttttagtttaattttgattagtagtttttaatttttttagttttttttaaagtgggagagaggttatttttataatttgtaaattggggtttggagtaggaataagggttttttttatttttttattttgttttgagagggtggtgggtatttttgatttttttgttttatttttttgttttttagaatttttattttgagattagtgttggtttttttttttgtttgtttttttggtggtttataaagtgagttggtttttttattagttaggttagagggaggggagggatggaaggtgagatggagaaaggggagtagggtagtagtttagggattgggttggttatttattttattttttattgtagtgggtatagggtagatgagggtagggaagtggtttgggagggggattaaatgtagaggtttggtttggtttagtgttgtttttaggttataggttagttttgtatttggtaggttgtggggataggtttaggaggttggaagaagattgttattagttttgagtttttttgtttgtgataaatttgtagtttgttatttttttggttgtgttttagagtggtttgagtaggataattgtgtttgtgatttgggtgatagtttattaattttatagtattgaggaagtatttgaggttggggttaaattgtttaggttttgtttttatttagggttttaggtagtgtggattttattattagggtttggggtggggaggagatgggatatttggggaggaggaggagaagggggtagtggtaggaattttggagggagagttagtgattttaagtttatttattgaggaaatgaaggagatattttttatggttatagtgtttgagggagatttttttttttggagattttggggttttggagatattgatttttggttttaggttgttaaattttgattttttgtggggttgtttgttgggttttatttttttttaggatggttatttatggttattggtattttttggaggagaaggatttttggtttttaaaggaagaggatagattttagatggtggtgtagtagttgttggaggtatggaggaagtaggaaaagtagatggtatggtgaggttttttttttgttttaatatttagtttttttgtttattttagattttttgtagaggatgttggtagattttggagggtggtattgttggggtggtaagtagagtaggattaggtgattttttggtagttttgggattattttatgggaagtttaggtttggatggtgttagtttttttagttttggtgggggtaggagaatggttggtattttggagtaattattttattttaggttttattttaaggatataaataaatttatttaattttttaatagttttaaagggtaggtttaagtgtttttgtgttatagatggggatattggggttgggtgtggtggtttatagttgtaattttaatattttgagatgttaaggtaggaggattgtttgagtttaagagtttaagattagtttgggtaatatagtgagattttgtttttataaaaaataaataagatgagttgggtatggtggtgtgtatttgtagttttagttatttgagaggttgaggtgggaggattatttgagtttaagaggttaaggttatagtgagttgagattgtgttattgtattttagtttgggtaatagagtgagatttttttttaataataataaaaatagatggagatattgaagtatagaaatttaatagagggttttttagggtttttaagttggtggtggtagagttggaatttatatggagttggttggttttagaggttttttttatattattgtattattttgtttgattgagagggttgattttagggttaggagttagtatatttttgttaattttgtttttttttgtttggaggtggtggttgaatgagatgatttttttttgaggggtttttttattgttagttttttattaaggattat

SEQ ID NO: 627 - DNA, 6245 bp, Artificial Sequence
  chemically treated genomic DNA (Homo sapiens)
gtggtttttgataagaggttgatagtgggaagattttttaggggaagattattttatttagttgttgtttttagataggaggaggtagaattggtaggggtgtgttggtttttggttttggaattagtttttttagttaggtagggtggtgtagtgatatgaggagaatttttggggttagttggttttatgtggattttagttttgttattattaatttggggattttgggaggttttttgttaaatttttgtgttttggtgtttttatttgtttttgttgttgttgagaaaaggttttattttattgtttagattggagtatagtggtataattttagtttattatagttttgattttttgggtttaaatgatttttttattttagttttttaagtagttgggattataggtgtatattattatgtttggtttattttgtttattttttgtagagataaggttttattatattgtttaggttggttttgaatttttggatttaagtaatttttttgttttggtattttaaagtgttaggattatagttgtgagttattatatttggttttagtgtttttatttgtaatatagggatatttgaatttattttttagggttgttgaaaaattaagtgagtttatttatatttttaggatgggatttgggatggagtagttgttttaaagtgttagttatttttttgtttttattagagttgggagaattagtgttatttaggtttaagttttttatagaatggttttgaggttgttaagaaattatttggttttgttttgtttgttattttagtaatgttgttttttaaggtttattagtgttttttgtaggagatttggggtaagtgaaggggttgggtgttggggtaaggggagggttttattgtgttgtttgttttttttgttttttttatgtttttagtagttgttgtattattatttgggatttgttttttttttttagggattagaggttttttttttttaggggatgttggtagttatagatggttattttggggggaggtgaagtttggtaggtagttttgtagagggttagggtttagtagtttggagttaagggttagtgtttttagggttttagggtttttagaaaggagggttttttttgggtattgtgattatgaaaggtgttttttttatttttttagtgaataggtttgaggttattggttttttttttgaagtttttattattattttttttttttttttttttttaggtgttttattttttttttattttaggttttggtgatggaatttatgttgtttggggttttgggtgaggatgaggtttgggtaatttggttttagttttgggtgtttttttagtgttgtggggttaatgagttgttatttaggttatagatatagttattttgtttaagttgttttgaggtgtagttaaggagatgataggttgtaagtttattataaatagaggagtttagaattaatgatagtttttttttagttttttgggtttgtttttatagtttgttagatgtagggttggtttgtagtttgggggtggtattgggttaggttaggtttttgtatttggttttttttttagattatttttttatttttatttgttttgtgtttattgtggtggggggtgggataggtggttagtttggtttttaaattgttgttttgtttttttttttttattttattttttattttttttttttttttggtttggttggtggaagagttaatttattttgtgaattattagaaaaataggtgggagagaaagttagtgttggttttagggtaggggttttagaaggtgagagaataggatgggggaattaggagtgtttattatttttttaaagtagagtagggaaatggaggggatttttgtttttgttttaagttttagtttatagattgtggggatgattttttttttattttgaaaggaattggaggggttgggggttgttggttagagttgggttgaggatttagttgtggagtttttgtattttttatgggaaatttatagggttgatattttttgtggagaaaaatggaggtttttttttgaagtaggttaagatgagggtagagagtattagggtaaagtggatgtagaaggtggtgaagtggaaggggtttgagattttattttgggtgggagagtggaggggtgttagaagtattggaaaagtttgggtttgtagtttttgttttgtggagttttttggggtattagttttttttggggtaggaggtagtatttgggggtttttaggtttttatttagaggattttgagagatgaggaaggattataagggagttttggtttagtgaggattaggtgtggtatttgtgttaggtgtggtgttattattttatttatatgattttgtttaattgggatattagtttataggtaggatagtttatgatgttttttttgtaattaaggaaatgaggttttaaaggttttagtgatttgtttgagtttatatggggagtaagtgggttgtttatagtttatgttttttgttattttttttgtttgttttttgttgagatggagaaatgggaggtattaggttggtttgtagtgttttattttattagtttaatattatagttattgaagattaagaggaaggttaggaattgagggaggtgggaagaaaggaagggaatatgttaatgggatttttaggtaagttagaattttttatatttgtttgtatatatgtgtttattatataggtattgattgatatttatgttagatattgtatttggtgggtgggtgttgtggaatagttttttatttttatatgatggtttaatagtggtggtattttggtttatttttgtgttatattggtgttttttttttagtttgtttttaggtagaaatgtagtaagtggagaataatataattgtgtttgtatttgaagttttgagggagggatttgggatttagtagtgattttgaattttgaggttatttttttattagggttaaatttggtaggttttttttttttttaattttatttttgttttggttaaaaggattttggagtggaatgggatgatggtgtagattatatataggaattagaagataatgaggatttttgaagattgtatgttttgtagttgtttatattgtattagtagggtggttagtagttgtgtagggagggtagggaggtttgggtagaatatatatatttggatttgtttttatttttttttattttatatggttagaagtttttggggttattttttttttttttttatttttaatatgtttagttttttttttagagtttatagtttttttattatagtttataatttaatggagattttttttatttatttttttagggttttatattgattatggtgatttttattattaagggggtgataaagaaaataggggtaggggtttggttatggattaggttatggaaggagtaaaaaaggtttgtttaggagatgtattatagtaggatatttaggatttgtgaagagagtataggttggaatttgtatttttagaggtaaggatagtttttattgggaaggggtttttgtatttgaagttattagaatttattagatttgtttgggattggtattgaggtttgggaatggagttgattagaagtttgttggaggtggggagagtgttgttgaatttatttaaatttttttaagtggggaatatgttagttggttgtatatatttttagttgttagatttttatgattttaagtaggttaggtgagattggggaatttagtttagttgaggaggtgggagagggttttattaaaattagaatgttggttgggtatagtggtttatgtttttaattttagtattttgggaggttgattatttgaggttaggagttggagattagtttgttaaaatggtaaaattttatttttattaaaaatataaaaattagttgggtgtggtggtgtatgtttgtaattttagttatttaggaggttgaggtaggagaattgtttgaatttagaaggtagaggttgtagtgagttaagattatgttattgtattttagtttgggtgatagagtgagattttgtttttaaattaattaattaattaatttaattaaattaaaaaataaaagtagaatttttagggtttagttttattggtaggagatttttgagttattgattattttgagtttggataggtgggagaggatgatgtagttatgataatggtgttgtaggtagagtaagtagtagggtagggtgatttataggtagatgtagggtatttaggttagtagggagttttggaagtagggagtgaggtttgggttttttgtgtgtatagataggttggagttttggggatatagagaatagtttagtgttgtggtagttttatagagaattgggttgttttgaggaagatggtttagttggagagatgttttattagagataggggtggagtggaagataggtgaggaggagagagtatataaatgagtagttgttgttttaagtgtgaattttttaaggatgttatggttgtttttatttttttatattttttttttttttttttaattgaggtataatttaagggtaataaaaattgtatttaattaaagtgtataattagtgagttttgatagttgtatatatttgtaaaattgtttttatgttattttatggttttttgtagtttattttttttaggtttattttttttttattattttggatttttatttttttttttttgtttttgtttttttttttttttttgagatagagttttattttgttgttaggttggagtgtagtgttgttattttggtttattgtaatttttgttttttgggtttaagtgatttttttgttttagttttttgagtagttgggattataggtgtttattattatgtttggttaatttttgtatttttagtagagatggggttttattatgttggttaggatggttttgattttttgattttgtgatttgtttgtattggtttttgaaagtgttgggattataggtgtgatggttgtgtttggtttttatttttttttttttttttttttttgagatggagttttattttgttgtttaggttggagtgtagtggtgtaattttggtttattgaaaattttgttttttaggtttatgttatttttttgttttagtttttggagtagttgggattataggtgtttattattatgtttggttaatttttttttttttgtatttttaatagagatggagttttatttgtgttagttaggatggttttgattttttgattttatgatttgtttgttttggtttttgaaagtgttgggattataggtgtgagttattgtgtttggtttttttttttttttaaaattaatttttaattttattaaagtgatatatatatatagtttaaaagattatttttttttaaggttttttttgggttagggatagggagattttttgagttttagttgttttttttttgaaatggaggtgattatttattggtttatttgtattttattgggtggatttgagatttataggaattaaaggatatggagagtttttgtaaattatatagattagagtgattaatttttttagtatggatgggatttttttggttttagtattgaaagtttagtgttttgggaagttgtttggttttgggtaaattaggatggttggttattttattggttttgataagattgttttttatttttgattataattatatttatgaatttttttggaaagggatgggggaatatatttattaataaatatatgttttattgagattgttttttttaaggttattaatgtattaatttgttttttatgttttttgtaaagtattagatgttttttagagatgtatagaaaatattaataataagaaaaattatttataattttatttatttagagatatttgttatttgaggatataattattttttaattgttaatttaaataattattatttttatttttattaaagttatgtatgtttatatatttttgaatttttttttttttgttttttggttgatttggtttggttttgttttttaagttggaggtgttaaattagattaaatttggttttaagttgttttttta

SEQ ID NO: 628 - DNA, 6150 bp, Artificial Sequence
  chemically treated genomic DNA (Homo sapiens)
aggttgatagtttttttagaaagtgtggaagtaaaatagaggttgtgtaagggatgggaaaaattaaaaattaagtattttttttatttttatttttagtattgaatgttttatttttggttatttaaatgtgtgggagtttttttttattaattattagttttttagtagagattaattgggagttttataatttaattttattttgattttatttatttggagaaagtattagattatataggttaagggtttagttttataagatttttttttaatgttagatgttaattataagtagtaggttgttatatttatatttttgattaattagttataagttgggggtttataattttttttttaggtttagttaatttgttaggtaagtttatagaattatagaaaatatttgtttatatttattagtttattatattaatgaaggatgtaattagggatatagatgaaaaatagttggaagagatgtaaagggtagagaatgtggaaagggatatagagtttttgtgttttttttagatatgttattttttaggaattttgatttgtttagtaatttggaaattttataaattttgttttttggggggtttatggaggtttaattatatagttatgattaattatattattggtgattaagttaatttttaatttgttttttttttttggaggttgtaagggaggtggtattaaaagttttaattttaattatgttttaataagtttattagtatataaaagatatttttaatattttagagattttaaggattttaggagttttgtgttaggaattaggggtagagatatattttttattatattataatattatagtttggtgtatagaaaataaagtaaataaaaattaagataaggtaattattaattttaggaaaagtaaaaagttataagagggatgaaatgttataaaatattgtatggtaaaatagtgaaaagtatttgtaaagtttttttagtgtaaatattgaatttttttttaatgatggtattattatattgggtagttgaaaagaagagaaggtagtgtgtttggagtagggtgagtaaagggagaatggtaagaaaggagattagaaaggaaaataggaattaggttatgttgaggtttggatttttttttttaagggtgttagagagttattggggagttttagataggaaatttgaatgttttaatttatgtttgaaaataataattttggttttattgtggaggaaaatatattatgtagggataaggtgaaaagttagtaggtttgttgggtaagagggataagaggtttttgtagaagagattttttttataatgtggtttggattgggaaaggtatattttgggatgtaaggaagtgggtaggtgggaatatatttaggaggttggtggtttatggagtaaaaagagggatatagggatgattttttgtatgttagtataaggtatgtggagaaggtagaggaggttgttattgggtttaggaaggttggggagggaatgatttgtaattagagagtttgggatttagggttttgttttggatttgttaggttgagttgttttagaaagtattaagtaggtaattgtgttagggtttagggtatagataaggttagggagaaatttagaatatgtttagatttaataggtagtaattttttttttttttttgttaatgtaaagaaatgttttattatatgtttggtgttttatatggttttaatggtatgatttggggtattgattgattgaagatttgatattgagaatttaagggtaaataagtagtgaattttggaatatattataataggtaatttatttaaagtgtttaggtttttttggttttttattttgggttatatttgttttaaggaaatattttttttattaaagttgaatttataaaatagtaaaagtttttttttgtttatatatataagaaataattttttattattagttggatttaataaatatttttttttaaaaaaaaaatttgtttttgtttagtagatttttttttatgtgtataaagtatgtgttaagttaaagattatgttaggtatattttgagatattttttgttttttaaaaagtttttttttaataaatatttaaaaggattaatttgtttaaaagttttttaaagtataatttattataggttgtagagttttttaaatttttagtaggatttttttttgatttttttattgttttgtgtaatttttgtatttaattatttatttttgaattggtttttgtagtgtggtttttaataagaattgggttttagttatattatagtagatgtggtgggggtggagggtagtagtggtaattgtaaaataaaatgtattataaagtggtaatggtttgtgatttaggttagttgttgaaaaataaatgtttgttatatagaattatagaatttgagagtttgtggttaagggaagttgtttattggtggattgatagtgttttgggtggtagaaagaaggtggtggtggtggagatttggggaagttgttggatttttaaaaaggtatttgttgggtgagtttttattgtgtaaatgggagttataggtgtttgattttaaggggttataatttgggaaaatttaagtttgtaaaattaagtatgttaaattaagtaagtttttgttgtgtattaagttgatgggggtgattatttatggtggagaaattgagtggaggaaggagggagaattttgttaaagtttgtttgtgattgatagttagggagtgatttggaagttaggaagaggggtagagaggaaattaaagaagtaggtaagagagttagtttatgaaaatagagtttgttgtggagagtagtaggtatatttgtggaggagggggttgttttatttgtggggttgttgtgtgtttttttaagtgtgttagtgggggaggtggggttggaaaggaaatttggtgaagggttggtttggagtttggggtggggatatttattgtgggatagggttagtaagaggatttgatatgtattgttttgagtgatatgtgtaaatgttaagatatagagatatttgtaaatgttatttaagagggtgaggatgggggagtggttttgaggttgtgttttttggggtaggtattggtttttgtggggttgtgggttaagtgttgtttttttttaaggaattggtatttggggggggggggttggttttgttgtgttggaagtgtaagttttggggttttggagatgtgttggggtgtgttgttttttggggtagttttggattttggtgtgtttaggtgtagtgtgtggtgtttttggtggggtgggtagtgagttgttttagtttggtgatttattttgggttttgtagggtgtgagtagagtattggttagggtgagtaggagggtgtgggtgggggatatgggtagtgggtgtgttgttattgttgttggtttttagtgtagtagtttttgggtttggtggtgagtgttgtattattttatgtgggtgttgagttggggttgggtgttgtgattggagggattttttgttttggtgagttagttttggagtttttgtgtagtgtttgtgttgttgttgagtttttttagttttttatttttaaaaaagtttttttttgtgtgtgtgtgtgtgtgtgtgtgtgtgtgttgttttggtataagttagttttgattgttgtaataaatgagtaaattgtttgagttggtttggggattaggaagagtgttagtgagagaaggtaggtttgtgaaatggatttatggttagtagttattgtttttattattgtggaataaattattgttttttttgtatttttgttagttggtggtgttttgtgggttttagagattgtttgggtttttttgttagggttttgttttgagttgtggtttgtttatttttgagggtgggtggtttagatgtggtttagtggtgtttgggtgtttggagtgtatatgtttttgttttaggatgatgtggttgtagggtttggggtgtttggttgttaagtgtatatgtggtggtatggtttagttttttaggttgaagttggaaatgatgattttgttatttgttttttggttttttgggaatttttggagtgtgggttaggtttttattgtggtttatagtttggtgtgtgattttgtttggttttaagtgtttaaaggggtattttttgtttgagaaataagtttggatttgtaggtataagatatttgggtgttatttttgattaatagtgttaggttttatgttgatagattggtttatgtttttattttatgatttggatttagaaaagggtgtatagtgatgttttttaaatttttttgattgtaagaagtatttgggttggtttgttaaaaagatttttgggtgtttttttatgtttttagaatgagattttttaggttgtgaggttaggggagtttagggtgtttggagaaatattaatgaaagaatggtgtgttttgtttttttatttttgttttgggttgattttatttttttagttttgtttggtttttagggagattatgaaaagtagtagtgagggggtttgtatagatagaaatggttggagttatggaggatggttgatgtttattttgtgggttattatgatttttaattttggggatttattagaatagtaagagttaaagatattgttagttttagatattagttaatttagttttttataatgtgtggagtttaatagtttttaaagttttaggtgattttattgtgttgtttagatttaggattatttgtagaaattttattttggttttgtgattttgtattgatttttgatggagtatttatttttaggaggtggttatttagtatttgaggaagttgttttttatattatttttttttattgtagaggagtttttttaggagtttttttttatggtaggttttgtagtgtttttaaaatttaggttgatttttttaataaggtgtaggattttttttttaaaaaattttagtgggaagtataggttttttagttttttttttaatgttgttatattttagtattagatttggaaattaggtttggtttaagttttgtgttatatttaattgtattattaattagtgttgtagtgtattttttttgtttatttatttagttaatttatatgagtaattttatgttagaatttgggaaattaaatgagaaagttttttgtttttaaagatttttttttttgattaaattgataaattattattattggatagtgtgagttagttatttaatttagttaataatgattaggtttgtttattgatatggtttggttgtgtttttatttaaattttattttgaatttttatgtgttgtgggagggatttggtgggaggtaattgaattatgggggtaggttttttttgtgttgtttttatggtagtggataagttttaaaagatttgatggttttaaaaagaggagtttttttttataagtttttttttattttttgtttgttattatttatgtaagatatgatttgtttttttatgttttttgttttagttatgtggaaatgtaggtttattaaatgttttttttgtataattttatttagttttgtgtatgtttttattagtagtatgaaaatagattatttattattttataatttattatatattttgtataattggagtattgtgttaatgttttttatttgtattattttattttttaagttttgaatatatagatgaggaaattgtagtatagagatgtagtttttttattattatatagtgaagtaggttagagtttaattttagatttgttaaagataaagtttgtttttttaaggttgagttttaatttttagttttagtagttgttaagtgaaggtaaaatataaattttttaggtggttgtgagtattaggtgaaataatgtaatgttttttaatttatttgatttttgggatgtttgttaagaatttaatttttttggtgtttgtattggagatttttattagaaaggtttgggaaggataagttttagtaagtatttaggtga

SEQ ID NO: 629 - DNA, 6150 bp, Artificial Sequence
  chemically treated genomic DNA (Homo sapiens)
ttatttaagtatttgttaaaatttgttttttttagatttttttaatgagaatttttagtgtaaatgttagaggaattgaatttttaatagatattttagggattaggtgggttgggagatattgtattattttatttggtgtttataattatttgggaggtttgtattttatttttatttaatagttgttaaaattgaaggttggaatttagttttaaagaaataggttttatttttaatagatttgaggttgggttttgatttattttattgtgtggtggtgggaaagttatatttttatgttgtagtttttttatttgtatatttaggatttaaaaaatgaaataatgtaggtgaaagatgttagtataatattttgattatatgaggtatgtaatgaattatgaagtagtaaatagtttgtttttgtgttgttgataaagatatatataagattgggtaaaattatataggaaaaatgtttaatggatttatatttttatatggttagggtagaagatatgaaggggtaagttatgttttatatggatggtagtaggtagaaagtgagagagagtttgtggaggggaatttttttttttaaaattattagattttttgagatttatttattattatgagaatagtataggaaagatttgtttttatgatttaattattttttattaggttttttttataatatatgggaatttaagatgagatttgggtggggatatagttaaattatattagtaaataagtttaattattattaattaggttaagtaattagtttatattgtttaataatgatgatttattagtttgattagaaagaaaagtttttgaaggtaagaggtttttttgtttagttttttaagttttaatatagggttgtttatgtagattgattgaatgaatgaataaaagaagtatattgtaatgttggttggtagtatggttagatatgatatagggtttgaattaggtttggtttttagatttggtattgagatatggtagtattgggaagggggttggagagtttgtgttttttattaaggttttttaaaaagaaagttttgtattttgttaggaggattgatttgggttttgggaatattgtaaaatttgttgtgggagggaatttttgagaaaatttttttgtagtgggaagagatggtatggaaggtagtttttttaaatgttggataattgttttttaggagtgggtgttttgttaggaattggtgtgaggttgtaggattaggatggaatttttgtaggtggttttaggtttgagtagtatagtagaattatttgaggttttgaaaattattgagttttatgtattgtgggaaattgagttaattggtgtttggggttggtaatgtttttaatttttattattttaataagtttttaaggttgggaattatggtaatttgtagggtgggtattagttattttttatagttttagttatttttgtttgtgtgggtttttttgttgttgttttttatggtttttttgagggttgagtgaggttgaagaggtggggttagtttggaataaggatgagaaggtaaggtgtattatttttttattggtgtttttttaaatattttgggtttttttggttttatagtttggagagttttattttgaaagtgtaggagggtgtttgggaatttttttaataagttaatttaggtgttttttataattaggaaagtttggggaatgttattgtatatttttttttgggtttaggttatggaatggaaatgtgagttaatttattaatgtaaaatttaatattgttgattaaaagtaatgtttaggtgttttgtgtttgtgagtttaagtttgttttttgggtgagagatgtttttttgggtgtttagggttgggtggggttgtgtgttgggttgtgggttgtggtggagatttgatttgtattttgagggtttttagagagttggggagtgagtagtagagttattgtttttagttttagtttgaaaagttggattgtgttgttgtatgtgtgtttggtagttgggtgttttgggttttgtggttatattattttggggtggggatgtgtgtgttttgggtgtttggatgttattgagttatgtttgagttgtttatttttgggggtgagtgagttgtggtttggggtgggattttggtggggggatttgagtggtttttaggatttgtgggatgttgttaattggtgggggtgtgggggagataataatttgttttgtggtaataagaatggtgattgttggttgtggatttattttataggtttgtttttttttattaatgttttttttagtttttgggttaatttggatagtttgtttatttattgtaatggttaaggttggtttgtgttagaatggtgtgtgtgtgtgtatgtatgtatatatatggggggaaatttttttaaaaatgaaaggttagaagagtttagtggtggtgtgggtgttgtgtgagggttttggagttgatttgttgaggtaggaaatttttttggttgtgatgtttggttttggtttggtgtttgtgtgggatggtgtagtgtttgttgttgggtttgagagttgttgtattgaaggttggtgatgatggtagtgtgtttgttgtttgtgttttttgtttgtgtttttttgtttgttttggttggtgttttgtttgtgttttgtgaggtttgaggtaagttgttgaattagggtggtttgttgtttgttttgttgagggtattgtatgttgtgtttgggtgtgttgaggtttagggttgttttgaggggtgatgtgttttggtgtatttttggagttttggggtttgtgtttttagtgtggtgagattgattttttttttttaggtgttaattttttggggaagggtgatatttggtttgtagttttataggagttagtatttgttttggagggtatagttttgggattgtttttttgtttttatttttttgggtgatatttgtagatgtttttgtattttgatatttatatgtgttatttgggatgatgtgtgttgggtttttttgttggttttattttgtagtgaatatttttattttaggttttgggttagttttttattaggttttttttttagttttgttttttttgttaatatatttaggggggtgtgtagtggttttgtaggtgaggtagtttttttttttgtaggtgtgtttgttgttttttatagtaggttttatttttataaattgatttttttatttatttttttagttttttttttgtttttttttttggtttttaggttattttttagttgttagttgtaggtaaattttagtggaatttttttttttttttttatttagtttttttgttgtaaataattgtttttattaatttggtgtatagtgagaatttatttagtttaatgtatttagttttatagatttaggtttttttgagttgtagttttttaaaattgggtatttgtggtttttgtttgtatagtgaggatttatttagtaggtgtttttttaaaaatttggtaatttttttgggtttttgttgttgttgttttttttttgttgtttggggtgttgttggtttattgatgaatgattttttttggttgtaagtttttaagttttgtgattttatataataggtatttattttttaataattggtttaaattatgaattgttattattttatgatatgttttattttgtgattgttattgttgttttttgtttttattgtgtttattgtaatgtggttaaaatttagtttttgttaaaagttatattgtgaagattaatttggggataaatgattaaatataaagattgtataaagtaatgagaaagttaagaaagaattttgttgagggtttaaagaattttatgatttgtagtgaattgtgttttgaaagatttttaaataaattggtttttttgaatgtttattaagaaagaattttttaaaaaatggaaagtgttttaaagtgtgtttgatatggtttttaatttggtatgtgttttgtatatataaagagaagtttattgagtagggataaattttttttttggaagaaaatgtttattaaatttagttaataatgggaaattattttttgtgtgtgtgggtgggggaggatttttattattttatgagtttagttttggtagagagagtgtttttttaagatagatatgatttaaaatagaaaattagggaggtttaagtattttgaatgggttatttattgtgatatattttaggatttattgtttgtttatttttagatttttagtattaagtttttaattaattagtgttttaaattatattattgaggttgtataaaatgttaaatatataatgaaatatttttttgtattggtaagagaaaaggaggaattattatttgttgagtttgagtatattttgagtttttttttagttttgtttgtattttgagttttggtatagttgtttatttggtattttttggggtaatttggtttaataagtttaaaatagaattttagattttagattttttagttgtaaattattttttttttagtttttttgaatttagtaataattttttttgttttttttatatgttttgtgttgatatgtaggaagttatttttgtgtttttttttttattttgtaagttattaattttttaagtatatttttatttatttatttttttatattttgaagtgtgttttttttagtttaggttatattataggaaaaattttttttgtagaagttttttattttttttatttaatgggtttattggttttttattttatttttgtatggtatatttttttttataatagagttaaagttattatttttaaatatgagttagagtatttaagttttttgtttaaaattttttagtggttttttagtatttttaggaaagaaaatttaaattttagtatgatttaatttttgtttttttttttgatttttttttttattattttttttttgtttattttattttagatatattgtttttttttttttttaattatttaatatagtagtgttattattaaaaaaaaatttaatgtttgtattaagaagattttgtaaatattttttattgttttgttgtgtagtgttttatggtattttattttttttgtaattttttgttttttttagagttaatgattgttttgttttgatttttgtttgttttattttttgtgtattaagttgtgatattgtgatataataagaaatatgtttttgtttttggtttttggtatagaatttttaaaatttttggaatttttggggtattaagagtgttttttgtatgttaatgagtttgttaaggtatgattagagttgggatttttagtgttattttttttgtaatttttagggaggggagatggattgaaggttgatttgattgttaatggtgtaattaattatggttgtgtaattaggtttttataaattttttaaaggataaggtttgtagaatttttagattgttgagtaaattaaagtttttggagggtggtgtatttagagaggatatagaagttttgtatttttttttatattttttgttttttgtattttttttaattgttttttatttgtgtttttaattatattttttattaatataataaattggtaaatataagtaagtgttttttgtggttttgtgagtttatttagtaaattaattgaatttgagaagggggttgtggatttttaatttatagttagttggttagaagtataggtgtgataatttattatttgtgattggtatttgatattggggggaagttttgtgggattgagtttttaatttgtgtgatttgatgttttttttaggtagatagagttagaatagagttaaattgtaggatttttagttgatttttattgaagaattggtggttggtggggagaaatttttatatatttgggtgattagaggtgaaatatttggtattgagagtgagagtagggagaatatttggtttttggttttttttattttttatgtaatttttattttatttttatattttttggaagaattattaattt

SEQ ID NO: 630 - DNA, 6238 bp, Artificial Sequence
  chemically treated genomic DNA (Homo sapiens)
tgtgttttgtttttaaaaagttgttaggaataattaattatattttatattaaagttataaaaggggtaataaagaatagtatatgtattttttagtatttttaatagaattttagtatgtataattttatttaaggatgaatattttaaatttaaatgtttatttttatggaaaataaagtttggattagaattttttatataattttataagatttatgtttttatatagttataatagttaattttttttaaaattatttttggataatttaatttaatttgattagtatttttttattaggttaatatattttaattataagtgtattttttattttttttttttttttttatttattttttatttaataaattttttttgtatgtttgtaaggtaaggtattatataatgtagtataattttaaggtagtttgaatatataatttttataataggaatttagaattattaattttattttttataataaaagtattagtgatgtattaaatttttatttatatgtatgataaatgtatttaatatgttttattgttagggggaaataaagggggaaagatataatagatgggtggtaaattttataaattttataaaatattgaaaagttgtatttggattgtagttataattataaaagtaaataaagttttgaaataaaggaaaagaaaaaaattttaagtgattattaagagtgaaaaaggtttatttaatattagtttttagtatagtattatttaatattgattaattgaaaaaaaaaataggataatttattgtttgtaaggatataggaaataatttttatatattttttataagatagttatatttttttatatttgtatggtttaaatttttttaaatgtttttaaaaatatagttttataataaatgaggttttttaatgatatatattttattttgtagatttagttataatatgttttaaaatatataaagaatttatttttgatagaaataaggagttataaaggttttttatttatttagaattattatataaaatattatttgtaattgtaaatagggtttgagaaaatttgatagttaataattataaaatggggtagattttaaaggaaaaaaaagttaatttttttattttgttttttttttttttttttattagatatataaaatgtttgtaatagtgttagatagagttttaaaataaaaatatagtgttatatatgtatattttatattatgtgtataggaatatatatgtatatattatatgtttataggaaatagaaaggtttttttgtttttgtttttgttttttttttattttaggaattgaagttatattaaattttattttataaattaagttaaattattattaaattaaagagtaataaaatattgtatgtagatttttttgagtgattattttttgagaaggaaaattttagattaagattatggttgaatatgaatgtttaatttttaaaaaaaattattaattggtatttgtttttgtaagagaaaaagggagttttataatgaataattatataatttagttttagaagttaattggggtaaaatataatgaattaaattagataaatgtatgaaaggataagtttttaagaatttgtttaaagtgaaagattggttttaattttgggatataaaatattttttgtaggtagaagagtttttaattgaaaaagaaaaaaataaaataaagtggtgggtataagaaaaatttgaatgatatgtaaaggtaaagtaaaaaataatgataattttaaaaaggggtttttttttttatttttatttttagtttttatttttatttttgtaggataataggattagggttttaattgtaaattttaaatgtgtaaattagaagtagttttattgtagttgtaattgtaaatttttttattttgaatttagtgtatttaggaatatttttgttttgaaaatattagtaagtttttggtaaatataaattagatttattatgagatttttttttttttttttttaagtatttggaggatttattttaatataaaatattagttttgttgaatagggtattattatttttttttagtttgtgttattgtggtttatattttatattgtattgtatattgtgttgttaggggtaggttgttaggagatatatagaaggtatatattttttatttggtatttaaaaatttaaaaatatatatttgtaaaagttttatatggaaatgtattttgggttttttaatggttagtattagtttggttaaattatttgaatagggtttttttttttttttttatagaatataataaaatgtttttgaatttttaagttatgggtttttttttttagaggattatatagaggtttgggggatggagagtagaggtgttaaaaagtggttttttaaaaattttttttatatagttgttttttggggagaaaagtttttattgtttttaaatttttttgtggaagttatttttgtgttttttgaaggagggagaatgaagaggaaaaaaaagaatatgttgggagaaatttgggtaagtgataaaggaaggtaaaaaagggggttggagattgtgtttaagttttggggttttattggtttgtagagagtgaattttttagaggttgggatttgggtttttttttggttggttttggaattgaagttgttgtagttttgggaatggggttggttggagaagtttagttagtttggtttgtttgggtgtttttgttggggtgtaagaattaatttgattgtattaattgtttttaagttttgtttggattttagttattagagttttattttaatggtgtggaggggatattttttttgttttatgttgtttatttgttgaggtgttatttaattgtgttgggaggggggatagtaggtattattattgttttttttatgttgttttgttttgatgtattgggattttgttaagtgtttgagaatatgtttaaaaagttgttttttattttgatttttatgtttttttattgttttttaggttttggttttttaattagttatttgtgtttttttttagttttaattagaatggtatgatttgggtgttggttgtattttaggagttagtgttgggagtatgtgagttaggtgaggagggagtggggtgagggaagagaggtaaggtgggtggtgattggttgaggttggttgttggagtttggagtttgtgttttttgtttgttttgtttttgtgaaggagtgggagatggttgtgtgttttaagtgggttaattaggagatagttggtgttggttggtaaggtggtgattggttagagtttagttattaagtgggataaaggtagaaggggaaaagaaaagaggaggaaaaaaaagaaagaaagaaaggaagaaaatgtaaatggtggttattgataggttgggtgagtgtttgggggtttaaattgtttggagataggtggggtttttgttgaggtttggtttgtttggatgagtaaggagaggagttagggaggatttgttggtgtgagatgtttttgtttggtgattggttgtgggggaagggagtggatatagagggggtatgttttgttatttggtggggtgtgtgtttttttggtttttaggaggtttttggggagattttttttttatagatttttttattttgttgggatagttttttttgtatttttgataagttgttaaagtaatggtttttaaatttatttgttattttattatttagggagaggatgtgtttgtggtttttgtaatttttttggttgttatttgattttattttttgtttttttttttgagtaattggatatttttgagggaggtattttgtagtttttttgtgttttttatttaaagatttttgaatttagaggtaattttttatgtttaaaatagtgagaggttttagtaagtttttttgtttgagtgtttaaattaattaaaaaaaaaaaaagttttggaattatagtgtatgtgtaatttttaagataagttataggtgttggaattttttattaaaagggttttattttgtttttttgatagatttttttttttatatatttatttttatttttaaagtttaaatttgggagattggttttattatgaaaatgttgaatatttttatgtattttagaaatagttaattaatttgttggggaatattgaatagttaaaagtagatttgtgttttttgaagattgtgtttggaattgttattttgtatattttataatatagtttgaggaggttaaaaattgttttattttttttttatataggagtaataaagtttattgtgtttgagttgatagtttgatttaagttttagtaaaattttttattttgagtatgtttgttatattgatttgtttatggaagagttgttatgttttattttttattttttaaggtggttttgttttttttaaagatgttttgagttgagatagtttttgagggtagatagttaaaatgtatatggattgggtatagagtaattggtttaaaagggttagaaagtatggatggatatggttgagttaagaaaagatattaggatttttatatgtttttttattatttttgaaatttaaatatgattttaattttggggtaggatttattaattataattttttgaattattttttataggtagaagatattggaagattaattttaatttgtggttgtttttttagtagtttttattttagtatatttgggagttagaagtatttaagtttgataatttaaaagatagaataattagttaagggtgggttggtttatttttgtttatgggtgtttatgtgtatttttaaataaaatgagggtgaagagagaggaagtgtggaaaagataatggtttttagatttttatagtattttttgtttggattattttttagtatttagtggtggggttttagtttttaatatatagagtaattatttaggttttttttatagttaaggttttgagagatgaagtgatgtttaagtatagtatataattaagtggttaaggttgatatatggagtaaagttgtgatttagtttttttatttaaaattgtatgatttaattttttaatttaaatagatttttgaatatatttttagagaataagtgatgtaagaggtaatgatgaattaaggggaagtaaatttttttagtttttgagtttaaattagtgttttgttatgggggaaagtatttgtgagatgattttggttttttttttagttgagaaatagaagtgaggttgtgattgtttgttattaaattgttttaggttttttggtaaaggtaaaaaatgttagtttgggtgttttggattatttttaagttggagaattatatttgatttgggtgtggattaaatttagttttaagtatttaagtttttgggttataatttgttattttgggagttgtttgtttttttttgttttttttttttttttttttaatttaaagtagttttaggtaaattatgaaatttgtttttatttatatatttatgaaatagatttatgtaagttgtttagtttatagtgaaatatttagaatgaaaaaatatgttatttaagtatttaggattaatagtatttttttgtaattttaaatggttaggatgttttttattttttattttggtatggtttttttttgtaattgtttaaatatgttttatttttttttttttattttagagatggatgaaatattttttttgtgttttgaatatagggtatgattttagagttttttgtgttagtagaattagtttggaatttagttagaagttttttgtgattaaaggtgttatttgagtgtataatatttttttaaaagttttgtaaaatggggttgggtatggtggtttatgtttgtaattttagtattttgggaggttgaggtgggtagattatgaggttgggagtttgagattagtttggtttatgtggtgaaattttgtttatattaaaaataaaaaaattagttgggtatgttggtaagtgtttgtaattttagttatttgggaggttgaggtaggagaattatttgaatgtaggaggtagaggttgtagtgagttgatattatgttattgtattttagtttggataatagggtgagattt

SEQ ID NO: 631 - DNA, 6238 bp, Artificial Sequence
  chemically treated genomic DNA (Homo sapiens)
gagttttgttttgttgtttaggttggagtgtaatggtgtgatgttggtttattgtaatttttgttttttgtatttaaatgatttttttgttttagttttttgagtagttgggattataagtgtttgttaatatgtttagttaatttttttatttttagtatagatggagttttattatgtgggttaggttggttttaaatttttgattttgtgatttgtttattttagttttttaaagtgttgggattataggtatgagttattgtgtttggttttattttgtaaggtttttaaaaaaatattgtgtgtttagatggtatttttaattatgaagaatttttggttgagttttagattgattttgttggtatagagagttttgagattatattttatatttagagtatagaagaaatattttatttatttttgaaataaagaggaagaaatgaagtatatttgaatagttgtagaaaaaaattatattagggtgaaaagtgaagggtattttagttatttggagttatagaaaagtattattaattttaaatatttaagtggtatatttttttattttaagtgttttattataaattaagtagtttgtataaatttattttatagatatataaatgaaagtagattttatgatttatttaagattattttaaattaaaaaaagaaagggagagggtaaaggaaaataagtagtttttaaagtagtaggttgtgatttaggagtttgagtgtttagagttgaatttaatttatatttaggttaaatataattttttaatttggaagtggtttaggatatttgagttaatattttttatttttgttaaagagtttggggtagtttggtgataagtaattataattttatttttattttttaattgaaagaaagattagaattattttataggtgtttttttttatggtagggtattggtttaagtttaaggattaagaaagtttgtttttttttgatttattattgttttttgtattatttattttttggagatatatttaaaggtttatttaagttggagagttgggttatataattttaggtggaaagattgaattatagttttattttatgtgttagttttgattatttgattatatattgtgtttggatgttattttattttttaaagttttagttgtgggaaaagtttgggtgattgttttgtgtattagaaattgaaattttattattaaatgttgaaaagtggtttaggtaaaaggtgttgtggaaatttgaaagttattattttttttatattttttttttttttatttttattttgtttgggaatgtatatgaatatttgtgaataaaaataaattaatttatttttgattgattgttttgttttttgagttattaaatttgagtgtttttggtttttagatatgttgaagtagagattgttgggaaggtagttataaattagagttgattttttagtattttttatttgtaaggaatggtttaggaaattataattaatgagttttgttttaaagttgaaattatatttggattttagaaataataagaaagtatataagaattttggtgtttttttttagtttaattatgtttatttatattttttggtttttttaaattagttattttatatttagtttatatatattttgattgtttgtttttaggaattgttttaatttagggtatttttaaggaaggtagaattattttaggaggtagagggtgaaatgtggtaatttttttataggtgaattaatatagtagatatgtttaaggtaggaggttttgttagggtttaaattaggttgttaatttaaatataatgggttttgttatttttgtgtaaagaggaaatggagtagtttttggtttttttagattgtattgtagggtatataggatggtaattttaggtataatttttaggagatataaatttgtttttagttatttagtgttttttagtaagttaattagttgtttttgaaatgtatggaaatatttagtatttttatagtgaagttaattttttagatttaagttttgggggtgggaatgagtatgtgaggaagagggtttgttagggaaatagaatagagtttttttggtgagagattttaatatttgtgatttattttagaaattatatatgtattgtaattttaagattttttttttttttaattggtttgagtatttgagtaggagggtttgttgagattttttattattttaggtgtggggagttatttttgggtttaaaagtttttgggtgggaagtatagaggaattgtgaaatgttttttttagaaatgtttaattgtttaaggggagaagtagggagtggggttaggtagtagttaggaaggttgtaggggttatgggtatattttttttttgagtggtaaggtggtaagtgggtttggggattattgttttgataatttgttaagggtgtggagagggttgttttagtaaggtgaagaggtttgtaggaaaggagtttttttagagattttttaaggattagaagagtgtgtattttgttaagtgatagaatgtgttttttttgtgtttgttttttttttttgtggttaattattgggtagaggtgttttatgttagtaggttttttttggtttttttttttatttgtttgggtggattaagttttagtaggagttttgtttgtttttaggtagtttgagtttttgagtgtttgtttagtttgttagtaattgttgtttgtgtttttttttttttttttttttttttttttttttttttttttttttttttttttgtttttgttttgtttagtaattgggttttgattaattgttgttttattggttggtgttggttgttttttgattggtttgtttggggtgtgtagttgttttttgtttttttgtaggagtaaggtagataaaagatgtaggttttaggttttggtaattggttttagttaattattatttattttgtttttttttttttgttttattttttttttgtttggtttgtgtgtttttggtattgatttttggagtgtggttagtgtttggattgtattattttgattgaggttgggggagagtgtggatggttgattggggagttgaagtttagagagtggtggggagatgtgaaagttgagatggagagtagttttttgaatatgtttttaggtatttgatagaattttggtatattgaggtgggatggtgtggaaggggtggtggtgatgtttgttgtttttttttttggtgtggttgggtggtgttttagtgggtgggtagtatggggtggggagggtgttttttttgtgttgttaaaatgaaattttagtggttggagtttgggtagagtttgagggtagttggtgtggttgggttggtttttatattttggtgggagtgtttagataagttgagttgattggatttttttggttggttttatttttgaggttgtggtagttttggttttgagattgattggagaggagtttgagttttggtttttgggggatttgttttttgtagattagtgggattttgaaatttgaatgtaatttttagtttttttttttgtttttttttgttatttgtttgggttttttttaatgtgttttttttttttttttttatttttttttttttgaaggatataaaagtggtttttgtggaaagatttggaggtggtgggagtttttttttttggagagtgattgtgtagaaaggatttttgggaagttgttttttaatatttttgttttttgttttttaagtttttgtgtaattttttgaggagaaaagtttatagtttgaaagtttgggggtattttgttgtgttttgtaggagagagggggaggattttgtttgggtagtttggttggattggtattggttgttggaaaatttgaagtatatttttgtgtggaatttttgtagatatatatttttagatttttaaatattagataaaaaatatatgttttttatatattttttggtgatttgtttttgatagtgtgatgtataatatggtgtggagtatggattgtgatgatgtagattggagggaggtgatgatgttttatttgatagaattgatattttatattgaaatggattttttaggtatttgggagaaaaaaaaaaagaattttgtgatgggtttgatttgtatttattaagagtttgttgatgtttttagggtagaagtatttttgggtgtgttaggtttgggatgaggagatttgtagttatagttgtggtaaaattgtttttggtttatatgtttaaagtttgtagttaggattttgattttattgttttgtgaaggtgggggtgggggttggaagtgggggtgggaggagagatttttttttaaaattattattattttttattttgtttttgtgtgttgtttaggttttttttgtgtttgttattttattttattttttttttttttaattaaagatttttttatttgtaaaggatgttttatattttggggttaaaattagttttttattttgggtgaatttttgaaagtttgtttttttatatatttgtttaatttggtttgttgtgttttattttggttaatttttgaaattgagttatgtgattatttattgtaagatttttttttttttttgtagaaataaatgttggttagtgattttttttagggattgggtgtttgtatttagttatggttttagtttgaggtttttttttttagaagatagttgtttagagaaatttatgtgtaatattttattattttttaatttaatgatgatttaatttaatttatgggatagggtttaatgtaattttaatttttagaataaagaaaaagtaaaaataaaaatgagggaatttttttgttttttgtgaatgtgtgatatatatatatgtgtttttatatatgtaatgtaaagtatatatatatagtattatatttttattttaaagttttgtttgatgttattatagatattttgtgtatttggtaggaaaggaaaaggaaagtaaaatggaaaagttggttttttttttttttaaagtttattttattttatgattattagttgttagatttttttaaattttgtttgtagttatagatggtgttttatgtaatgattttgaataagtagagagtttttgtgattttttgtttttgttgaggatgaattttttatgtattttaaaatgtgttatggttaagtttatagaataaaatgtgtgttattggggaattttgtttattataagattgtatttttggaaatgtttgaaaggatttgagttatgtaagtgtgaagaagtgtaattgttttatagaaggtatgtagaaattgttttttgtgtttttgtaaatggtgaattattttgtttttttttttaattagttagtgttaaatggtgttgtattaaaaattagtattgaataaattttttttatttttgatgattatttagaatttttttttttttttttattttagagttttatttgtttttataattgtgattgtaatttagatgtagttttttagtgttttgtaaagtttgtaagatttgttatttatttattgtgtttttttttttttgtttttttttaatggtaaagtatgttagatatatttgttatatatatgaatagaaatttagtatattattggtatttttattgtaaaaagtaaggttaataattttagatttttgttataagaattatatatttaaattgttttagaattatattgtattatatagtattttgttttgtagatatataaagggaatttgttgggtgggaggtgagtagggaggaggggagaaaatgaagaatgtatttatggttgaaatatattagtttagtagaaaaatattggttaagttgagttgagttgtttaaaaataattttaagaaaagttgattgttataattatatggagatgtgggttttataaggttgtatagaaaattttgatttaaattttattttttatggaaataaatatttgagtttaaaatgtttatttttgaatgaaattgtgtatattgagattttattgagaatattgaaaaatatatatgttgttttttattattttttttgtagttttaatgtagaatatggttagttatttttaatagttttttgaaaatgaagtata

SEQ ID NO: 632 - DNA, 6218 bp, Artificial Sequence
  chemically treated genomic DNA (Homo sapiens)
ttttttagtgattttttttttttttttttttgggaattttaagttttgtttttttttatataggaggatattgatatttaaatttttttgttttaagggttggtaattttaaatttttatttttaggaagtaatagattattggtttattttggtattgggagatattagatgttgattttatttattttggatttattgttttttggttttttttatttggagaaagtttgattgagttttttttattttagggagtagtaattttgaggtatttttattttaggaaagtattaattttttttatagtttagaggatattgatttttaagtttttttttgtagagttggtaattttattggtttttggtgatagaaatgaatgtttttttttgttataagtgttagtgttttgatttttattttttggtattttgaggttagaaaaaaatattgatttgatttttttatttgagtggtttagagatttagattttttattatatgtgggtggtttttaatggataagtattaaattatgataatgatgaatttgatttttattattaaggagttattttagttttagttttttgaaggaaagttataatttttaatttttattatttaaatggtggtaaattttggtgttatttttagaggatagtgatttttttgagtaattgatgaattaaatttatttttttgtttttttttttgagatatagttttgtttttgttgtttagttggagtgtagtggtatgattttgatttattgtaatttttgtttgttgggtttaagtgatttttttgttttagttttttgagaagttgggattataggtgtttgttattatgtttagttaattttttatatttttagtagagatagggttttattagttggttaggttggttttgaatttttgattgtaggtgatttgtttattttagttttttaaagtgttgggattataggtgtgagttattgtgtttggttattaaatttattttgaggggttagtgataagtttttttagagggagataattttatattattttttttttttagagttaatgatattatattttagaataattattaaaaaagtataattttagatttatattttgtaggaaattgtgatttattttgttttattttatttttgttaaaggagatatattaagttatgtattttaaaatatggattatggatttggtttgaaggatatgttgatttttaatgtttttatatttaaaaggtagtaattattaatttttattattggtagtatagtttaataagatttagggtgggtaatgatgttaggttttggttttaatagggaagatgatttgagtattaggtttggaaagtttggttttattttttggggataaaatatagtaattttaaagttttgtttttaagtgatatttgttttaaatttttattttttgaaggatagggaatgtagattttttttttttggggttggttttatttttgtttttttaggagataataattttagatttttatttgtaagtgattgtgatttttgatttaatattataatgaatagtaatattagatatttgtttttaaggtttaaggatttaagattttaataatggaagaatagagatttgtaatttgtttttttaagtgttagtaattttgatttatgagtaattttgatttttaagagatggtaattttaagatttttttttttgggaggaagagggtttggatttttggtatggggaggtatagtgattttgagtttttatttaagtatatgaaagaatttgatggatgtttgaggagttttgggaattttaattattattttatatgggtgttattagtatttatggtttagttttattttgggtggtgggaagttagtgtttgtgttggggtttttgttgttttttttgttgttgttgttgggtttatttttggagtttgaggttttgatgtttttatttatggttttgatagatgtttttttgttgttggtgttgtttgggttggaggttgagtttttggggttgttgttgttttttttgtttttgttgttgggttttgtgaatgagttagtttgtgttttgtttgagtttttagggttgttttttgaaggtttgttgttgtttatggtgttgagtataggtttaggttgtggggtttgggttgtttgggttgttttagttgttgttgttgttgttgttttttttgggttttggttttttttaggttgtgttgttttggtttgggttttggttttggtttagtgtttgttgtggggtatgttgggagatgtagtttggttgttgtttgtgttgttgttattgtttttggtttgtatagagagttgtgtggtatgttgggaaatgaagtttataaaagttttagagtagattgtgggaatgatgggtgggaatgatgggttatgttgtatgttgggaaatggagtttagggtaatttgttagttgattgtatgatggggagttttgaagtattttaggaagtagagagtttgatgtatgttgggaaatggagtttatttatttagtttattagttgtgtatgttttttagagtttggtgtgttttgggaaattgagttggtttgtgtgaatttgtgggttttgggttgtgaggtaagttgggaaatggagttgttgttatgtttttattgtattgtaggtgtaaagtgatttttaaagtatgttgggaaatggagttttaggtggtttttaagttttaggtggatattgtagttttggagatgggtgaggaaatggagtaggtttatgtgtttttttttttaggtatgttgggttgtagtttttgttgggaagtgtagttagtattaaggttttagtgtagttgttatagtgagttttggtgtgttttgggaaatggagtttgatgtattttttttattgattgagggggtgggattgtttatgagttttaagtatgttggggaatagtttagatttgattttttgtgaggttagtttgtggaggtttgttgggaagtgaagtttaatggttattattaggggtgtgtgaatgaaaggttagagattgtggtagttttttggagagatttaaaagtgttttagtgtttttttttttgtttttaggtttttttttaagaaagagttgaggttgattaaggattgttggaaaatggatttaagtatttttaagttttaggtgattatagattaggaaagaaaaaatgttttttttttaattgtaattttgtaaagatttgggaaataaagtttttggtggttttttagaatattaattagtttttggatatagtttagttttttttagtaatgtggtttgtattaggaagttgaatggagtattaaaaagatggaaatgttatttttgggtttggtgttgtggtttaggttgggtgttagtagtttatgtttgtaattttagtattttgggaggttgaggttggtggattatttgaggttaggagtttgagattagtttggttaatatagtgaaatttttgtttttattaaaagtataaaaattagttgggtgtggtggtgggtgtttgtaatattagttatttaggaggttgaagtaggagaattgtttgaatttgggaggtataggttgtagtgagttgagattgtgttattgtattttagtttgggtgaaaagagtgagattttgttttaaaaaaaaaaaaattttgttttgaattattatttagtttttagtttttggtttgttttgagatagggttttgttttgttgtttaggttggtgggtagtggtgtaattataggttattgtagtttttaatttttaggtttaagtaatttttttatttaagttttttatgtaggtgggattataggtgtgtattattatgtttagttaatttggtttggtttgttttttggggtggtggggggtagtggggtgggttttgttatgttgtttaggttggtttttaatttttgggtttaagtgattttattttagtttttaatgtgttggtattttaggtttgagttatggtattgggttttttatttttgtgttttgtattttttgttttttaaattataagattttggaaagttaaaaataaggaagttagttgttttaggttttgtgtatttagtgagttgttttatttattgattaatatttgaaggagagtagtttttaaaaggtgttgggaaatagagtttttgtgtttgtatgtgttttttttttttttggaaatatttagaagtagaatgaaagtgtttttagttttttttgtattttggaatggtgggaaatggagtttttggattttatgttaatttgagtttgtgtttatattaattgttttgttttttttgaaattagaagaaagttttgtttatttagtttgtttttgattgtaattttttgtggatataattgtgggggttggtagtgttaaagtttgttgagattatattatttagaaggtaaagtgtggaatatttttgttttttttataaagtaggtggttgtattatgtgtggttaggtgtgggtgtttttgggagttgtagttttttagttaaatggtatttgttgttttttgatggtagttttgagttaaaaagtaaaaattttagttgagttttttggtttagggattttaatgtgggattaagatggtttaaaagggtggtgatatggggtaggatagtgagggttatttaattgttagaatttgtggggtatgtgttgttgtgtgtgggtaattgttatgaggggattggggtttgtgggagtttgaaggtgatggtttgtaatttattaggatgtttgtagaggatgagaatgtttatagagggatgttaggaagggttgtaaatgtttgagagaggtttatgggtgtttagaagggttaagaggagtttgtggagtggtgaaggggtttttgatgagtttagttgataggataattattggggattagtggagaagtttgaggggatttaggttgtttgttaaaagttttatgggtgggtggatgtgatggtttatatttgtaattttagtattttgtgaggttaaggttgtggattatttgaggttagttagaagtttgagatttgtttggttaatatggaggaaattttatttttattaaaaatatataaaaaaattagttgggtgtggtggtttatgtttgtaattttagttatttgggaagttgaggtataagaattttttgaatttgggaggttgaggttgtagtgggttgagattgtattattgtattttattttgggtaatagagtgagattttgttttgaaaaaaaagaaaaaaaaaaaaggtttatgggagatagaaattattggtgattaaggggatttttgagtgatttgaaggggtgagggatggttgagaagtattgggaaggggttttgagagtttgtggaggtattggggttatatgtataaagtagggaggtttttgatgagattaattaatatgtgaagtgttttgagagtatttgtaaagggttttttatttggaagtaaggattttagaggatatggatgggattaagggtgtttttttgtaggaatattttaagttagttagttaatagatttaggtgggtgattaaaggttagagtagttgttggagtttttaaggttaaatgttatttgtgatattttatatagttagaatttggggtaatttgtttggtagggttgtggtttgatttggatagtagttagggagttgagttgagtatttatgattttatattagatgtggttagaggtgttttgaaggtattgggtttaggggttgaggttagtagttagggttttttttttttgagtgataatatttttttttttattattttattattattattaatttagttgtaattatgttgttaggagatatgttttattttagtttttagaaatagtttagtggtttttattttagggaatgatttatattatttaggagagggagtagttttttgtaggttgttttgggagttttggttttttgttagtattttagttttggatttttttttttttgttaattgatattatttgggattatttattttggttggtatgaaatgagatgtgagtgggtagtagttgttagttaatgtttttttttttttagggt

SEQ ID NO: 633 - DNA, 6218 bp, Artificial Sequence
  chemically treated genomic DNA (Homo sapiens)
attttgagggggaagaaatgttgattggtaattgttatttatttgtattttattttatgttagttagggtgggtggttttagatgatgttggttggtagggaagagaggatttagggttaggatattggtaggaaattgaggtttttgaggtggtttgtgggaaattgtttttttttttgggtgatgtaagttattttttggggtgggggttattgggttatttttggaagttgggatgagatatgttttttggtaatatagttgtagttgagttggtggtggtggtggggtgatggagaaggggatgttgttatttgggaggagaggattttaattattggttttagtttttgaatttagtgtttttaaagtatttttaattatatttaatatggaattataagtgtttagtttagttttttaattgttgtttaggttagattatagttttattagataagttgttttagattttggttgtgtaggatgttataggtggtatttggttttgaaaattttagtggttattttaatttttaattgtttatttaaatttattagttagttggtttgaaatgtttttgtaagaagatatttttggttttatttatattttttgagatttttgtttttaagtagaaagttttttatagatgtttttaaggtattttatatattaattaattttattagagatttttttgttttgtatgtgtagttttagtatttttatagatttttaaagtttttttttaatgttttttaattattttttatttttttaggttgtttagagatttttttggttattagtaatttttgttttttatagattttttttttttttttttttttttaaaatagagttttattttgttgtttagggtggagtgtagtggtgtaattttagtttattgtaattttagttttttaggtttaagagatttttgtgttttagttttttgagtagttgggattataggtgtgggttattatgtttggttaatttttttgtgtgtttttagtagagatggggttttttttatgttggttaggtgggttttgaatttttgattgattttaagtgatttatggttttgattttataaagtgttgggattgtaagtgtaagttattgtgtttatttatttatagaatttttagtagatagtttaagtttttttaggtttttttattggtttttagtaattattttgttaattaagtttattaaagatttttttattattttatggattttttttagtttttttagatatttataggttttttttagatgtttataattttttttagtatttttttatgaatatttttattttttataaatattttgatagattgtagattgttatttttaaatttttatggattttaatttttttgtggtggttgtttatatgtagtggtgtatgttttatgggttttggtggttaaataatttttgttattttgttttatgttgttgtttttttgagttgttttggttttgtgttggaatttttaggttaaggggtttgattgaaatttttattttttgatttagagttgttattagagggtagtaggtattatttggttgggaaattgtaatttttagaaatgtttgtgtttagttgtgtgtggtgtggttatttgttttgtgaagggagtggaagtgttttgtattttgttttttgggtaatgtagttttaataggttttggtgttattgatttttgtagttgtgtttgtggggaattgtagttaggaataaattgagtggataggatttttttttggttttagaaaggataggatagttagtataagtataagtttggattaatgtgaagtttagagattttattttttattattttaggatgtgggaggggttgagaatgtttttattttatttttaagtatttttgggggaggaagagatatatatagatataggaattttgttttttagtgttttttgggggttatttttttttgggtattaattgataaataggatgatttattgagtatataaaatttgaggtagttggtttttttatttttggttttttgggattttgtaatttaggaagtggaggatgtaaaatataagagtgggaggtttggtgttgtggtttaagtttgaaatattagtatgttggaggttgaggtagaattgtttgagtttaggaattggagattagtttgggtaatatggtgaagtttattttgttattttttattattttaaaaaataaattaaattaaattagttgggtgtgatggtgtatgtttgtagttttatttatatgggaggtttaggtggggggattgtttgagtttgggagttagaggttgtagtgatttgtgattgtgttattgtttgttagtttgggtggtagagtgagattttgttttaaaataaattaaaaattgaaaattgaatggtggtttaagataggatttttttttttttgagatggagttttattttttttgtttagattggagtgtagtggtgtgattttggtttattgtaatttatgttttttgggtttaagtgatttttttgttttagttttttgagtagttggtattataggtgtttgttattatatttggttaatttttgtatttttagtagagatgggggttttgttatgttggttaggttggttttgaatttttgattttggatgatttgttagttttggttttttaaagtgttaggattataggtgtgagttattggtgtttagtttgagttatagtgttaggtttagaaatgatatttttgtttttttaatgttttatttagttttttggtgtgaattatattgttaggaaaagttagattgtatttgaagattagttagtgttttgagaaattgttgggaattttgttttttgaatttttgtagagttgtggttagagaggggatatttttttttttttgatttatggttatttggaatttaaaggtgtttggatttattttttagtagtttttgattgattttggtttttttttaaagaaggatttgggggtgaggaaggaggtgttgaaatatttttaagtttttttagggaattgttgtagtttttaattttttgtttatatgtttttgatggtggttattggattttgttttttggtaagtttttgtagattggttttatagagggttaggtttggattattttttagtatgtttggagtttatgggtgattttgtttttttagttaatggggaggatatgttgaattttattttttagaatatattagggtttgttgtggtaattgtattgaggttttggtgttgattatattttttggtagggattgtggtttagtgtatttggaaagaggagtgtgtaaatttattttatttttttgtttatttttggaattgtagtatttatttggggtttaaaaattatttgagattttattttttggtgtgttttaaaaattgttttatatttgtaatgtggtgagggtgtggtgatgattttattttttggtttgttttatggtttgagatttgtaggtttatgtgggttgatttaattttttagagtgtattgagttttgggaggtatatatagttaatagattgagtgagtggattttgttttttagtgtgtattaggttttttgttttttaaagtgttttagggttttttgttgtatagttggttgatagattattttggattttattttttgatgtatagtgtgatttgttatttttgtttattatttttgtggtttattttgaggtttttgtggattttattttttggtgtgttatgtggttttttgtgtgggttgagggtggtgatggtggtgtggatgatagttggattgtattttttggtgtgttttgtggtgggtgttgggttggagttggagtttaagttagagtggtgtggtttggaagaggttagggtttgggggaggtggtggtagtggtggtggttggggtagtttgggtagtttgagttttgtagtttgggtttgtgtttggtgttatgagtggtggtgggtttttgggaggtggttttgggggtttgggtagggtgtggattagtttgtttgtggagtttggtggtggaggtggaggaggtggtggtggttttggaggtttggtttttggtttaggtggtattggtggtggaaaggtatttgttggggttatgggtgggggtgttggggttttgagttttgggggtggatttggtggtagtggtggaggaggtagtggaggttttggtgtaggtattagttttttgttgtttggggtgaagttgggttgtgagtattagtggtgtttgtgtagggtggtgattagggtttttaaagttttttagatatttattagatttttttatgtgtttagataggagtttgaggttattgtgtttttttatattggggatttgagtttttttttttttaggaaaaggagttttggggttattattttttggagattagaattatttgtggattagaattattaatatttaaagaaatgggttataagtttttgtttttttattattgaggttttgggtttttgagttttaagaataggtatttgatgttgttatttattataatattggattagaggttatagttgtttgtaaatggggatttagggttattgttttttaagagaataagaataagattaattttgaaaaagagggatttgtattttttgttttttagaagatggggatttggagtgaatattatttagaagtagggttttgaggttattgtgttttgtttttaaagaatagggttaggttttttaaatttggtatttagattattttttttattaaaattaagatttggtattattatttattttaaattttgttgagttgtattgttaatggtgagaattaatagttattgttttttagatataaagatattgggagttagtatattttttaaattaagtttatagtttatgttttaaaatatatggtttggtgtgttttttttaataaaaatggaatggagtagggtaggttatagttttttatagaatatggatttaaggttatatttttttaataattgttttaaggtatggtgttattggttttgaaaaaaaaaagtgatgtagggttatttttttttgaaagaatttgttattggttttttaaaatggatttggtggttgggtgtggtggtttatgtttgtaattttagtattttgggaggttgaggtgggtggattatttgtggttaggagtttgagattagtttggttaattggtggaattttgtttttattaaaaatataaaaaattagttgggtgtggtggtgggtgtttgtaattttagttttttgggaggttgaggtaggagaattgtttgaatttagtaggtggaggttgtagtgagttgagattgtgttattgtattttagttgggtaatgagagtgaaattgtgttttaaaaaaaaaaataaaaaaatggatttggtttattagttatttaaaggggttattattttttaagaatggtattaaggtttgttattatttgaataatgggaattgggaattatagtttttttttaaaggattgaggttggaatagttttttgataataaaggttaggtttattattattataatttggtgtttgtttattagggattatttatatatagtgaggggtttgggtttttggattatttagatgaagaggttaggttagtgtttttttttaattttaaagtattaaaaagtgagggttagggtattggtatttatagtaggagaggatatttatttttgttattaagaattagtaaagttattagttttataggggaggatttagaggttagtattttttaggttgtgagagaggttagtgtttttttaaagtaggagtattttagggttattgttttttgaagtggaagaggtttggttaagttttttttaaataggaggggttagagggtagtagatttagagtagatggagttaatatttgatgttttttagtattaagatggattagtgatttgttgttttttagaagtagaaatttggggttgttaatttttgaagtagagagatttaggtattaatatttttttatgtggaggggagtaggatttaagatttttagaaaggaagaggggaaaagttattgggaag

SEQ ID NO: 634 - DNA, 6250 bp, Artificial Sequence
  chemically treated genomic DNA (Homo sapiens)
aggtgtggtggtatatgtttgtaattttatttattggggaggttgaggttggaaaattgtttgaatttgggaggtagaggttgtagtgagttaagattatgttattgtattttagtttgggtgaagaaatgagattttgttttaaaaaaaaaaaaaaaaaattagttaagtatggtggtatgtatttgtagttgttagttatttgggaggttgaagtaggaggattatttgaggttaggagtttgaggttatagtgaattatgattgtattattgtattttagtttggatgatagagtaagattttattttaaaataatattaatagtttaaggaatagattttgaagtttgatattttgtatggtgttattttagttttgttatttatttgttgtgtgattttgggtgaataatttaatttttttgggtttttgtttttttttttgtaaaatgattatttgtattttataggagtgttgtgagaattaaataagttaatataagtttttgggaagaattagtttttgttatggttgtgtgaagagttttatatgagtttttttgtaggatgtatggttgttggtttgtgtgtgtgtatatatatatatgtgtgtgtgtatgtgtgtatttatgtgtatatgtgtatatgtgtgtgttgtttttttgatttttgagtgttgtgtgtgtgttaatgtgtgagattatatatgtatttttagtaaagatttaggggtttttgtgtgttttgggggtttgtatttgtttttggttgtatatttgaattttatgtttttttgtgtgtgtagggatgtgtgttatgtgtgttgataattatatgatagtgtgtgtttttatatgttagtgtgtgtttgtgaagttgtttttatgtggttgtgggtgattgtttatgtgtgatttggtgagtggttgtgtggaagtttgtgttgtttgtgttgggtgtggagtttttggttagttagggtaggtttttgtatgttttttttattttatggaggaggagatgaggggtttggatgagatagaagaatgaggggttattttttgtttgatgttggggttgagttattgtttattagtggttgttgtgttattttttagtttttgttttttttttttggttggtggtagatagagggggtgtggaggaatagggtagggggtgggtttgaggttggatttttgtttggaaatttgaatttttatttatgttttttatgtttttttagttttttatatttttttatattttttttattattggggtagggaattaggattttttgaaaattaagaattattgttttggttttgttataggtttgttgtgtagtttggagataggttttgttttttttttaatttgtgaaatttaatgttttaaaagtgtttttttttttgtgtttagggttgggttaggttgtgtattgggagggaagtgttgggttttttgaggtttgtgaaatagttggtagtattttttttagtgggtgtttaagagttgggggttgtagtatttgaaatatttaagttagtgtaggtatagtggtttatgtttgtaattttagtattttgggagattgaggtaggtggattatttgaggttgggagtttgaaattagtttggttaatatggtgaaatttttatttttattaaaaatataaaagttaggttgggtatagtggtttatgtttgtaattttagtatttaagaaggttaaggtgggaggattatttgagtttgggagtttgagagtagtttgattaatatggagaaattttgtttttattaaaaatataaaaaaattagttaggtatggtggtatatgtttgtaattttagttatttgggaggttgaggtaggagaagtattttaatttgggaggtggaggttgtggtgagttgagattgtgttattgtattttagtttgggtaataagagtaaaattttgttttaaaaaataaaatagaataaaataaaaattagttaggtgtggtggtgtatatttgtaattttagttatttgggaggttgaggtaggagaattatttgaatttaggagatgtaggttgtagtgagttgagattgtggtattgtattttagtttgggtaatagagtgagattttgttaaaaaaaaaaaaaaaaaatgttagatttatgaattttatttgttaagaagatttgtttaggtagttatttgtatttttgtgagttaagattgtaatagtatatgttaagagtagtaagaaggagattgtaaagtttagaaagatttgataggttaggtgttgtggtttatgtttgtaattttgatattttgggaggttgaggtaggtggattattaggttaggagtttaagattattttgattaatatggtgaaattttgtttgtattaaatatataaaaattagtttgatgtggtggtttgtgtttgtagtttagtaatttgagaggttaaggtgaggtggaggttgtagtgagttgagattgttattgtattttagtttggtggtagagtaagattttgttttaaaaaaaaaaaaaaaaaaaaaaaaaaaaagatttgataagtgaaagttattaatattgttattattatttaaaaaaattttagatataggttttttagggagttttatttaattaggtaggttttagaaattagaaaagaaatggaaagggtaggaaatttggagtttgataattttgagtttgaattttttgtgatgggattttgggtaagttatttaatttttttgagtattattttttttttttataaaatgaagattttttttttttaattttttagagttgttttaaggattataaattttttattgaaaggtgtagtataggagttgtgtttggtaagtgttaaatataaggtattaattattattattagaattaataataatatttttttttttttatatattttttgtttttgggtggattaaaaggtggaaggagaggttattaatattattagaagagaggtttttttttaagttttattttttattttttttaaatttgtattttttttaaatgttggatttgtaaggttagtagggtttaagatatatattttttgtttagtggggaagattaaagttaaagtttagagagggaaaatattttttaagtttgtatagtgaattaggatagaaattaggatgagttttggaatttttttattatttttatttttatttgagtattatagtttgtttgggatttagtttttttatttatgtgattatattatattaattagggtttttttttggagatttgtttttttttttgaatgggggtgttgtattattggtagaatagggtaggtgggggtgttagaggtgaaggggatttgtaggttggggttttttttgtttgggttagtggggtttttgtggggttagtttaagtgtttattattattagtttttggggtggtgttgtattgtgtaggtgtgggtggggtgtgggtgtgtgtgtgagtgagtgagggattttttttgatgttattgttaggatattaaataaatattttgttgtgttggttgagttttttatatggttaattgtgttataggaattttgggaaggtggggttgggatttttttttgttgagtggtttggaatgtaatttttgagatttttagggttttgagggttatgtaagtgattagattgagtttagaatagattttttgttggatagtgtgggatttgatttggtggggttggagatttggggaagtttgtttagtaaggggtgggtgatgtaagtaggggggtgggttttgggtatataaatataggttggtgggtttgtgttttatttataagatttagagttatggttatggtagggatatgtggaattaagatttggaaatttgattgttgtggttttttttgggggttatgaaattttattaatttttttttttttggggagaaagtttttggaaagatttttttagatatttttttatttttttttggaggattgatttattttttttggttttttttattatttttttttttttgtgggatttgttggatgtgtggaggagattgtagttgaagttgattttgtatagtgggatagtgttttttgtttttgggggagtaattttttttttgtttttgggttttatggagtttgtatttttaagaggtatagtggtattttgtgggggtttgggtattgtaggaagattgtatagaaattttgttattgttggaatgggatgttgttttttttttgagtttttttggatagtgtattttgaggatttgtttagtttattggggatttttatggtttattttggatttgtattttatttttttaatttggttatagttttggttttttggtgattttagtgtggttataggggtttttttgtgtttagggaaatgttttaggttttttttggagattatgattttggtttttggtgtagttttttattttttgttgagttttaatatttgtttttggtggatttttttggtagtttatttattgttgttgttttttaggtaagtttttgatagtaggggtgttgttttgtaggttttattttttaagttaagggtgaaaagaataaattttaatttttataaaaaggtgtattagaattttagatttgagatggaaaaggtttatagtgtattttgtaaattgtaaagagttgggagatgtttgtaattggttgtgtgtgtggagtgtaaggagggaatgtggtagggagggtaggttttggggtgaggtgggggtggggtgggtaatgtgttgtttaatgtaatgtgtatgtggtagtggggttgagaattttgagttggttttgggattgttttttgtttgggttttagatttgaagttagtgtagttaggtaggtgggggaaattttggggaagtttttagtagttttttttttttttttttttttttggagtgtttattttggtgttgggttgttttttatttattgggaagaggggttttgaatttttagttgtgttgtttttgttttttgtgtggagatgtaatgggggatttgtgtgtaatggttgatgtgttggaattttttgtttgatgtggggtatgtatggtgtgtggtgttttttttgtttgttttgtttttgatgttttgggagtgttttattttggaatgttggggttatgttgttaagggagggggtagtttggtgttttgattggttgttggggtgtatgttttggttaattagttttttttttttatttgtagggtgtatttttttttttttttttttgtttttggaatttgtggttttttggtggttgggtttttttttggtgtttttagaggtagagggaggggatttttgttgtgataagagtgtttgtttgtgatttaatggatttgtgaggtttttgtggggatttagtttttgggtttttaggagaagggggtgtttgtttgtgtgttggtgttttttggagagatatggtggttgttatttttttttttaggtatatatagatatatttttattttttttgttttttatgtttggtttttttggtgtgttttaagataggattagaattgtgaattgaagggtaattagttaggtggtttttaggagttttgttttttttgggtttttaggattttgattggttggtgagttagttttttttttattatgttttttgagagagtagttaagtttttagagtagttttaggagtttatttatgggaggggggagatgagtgttgttgaggtttgggggtttaggttttgtattattttttttttgtgataatttgagagagttttagtggttatttttatttatttgtttgtttattttaaattgttatttgttagttttattttgagaagagatagtaatttgaaatgttgttttaaatttttaggtttgttttttaaatatttttttgattgggatttttgtttttgtatgggattttgtgtagaggggggtgtgtatgtgtgtgagtgtagaggaaggtttggtttaaggtttttttttttttttttttttgtttttggggtgggggtggggtgttgtggttgtgtgtgtggttgtggttttgttttgggggttttgttatttggttgtgtttagttttttttttattttttatatttaagagttattaatttggggtgtgatttattattt

SEQ ID NO: 635 - DNA, 6250 bp, Artificial Sequence
  chemically treated genomic DNA (Homo sapiens)
gggtggtgaattatattttgggttggtgatttttaggtatggggggtggagaggaggttggatatagttgggtgatagaatttttgggatggagttatagttatatatatagttataatattttatttttattttagaggtaaggggagggagaaggagaggttttaggttaagtttttttttatatttatatatatatatatttttttttgtgtgaggttttatgtaggggtgggggttttagttaaaagggtgtttgggggatgggtttaggagtttagaataatgttttaagttattgtttttttttagagtgagattgatgagtgatagtttagggtgaatggataggtagataaaagtaattattggagtttttttagattgttgtggagggggaatggtgtgggatttgagtttttaagttttagtagtgtttatttttttttttttgtaaatggatttttggaattgttttgaaggtttaattatttttttggggggtgtggtgagggaagggttggtttgttgattaattagagttttgggaatttagagggggtggagtttttggagattatttggttggttgttttttggtttgtggttttagttttgttttgggatatattggaggaattgggtatgaggagtagagggagtgggaatgtgtttgtgtgtgtttggagaagagggtgatagttattgtatttttttaagaaatgttagtatataagtagatattttttttttttgagagtttagggattagatttttgtaagggttttgtagatttattgggttgtagataggtgtttttgttatgatagggattttttttttttgtttttagaggtgttgaaaagagatttagttgttaaggaattatgggttttggggatagagaggggggaaggaaaatgtattttataaataggaagggaaagttgattggttaaggtgtgtgttttggtggttaattgaaatgttgggttgtttttttttttagtaatgtggttttggtgttttaaaatagaatgtttttgggatgttaggggtggggtggatgaagggggtgttgtgtgttgtgtgtgttttgtgttagatggaggattttagtgtgttagttgttatgtatgggttttttgttatgtttttgtgtaggaggtggaggtagtgtggttgagggtttgaggtttttttttttgatgggtggagggtgatttggtattgaagtgggtgttttgaaggaggaggaaaggaaaagagattgttggaagtttttttgggattttttttatttgtttaattgtgttagttttaggtttgggatttgagtagggggtagttttggggttggtttaaagtttttagttttgttattgtatatatgttgtattgagtagtgtattatttattttatttttattttgttttaaagtttattttttttgttgtgttttttttttgtgttttatgtatgtaattaattgtaaatattttttgattttttgtagtttgtaaagtgtgttgtgagttttttttattttagatttagggttttgatgtgtttttttgtgggggttggggtttattttttttatttttgatttaaaaaataaaatttataaagtagtatttttattattaaaaatttatttgggaggtggtggtggtgggtggattgttgaaggagtttattgaagatagatattgagatttggtagagggtgaggagttgtattgggagttggagttgtagtttttggggaaagtttgaaatatttttttgggtataggggggtttttgtgattatgttgaggttgttgggaagttaaggttatggttgggttggggaagtaaggtgtaagtttggggtgagttgtgggagtttttggtgagttgagtgagtttttaaagtatgttgtttggggaagtttggggaaggagtaatgttttgttttaataatggtaaagtttttgtgtagtttttttgtggtgtttaggtttttataggatgttgttgtattttttgaaagtgtaggttttgtaggatttaggggtgagggaggggttgtttttttaggggtagaaagtgttgttttgttgtatagaattagttttagttatggttttttttatgtgtttggtgggttttatggggggaggggagtaataaagaagattaaaaaaagtaagttggttttttaaaagaaaatgaagaaatatttggaagaatttttttaaaaattttttttttggaaaaaaaaagattaatgaaattttataatttttaagaagaattataataattaagtttttaagttttggttttgtgtgtttttgttgtggttgtagttttgagttttatgaatgaagtatagatttgttagtttgtatttatatgtttgggatttgtttttttgtttatgttatttgttttttgttggataaatttttttaaatttttggttttgttaaattgagttttgtattgtttagtaagaggtttgttttagatttgatttggttatttgtatgatttttggggttttgggggttttgggggttgtgttttgggttatttggtgggaggggattttggttttgtttttttggagtttttgtgatgtaattagttatataaggagtttggttggtgtggtggagtgtttgtttggtattttagtaatgatgttagagggaattttttgtttgtttgtgtgtgtgtttgtgttttgtttgtgtttgtgtagtgtaatgttgttttgggggttggtaataataggtgtttagattagttttgtagggattttgttgatttgggtggggaagattttagtttgtaggttttttttatttttggtgtttttatttattttgttttattgatggtgtagtgtttttatttgagaagaagagtagatttttaaaaggagattttgattagtgtggtgtggttatgtaggtggggaaattgagttttgagtgggttgtgatgtttaggtgaaagtggaggtaatggagggattttgaggtttgttttggtttttgttttgatttgttgtgtgagtttaggaaatgttttttttttttgagttttagttttaattttttttgttgggtaaaggatgtgtgttttggattttgttggttttataggtttggtgtttgggagggatgtggatttggaggagatgggaaatgaaatttagagagaagttttttttttgatggtgttggtagtttttttttttattttttaatttatttggagataaagaatgtgtaagagggaggggatattattattaattttaataataataattaatgttttgtatttggtatttgttaagtatagtttttgtgttatgttttttagtagaagatttgtaatttttaaaatagttttggaaggttaagagagaaaaatttttattttataaaagaaaaaaatgatatttagggaggttaaatgatttgtttaagattttattataagaaatttaaatttagaattgttaaattttagattttttattttttttattttttttttgatttttgagatttgtttggttggatgaaattttttgaaaaatttgtgtttggggtttttttaaatgataatggtaatattagtagtttttatttgttaggtttttttttttttttttttttttttttttttgagatggagttttgttttgttgttaggttggagtgtagtggtgattttggtttattgtaatttttgttttattttagttttttgagttgttggattataggtgtgggttattatgttaagttaatttttatatgtttagtatagatggggttttattatattggttaggatggttttgaatttttgatttggtgatttgtttgttttggttttttgaagtgttgagattataggtgtgagttatagtgtttggtttgttaggtttttttaagttttataattttttttttattgtttttagtatgtattgttgtaattttggtttataggggtataggtgattatttgagtaaatttttttagtaaatggggtttatgaatttgatgttttttttttttttttttgatagagttttattttgttgtttaggttggagtgtagtgttataattttggtttattgtagtttatattttttgggtttaagtgatttttttgttttagttttttgagtagttgggattataggtgtgtgttattatatttggttaatttttgttttgttttgttttgttttttgagatagagttttgtttttgttgtttaggttggagtgtaatggtatgattttggtttattgtaatttttgttttttgggttgaagtgttttttttgttttagttttttgagtagttgggattataggtatgtgttattatgtttggttagtttttttgtatttttagtagagatagagtttttttatattggttaggttgtttttaaatttttaaatttaggtgatttttttgttttggtttttttaaatgttgggattataggtgtaagttattgtgtttggtttaatttttgtatttttaatagagatgggggttttattatgttggttaggttggttttgaatttttaattttaggtgatttgtttgttttggttttttaaagtgttgggattataggtatgagttattatgtttgtattgatttgggtattttagatgttatagtttttaatttttaagtatttattgggaagggtgttattagttattttataaattttagagaatttagtattttttttttagtgtatagtttggtttagttttgggtataaaggaagaagtatttttaaaatattgaattttataggttgagagaggggtagggtttgtttttgggttatatagtaagtttgtggtagagttaaggtgatggtttttaatttttagggagttttgattttttgttttaatagtagggagggtgtagggagatgtggaagattagagggatgtggggggtataggtggaggtttaagtttttagataaaagtttagttttaagtttattttttgttttgtttttttatgttttttttgtttgttattagttaggagggagggatagagattgggagatgatatagtagttattagtaggtagtgatttggttttagtattagatagggagtgattttttatttttttgttttatttaagttttttatttttttttttatggaataaaggaaatatgtaaagatttattttggttggttagagattttatatttgatataggtaatatagatttttatatagttgtttattaggttatgtgtgggtaattatttatagttatatagaaatagttttatagatatatattggtatgtggaaatatatattgttatatggttattaatatatatgatatatatttttatatatataagaagatgtagggtttaggtgtatagttaaggataggtatagatttttaaaatatatagagatttttagatttttattaaaggtgtatatatgattttatatattgatatatatataatatttagagattaagagagtaatatatatatatatatatatatatatagatatatatatatatatatatatatatatatatatatatatatagattaataattatgtattttgtagagggatttgtgtaaagttttttatataattataataagagttaattttttttaagagtttatattaatttatttaatttttataatatttttgtgaggtataaatgattattttataggaagggaaatagaagtttagagaggttaagttatttatttagagttatatagtaagtaagtagtaaagttggaataatattatgtagggtgttaggttttaaagtttgttttttgaattattagtattattttgagataggattttgttttgttatttaggttagagtgtagtgatgtaattatagtttattgtaattttgaatttttggttttaagtaatttttttgttttagttttttaagtaattaataattataggtgtgtattattatgtttgattaattttttttttttttttttgagatagagttttgtttttttgtttaggttggagtgtaatggtatgattttggtttattgtaatttttattttttagatttaagtaattttttggttttagtttttttagtaggtgggattataggtatgtgttattatgttt

SEQ ID NO: 636 - DNA, 6154 bp, Artificial Sequence
  chemically treated genomic DNA (Homo sapiens)
aaattgtaattttaatgtaattgtgagaagtttttttttatagaaatagtataggaagaatagttaataaatattattttggtattatatttaaaaaaatgtatttattatattatatggttaatttatattatatattattttatattatatggttatagaaaaaaaattaggtaaatataaatggttagatgttaatgtttaatgttaaaagtataagtatatttatttgataaatatttaataagtattaattatttattagaatattttattttgagtatttataaagtattaatattataaatataggatgtgaaatttgtttattttttaatatattttaaagattaaaatttatattttatgtttaagatgtttgatggtagtaaaaaattaaaaataatttaatattttaaaaaaatgattagttaaataaattatagtatgtttaataatatgtagaaatttttgttttaagttttttaaaatataaaattatatagtgttataaaagtattaaaaaagaatagatggaatatattaaaatgtttatagtaataatattttagtggtaaaattattgatgattttttattttttgtatttatagttttttaatttttgataatgatttgttttttttttgaaattagattttttttttagatgaaatttttttttgggaaatttttatttaaaaaaaaaaaatttatattttattgttaggtaaaataaatttttagaataaaatgtgttattatatataagtaaatttttttattttttttatgtaatttgtagtaaaagatttttttaagtgaatgtaaggaagattttaaataaaagattatagtatattttagtttttattgaatattaattttaaatttaaaattattttttggaggaatttattttattatttgtaatattgatatttatatttaagagatatattttttaattaatgttatttttttagttaaatatatttattattagtttagaaaaaaatgtagagggaaaattattgtttattattaaatattaaaatttgggtaaagaggatagtaggaaatatttgttttttaattaagtaaaatgagagtatttttatagttttagaagatatgaatatgttttttaattattggtaatttatatttaaatttagttagtttagaggtttttaaggattggtatatgggaattgtttaagatatgtgttaaatatagaaatttatggtttttgtttttatttattaaattagattttttagggggtatagttttaaataatttggtttttttaaataaaatagaagggtagagattttattttataaaagttttttttatagaattgtaaatggttttaataattttgtagtaaagtttttaagataaataattttataattagagaattataattttataatttttatttattattttatttattgttttattttgtagtagtttttaaataagatataatttaataaaattatatatttattatagagtaaaataaaatttagaggtatttgtgtttggttaagataaaggtatatttgatttttggagaaaatagatagtagatgtgatttttagtatttatttattaaaaataatgtattttaaaaataaatttttatgttaaaggaaataaagatgtttataaataagaaggaatgtggaggtgtggagaagaaaagaggaagttttagaaagttaagtattaaaagttaggaaataaggtaaaatgaatggtaattggaaataagggaaatagaataaattaggaaattgaagtagagaagagttttttttttagaaattaagaagttgggggaaaggaatagatatgagaggaaattgatttaagtaaaaatgtatattgaaaagtggaatgattttaagaaatttaaaaatgagaaattttagaatagattaaatgatggtatagaatatattttgggtatgtaataaagatgatataaagagtagaaaataaatattattataaataagttgatgttgaataaagtaagtatattggatgaatttttaaagatgatgatgtaaaaaaaaaattgtagagagaatgagatgttatgagaattgagaaattagatgttaatagtaagtagtaaagagaattttgagtaaagttaatagagtaagttatattatttaattaataattgtaaattataattattatattatattttatttgtaaagtataataaagtattattttttgtaataaaatattaaatatttgtaataaattttatgtaataaaaaaatgtaaataatttgatatagtgttaagaggttgattaatgtaaaaataggttgagagaagtaaggattggagaggaaaaaggaaaaggaaaaaaataggataaaaaggaggataatattaagaaattaattagatttataaaaatgggtaggaataaagaggtgtgaatgtataatggatgattagttaaaaagtgttagtagtgtaagtgtgaaaagagttaagtgaaatttgatggaattttgatagtttttgggtttagaaaataagtagttttaaagtgtttaggaggatttgtgaagataataatagataataatgttagggagtggtgagattaagtatagagttttaagaggattagggtaagagaagtgtaaaaatgtttttaagtgggagttggggttagaaggtaggtaggtttgataattggaaaatgagtgggtggtagatgggaatagaatgggggttattaattagtgatagagtgttgataaatattaggaatagaggattagagattagaaaaggtattggaaattgtgatttaggattgaaaaagtaaagattaaattaaaataatttgttgggtaaaataggtgaagagaaatttttaaatagaaaagtgaaaaagggtagtggattgagaaggggggtagtttgggagaggagagaggaaatgatgagttttattatttttatgattatgtaagaattatatgtgatagtaatttgggttgttgttttagttttagtaattaatttatattttttatgttgaggttgttgttgtttttattttatagagatgtagagttggatattttagttaattgtgatttttttggattaattttgagttttgttttttattgatagttttttgtttaattattgttgttttaatttttatatttggggtgggggttagggaaattttttgggttattgtgtgtgtttatgtaggaaggtgttgtatgatggagagggatatgggggtgatgtttattttttagtttgtggagttggtttgagaaggtggttgagggtattaagtttttattgttgtttttttttaaaataaatattagttagttgttgagtttggagttgggagggtggtagggtggtgttagtatttattttttttggaatggtagggtttgtagttgaagaggttgtggtgttggtgttggtgttggttttgggttttatgtttttgttgaatagagtttggtttggttttgtgttgttattattgttattgtttagtgttgttattttataattgagagttggggtttgagtggttgttgttgggtggggagggggaagggaggtggagagttgggggaggtggaggtggaggtggaggtggaggagtggggggtgtggggggtgtggggaggagtggtttgggtggtgttgtgggtggagggtgtttgggttattttaggtattggtttgtggttttgggtgtagttgagtttgaggggattgggggaaggatgttaggtgggggtgtgggggggagtgggggaagggggtggagatgatgagaagttgttgtggtaatggtgttatttgtgtgttatggttgtgatgttattttggtgtgtgatgtaatttgaggtgtgtttttgtgttgttgtttggggagggtttttttttttttaattatttgtgtttttatattttgtttttgttttgttgtttttatggttttggttttttattttttttttgttttttttgtttttagtttgttttgtaatgtgggatttattagaagagtagggttggtgtttgaggaggagaagttgaaattttagagggaggaaggtggggaagttaatattatttgttatttttattgtaatgaatgtttttgtgttattaaaataagaattttaattttaaggttgaaatagttaagtagaatttgatggaaatatatttaggaatagttaaattagtagtgtgatgtgtgttttttttttattgaagaatttagttagttaaaatgagtttaaatggaagtttgaaagttttttttttattgttgaggaataaaatattttgtgtattttttgttttttagatttatttatttaataaatattagttgagtattttttatgttgtagggtttgtataaggtatatagtattttagatatttgaagtattaaaattaattatttttattttgaagaaaattatttaaaatattttatgtattttgtgttttttatgaatagaatattttaagtattttttgtaaaatatgtatgaaaataattgggagagaagaggttaattatttttgagaagtttaattatagaatgaaatttaatttattattaaaaatatatggatttaataaagaataaataattggaaaagaaaagtttaaggaagagagaaatgggaatgagaaataattattgtgggtttttaatggtttggagtgaattattaaagtaatttaaatatgaagttatgaaaaattaagtggattttgttttttagtattttttattatgggggaagttattagtgatttttttattgtattttggatgatttaagaaatagaaaggtgttttattgatttttgaaatagggtgtttttatattgattagggttattgtaagtttgggagttgatgtttatttttaggtaaaggatgttgtgtgaggttgtttgatgaatgagaatattaatatttttttgtattgaaaaaatataatttataagatgaatattgtaggttgggtgtagtggtttatgtttgtaattttaatattttgggagtttgaggtggatggattatttgaggttaggagtttgagattagtttggttaatgtagtgaaattttatttttattaaaagtataaaaaattagtttggtgtggtggtgtatatttgtaattttagttatttaggagtttgaggtaggagaattatttgaatttgggaggtagaggttgtagtgagttgagattgtattattgaattttagtttgggtaatagagttagattttgtttttaaaaaaaaaaaaatatgaatatggtatgttttgttaattttattgtatatttttttttaagtaggaaagtttttatgaggaaataaatttaaattaaaaagtggtttggtaaatgtagagtaaatgattataagggatgatgttattaagttaaattaatttgaagtattttttattataaggatatatttagaagtagattgaaatagtattattagttagttatggtattttttttttttttattatttttttattatttttttattagaaatataattggtaagatttttgttaattttttaattgttttattttatttttaaaaaattagttgttaaaaatgttatattattataatatttttttataatattaaaagttttaaaggtttttatttttatattggttttattttgaattttagttttatttgttagtattagtttgtagtttagattttttatgattatttttttataggatgattggttttatttatttaatattgattttttttagtgttttatttatttgatattttttgattttgttttaaaattttggatatattttgttttatttttttaggttattttaaagttttatagtatttagatgagaaatgagagaaagtataagttttggagtttaaagattaggattttagtgttagtattttatattttagttatataattttaaagtaggtaagtttaaatttttgtttgttgttttgttttttaatttataaaatgaaggttataataatgttag

SEQ ID NO: 637 - DNA, 6154 bp, Artificial Sequence
  chemically treated genomic DNA (Homo sapiens)
ttagtattattataatttttattttatagattaaaaaataaaataataaatagggatttaagtttatttgttttgagattgtatagttaaggtgtggagtgttgatgttaaaattttgatttttggattttaaagtttatgtttttttttgttttttatttggatattgtaggattttagaatggtttaaggaagtaaaataggatatatttagaattttaaggtaaggttagaaaatgttaaatgagtagaatgttaagaagaattaatattaaatggatgagattagttattttgtggagaaataattatggaagatttgaattatagattgatattgataaataaggttagaatttaaaatggaattaatgtgaggataaaagtttttaaaatttttaatgttataaggaagtgttataatgatataatatttttagtagttaattttttaaaaatgaaataggatagttagagaattaataaaaattttgttagttgtgtttttgatgaaagggtgatgaaagggtgatgaaaggggaaaaggtgttatgattggttaatggtgttattttagtttgtttttaagtatgtttttatagtaaagggtgttttagattagtttagtttgatgatattattttttgtgattatttattttatatttgttaagttattttttgatttaaatttatttttttatagaaatttttttatttggaggagaatgtataatgaagttaataaagtatattatgtttatgtttttttttttttggagatagagtttggttttgttgtttaggttggagtttagtggtgtaattttggtttattgtaatttttgttttttaggtttaaatgatttttttgttttaggtttttgagtagttgggattataagtgtgtattattatattaggttaattttttgtatttttaatagagatgaggttttattatgttggttaggttggttttaaatttttggttttaggtgatttatttgttttagatttttaaagtgttgggattataggtgtgagttattgtgtttggtttataatgtttattttataggttatatttttttaatgtagaagaatgttagtatttttatttattaagtagttttatatagtattttttatttgagagtaagtattagtttttaggtttatggtgattttaattaatatgaagatattttgttttagaagttagtaggatatttttttattttttgaattatttaaaatatagtaaggaggttgttggtgattttttttatgatgggaagtattaaaaggtagaatttatttagttttttatgattttatgtttaggttattttggtgatttattttaggttattgggagtttatagtaattgttttttatttttgttttttttttttttaaattttttttttttaattatttattttttattagatttatgtatttttaataatgaattgaattttattttgtaattgggttttttaaagataattgatttttttttttttaattgtttttatgtgtattttgtagagaatgtttggaatattttgtttatgaaaggtataaagtatataaaatattttgagtgattttttttaaaataaaaatgattagttttgatgttttagatgtttagaatgttatgtgttttgtataggttttatggtatggaaagtgtttaattgatatttgttaaatgaatgaatttggaaaatgaaaaatatatgaaatattttattttttaataatgaagaaaaagtttttagatttttatttagatttgttttaattggttgaattttttaatgaaaagaaaatatgtgttgtattgttaatttagttgtttttaaatatatttttattaaattttgtttggttgttttaattttggggttgaagtttttattttgatgatatagagatgtttattgtagtggaaatagtaagtagtattggtttttttgtttttttttttttaggattttaattttttttttttgaatattagttttgtttttttagtaaattttatattatagaataggttgaggatggaggagataagaggaaagtaggaaattggagttatggaaatggtggagtggaggtaaagtgtgagagtgtgggtggttagaagggaaaaaattttttttggatgatggtgtgaaggtgtgttttagattatgttatgtattggggtgatgttatgattgtgatatgtgggtgatgttgttgttgtggtgattttttgttgtttttgttttttttttttgtttttttttgtatttttgtttagtgttttttttttaatttttttaggtttggttgtgtttggggttgtgggttggtatttgaggtggtttaggtgttttttgtttgtggtgttgtttgggttgtttttttttgtgttttttgtgttttttgtttttttgtttttgtttttgtttttgttttttttagttttttgttttttttttttttttttgtttgatagtggttgtttgggttttggtttttggttataagatggtggtgttgagtggtggtggtggtggtggtgtggagttgggttaggttttgtttaatggggatatggagtttgaggttggtgttggtgttggtgttgtggtttttttggttgtggattttgttattttggaggaggtgagtgttggtgttattttgttgtttttttgattttgggtttggtggttggttggtgtttattttggaaagaggtggtggtgggggtttgatgtttttagttatttttttgggttagttttgtgggttgggaggtgggtattgtttttgtgtttttttttgttatgtagtgtttttttatgtaaatatatataatggtttggggggtttttttggtttttattttagatgtggggattggggtagtggtggttgagtgggaggttattaatagggggtgaaatttagggttggtttgagaaggttatgattggttgaagtatttagttttgtatttttgtggggtgggggtggtggtggttttgatgtggaggatataggttagttgttggggttgagataatagtttgagttattgttgtgtgtaatttttatatggttgtggggatgatggggtttattattttttttttttttttttggattgtttttttttttagtttgttgtttttttttatttttttatttggggatttttttttatttgttttatttagtaaattattttgatttagtttttatttttttaattttaaattgtagtttttgatgttttttttggtttttggttttttgtttttaatgtttgttagtgttttgttgttgattggtaatttttattttatttttatttattgtttgtttattttttagttgttggatttgtttgttttttaattttagtttttatttaagagtatttttgtattttttttattttggtttttttgaggttttgtatttgattttattattttttaatattgttgtttgttgttatttttataaatttttttggatattttggagttatttgttttttgagtttagaagttgttaagattttattaggttttatttggttttttttgtgtttgtattattggtattttttggttagttgtttattgtgtatttatatttttttatttttatttatttttataggtttgattgattttttagtgttgtttttttttttgttttatttttttttttttttttttttttttttagtttttgttttttttagtttgtttttgtattagttagttttttagtattgtgttaaattatttatgtttttttattatataaaatttattataaatatttggtattttattatagaaaataatattttattatgttttataaataagatatggtataataattgtggtttatagttattgattaggtaatgtgatttattttgttgattttgtttgaagttttttttgttatttattattaatatttaattttttaatttttataatattttattttttttgtaattttttttttgtattattatttttggaaatttatttaatatgtttgttttatttagtattagtttgtttatgataatgtttgttttttattttttatattatttttgttatatgtttaaaatgtgttttgtattattatttgatttgttttaaaattttttatttttaagttttttaaaattattttattttttagtatgtatttttgtttagattagtttttttttatatttgttttttttttttagttttttgatttttaaggagaaagtttttttttattttaattttttagtttattttgttttttttgtttttagttattatttattttgttttgttttttggtttttggtatttaattttttgaagttttttttttttttttttatatttttatgtttttttttatttataaatatttttgttttttttgatatggaaatttatttttaggatatattgtttttaatggataaatattaggggttatatttgttgtttgttttttttaggaattggatatgtttttgttttaattaggtataggtgtttttggattttattttattttgtaatagatgtgtagttttgttgaattgtattttgtttgaagattattatagagtggaataatgagtgaagtaataagtaggggttatgaaattgtaattttttgattataaaattgtttattttgggaattttgttgtagagttattagaattgtttgtaattttgtaaagaaggtttttgtgaagtaaaatttttatttttttattttatttgaaagggttagattgtttggaattgtattttttgaagagtttgatttagtaagtgagagtgagggttatggatttttgtatttggtatatgttttgagtagtttttatgtattaatttttgagaatttttaggttagttgaatttaagtataaattgttagtaattggaaagtatatttatattttttgaaattataaggatatttttattttatttggttaaaaaataagtgttttttattgttttttttatttaggttttaatgtttagtggtgaatagtagttttttttttatatttttttttgaattgataataaatgtatttggttgggagggtgatattgattaaaaaatgtattttttgaatgtaaatattagtattatagatgataaaataaatttttttaagaaataattttaaatttgaagttgatatttagtggaaattgaaatgtgttgtggttttttatttgaagttttttttatatttatttaaagggattttttattgtaaattatatggaaagaatgaaaaggtttgtttgtgtgtaatgatatattttattttgaagatttattttatttaatagtaaaatgtaggttttttttttttaaataaaagttttttagagggaaattttatttaaaaaaaaagtttgattttaaagggaaagtaagttattattaaaaattagaaaattataagtataaaaagtaaaaaattattagtaattttgttattaagatattattattatagatattttggtgtattttatttgtttttttttaatgtttttataatattatgtagttttgtattttaaaaaatttaaagtaaaaatttttatgtattattagatatattgtgatttatttaattaattatttttttggggtgttaggttgtttttaattttttattgttattaaatattttgaatataggatgtagattttagtttttaaaatatgttggggaatgaataaattttatattttgtatttgtagtattaatattttgtaggtgtttaaaatagaatattttggtaaatgattagtgtttattaaatatttattaaatgaatgtatttgtatttttggtattaaatattaatatttgattatttatatttatttgattttttttttatggttatatggtatgaaatagtgtatggtataaattaattatatggtataataaatatatttttttaagtgtgatattagagtgatatttattaattgttttttttgtgttgtttttgtagaagggagttttttataattgtattagaattataattt

SEQ ID NO: 638 - DNA, 6154 bp, Artificial Sequence; identical to SEQ ID NO: 636
  chemically treated genomic DNA (Homo sapiens)

SEQ ID NO: 639 - DNA, 6154 bp, Artificial Sequence; identical to SEQ ID NO: 637
  chemically treated genomic DNA (Homo sapiens)

SEQ ID NO: 640 - DNA, 6217 bp, Artificial Sequence
  chemically treated genomic DNA (Homo sapiens)
atgtttttatttatatatatgtggtagtttgggtgtttatgtatatggatagatgtatatatatagagtttttgtgttgtttagtaattgttttaaaatttggataattatttaatttttagggtaaggtataaattatggtagggaggtttattttaatttttttgtttttttttttttagtttgtagtttaataaattgatagttttaaaagtagaaaaattaaagaggatgagattttttgtttgattttaggtgaatttttttttgttagttaggtaggaagttttgatttgaaaattagttttgggtattgttttttttattgttttttgggtattaatttttgttttttaattttagttgaattagtggatggtgatattataggtttaagatagttgtatttaaatattagtgattataggttatattaaggaaatatttgtaggtaatttagggtttgggaaggagttatttttagttatttgtaagatagtaggatttgtagattatagtataattaaatttagataaaattttgaattagtgagaattattaggaaggaaaggaatagaaaatgaattaatttgagtgttaggagatttgtatttagttttgattttggtattaattgaatgtatgtttttggataggaaatttttttgagttttgattttttttgtggtaaaaaggagagggttaaattatagggttttgagggttttttttagttgttatattttggagtgtatgagatgaggtaggtatataaagtggataagatgtggttaagaaaataagttatatattaagtttatttgtagtataggtgtttaagaaaattttgttgttgtgtaatattagaatggaaggttggtttttagtaaaatgtattaattttggtttaaattaagatgatgggtattgggtatgggggtggggaggtagttgaagatttattgagttttgttttagggtagttttgtttattgttttattttattttttattatggtgtttaagtttatattgagagagaaatttttagttgtaaaagggagaagagaaatgttggaatattagtattggatgttaggatatggttgtggtgttttaaaaattattttattatttggagtttgattttgaggggagtatttttattttttagttttttgaaagtatttattagtatttgaatattgttttgagtttgttggagtagtgaaatttggtgagagagaagggtggaggaaggaaggagttgttgtatttggtggttggatttaggtagaggaaattgttataattttgggaaagaatagaaaagtagaaagggatgagtttttatatgtagttaatgtttatggttttaattgtgtttgggaaggaagattttgggttaggggtgtatttttgttttttaaaattaaatgtgtttgagatagttataaagtttattaagggatttgagagattagagttttttgttttttttttttaattttgagttttttttttatttttattgagggagagtttgagtttatgataagtgttgtgtttatttttggttaatttttaaaagaaagatgtttgttttggttttttttttaggtttttagtttttttagggatggtagaaatttttgggttaaggttgagtgaattattgtttattgtttttattagtttttagtaaaggtatgttggtgggggggtgtttagtttttttagtaaatgttttgtggttttttttgtagattatgaggtgggggttgttggggagggttgagttgggggtagtttgttattttggtttttagtgagttgttggtgatttttgtggttttttggtttaggttttggttttttgggtgaggagtgggagggaggttggggtttaggtgttgtggtgaatttgttaatgtagtgttgggttttgaattttaggttttgttttaggtttttggttgtttggttagtttgtttgttttaattttaatttttttgaggttagttagagtaggtttgttggtagtagtatttttttagtagttatgtgattagttaattttttggtggtgtttggggaggtggtgtgtttgggaatgaggggaggtggtggaattgtgttggggttattttaaggttgtgtttgttagttttggtggggtggtttttgttgttgtaattaatggatttttttttttgtttaaatagatttgttgtgttaattatttttttttttgttagttttttttttattgttatattgggttattaaaaaaagggggtttgtttttttggggtgttttttttttttttttttgtttttgtttgtttatggttttgtgattttgatgttggtaaggtttggagagtggttgggtttgtgggatttgtgggtttgtatttgtttagatttggatgggttttgttattttttttgtttgtttggtttttttttttttttgtttttttgtttgttagtttatttgattagtggagatttggtggttgggttggggtttttttgtagtttttgtgtgtttttagagtttgggttgtggtttgttggggtttgtgttttttggttttgagggtagttgttgggtttttgagaggggtttgggttgtgtaggggtgttttgttttgtttggttttgtttttttgagagtgtgagagaggtggttgtgtagatttgggagaaagatgttaaatgtgtgagtgtttaatgggagttttagtttggagtggatggatgttaggtaggtggagtattttaagtttttggtttgtaggaatttttttggtttggtggattatgaagagttaatttgggatttggagaagtattgtagagatatggaagaggtgagttagtgtaagtggaattttgatttttagaattataaatttttagagggtaagtatgagtggtaagaggtggagaagggtagtttgtttgagttttattatagatttttgtggttttttaaaggtgtttgtaaggtgttggtgtaggagagttaggatgttagtgggagttgtttggtggtgtttttaattggggttttggttaattttgaggatatgtatttggtggatttaaagattgatttgttggatagttagatggggttagtggagtaatgtgtaggaataaggaagtgatttgtaattgatggtaatgatttttttttaattatagaatgtgtttggggttttgttttgtttgttggagggtgttaattttagtttgttttttggtgtattttgatttagttttgggagagttaattttattggttttaggtgtttagtgttatttggtttattgtttgtttgtttgtgatttttaagttagaaattggagatggtaagatttgataatttttttaatttaatatattgtggttttttttattagtaatttttaggtatgtgataaagttgggatgtttattaatggtttgttttttggttagggaaagagttttggggtggagaatgtattttttgttttttgaaaataattttattttgtgtttttaaaagttattggggatgatggatttaggattgtgggtggaggtagtgggttttttattttttgattatggggttaatttttgttagttattgttttttttaataaagattgtgtgttttttttaaaaattttttttgtgtttagatttttttatttaaaataaaagagttaatagaatagaagaaaatgttttagatggttttttaaatgttggttttgtggagtagatgtttaagaagtttggttttagaagatgttaaatgtaaatagtttggtgggttgattattaaaggagtatgtattggaatttggggtttttagattttatgatatttgattttattggttgttggtaaattaaaagtttatggggttttgttttgtttatattttgtgaggttaaaaaagtagtaatggggaaggttggggatatggtaattttttagagtttttatgtttagagatattttttttttaaattgttgattagagtagttatttgtaatttaggttttattgggtaggaaggttgtttttttgtgagttttattaaaatgtgttgggagtaataggttttttgtttatttgaataagaattagggtatttttttagtttgaattaatgagaattaattttttagaggtttagtttgagttggtaatagattttgagttatatatggaaaaatggtaaatatatgattaagttttaattttgagggggaatgtttggtagaaattgtttatttttggttatgtaagggattagagatgtgaataggatggtatgttgtgttttttgatattttaataaattgttattttttttgttgttttttaagtttggagagagaaggaattagtatttgtaaaaattaaatggaaagataaaaaagttattaaagtttttatagaatttttggtaatattgaagttgtaaagtagaagttaaattaatttttgttagtaagtaatttaggaatatgttagttagtgtatgttaattgtgttgtaatagggtgatttggatatttgtaggggaaatgggtagtaaatattaagattggtgattgtaggttagtttagtataaaggaagtggagatttttttatgtataagaatttgattattgtaaatagttaatttgaataatttagtttttagataattaatatgggttggttatttataataaattatatattttaatagtttattagttttttttagattaagattgtgatttttttattttttaaagtatatatgtagtttagtatatgaggtgataaaatattgatgttaattttttaaatttttagttataaaaattttaaaataatagggattaaggtgagatttaggtttgttgtgtttttaaattgtatatgtgattttatatattttttttagtgtttatataaaatggtattatagaatttttattttatagtattatatgaagtgggaaaattaggtgaaaatttttttgaagtaattttaatatgtgtagtttttgttggtttgtgatttgtggtttagtttattagatgagttatgagaattagatttggattttgatttggttttgttttgatatgtaatgaggtatttgtaggatttagtaatattgttagtttaaagaatattagaaatattagtaagaatttatttaaaagtatttatgagtattttttgtatatgaattaggaattagaatattttgaaaatgatgttaataaaatttttttttggaaggtttttataatttttatttttaattattttttaaatttagaaagtttaatttgttataggagaaaaaaaattaaaaatttttaaaaatttagaaaatttttatttgtaagtattatagttttttaattattttatttattttttatttgtttttgatttagattatttagagtagggttttttagtttttgtattaatgatattttgggttgaataattttgttgtaggaggttgttttgtgtgttttagattgtttggaattatttttggttttttatattagatgttagtagtattttttttttttagtgtgataatttaaaatgtttttagatattgttaaatgttttttgtggggtgggggtaatattgtttattgttaagaattattgttttagattaaagaatatagtatagaggaaaggaaaaaaaaatttagttaagagaatgttaggtggagatgattatagttattaaatttttttttttattaagtatttttaagttaatatagtgataaaataatttttgtattttattggtaatgttaatttagtgttttttttttaatttttttgttttgtttttttttgtagaattaagaatatgtttttttgtttattagatatattattgtttgatgaagtaaggaagatatatatgaaaattttaaaaatatatattgttgattttatggaatggatattttgtataagtattgaaaaataataatataataatattaaaattttaggtatttttaaatgatttgtttttaaaagtgttggatgtagtattatgtaattaggtttttttttatttgttttattgtattatttgtgtatatagtttttattttttatgtagtatataaattttggggaagggagggtaggg

SEQ ID NO: 641 - DNA, 6217 bp, Artificial Sequence
  chemically treated genomic DNA (Homo sapiens)
ttttgtttttttttttttaaagtttatgtgttatataaaaggtaaaaattatatatataggtagtataatgaagtaaataaggaaaaatttaattgtataatgttatatttaatgtttttagaggtagattatttaagagtgtttaaaattttagtgttattgtgttgttgttttttagtgtttatataggatgtttattttatgaagttagtgatatgtatttttaaaatttttatgtatattttttttgttttattaagtagtgatgtatttgataaataaggaaatatatttttaattttgtaaaagaaaataaaatggaagaattaaaggaagagtattagattaatgttattagtagagtataggaattattttgttattatgttagtttggaaatatttgatggggaaaaaagtttgatgattatagttatttttatttaatatttttttaattggatttttttttttttttttttgtgttgtgttttttggtttagagtagtagtttttaatagtaggtaatgttgtttttgttttatagggaatatttggtaatgtttggagatattttaggttgttatattgggggaggaggatattgttggtatttagtgtgagaggttagggataattttaaataatttaaaatatataggatagttttttataatagaattatttggtttaaaatgttattagtgtagaggttgagaaattttattttaaataatttaggttaaaggtaagtgggaaataaataggataattaggaaattgtaatatttatgggtaaaaattttttaaatttttgaaaatttttaatttttttttttttgtgatagattaaattttttaaatttgaaaaatgattgggaataaaaattataaaggttttttagaggaaaattttattaatattatttttaaaatattttaatttttgatttatatgtagaaaatatttatgaatatttttgaataggtttttattaatatttttagtattttttgaattagtaatattattaaattttataaatgttttattgtatgttagaatagggttagattaaaatttaggtttgatttttgtggtttatttgatgagttaggttataagttataaattaataagggttgtgtatgttaaggttgttttaggaaaatttttatttaatttttttattttatatggtgttgtaaaatggaggttttatagtgttgttttgtataagtgttgaaaaagatatgtgaagttatatatataatttaaagatataataaatttgaattttattttaatttttgttattttaaaatttttataattggggatttaaaaagttaatattaatattttattgttttatatgttaaattatgtgtgtgttttagaaaataaagaggttatagttttggtttaaaggaagttaataaattattaaaatatgtagtttattatgaataattaatttatgttggttatttggggattgaattatttaaattagttatttatagtgattagatttttgtgtatggaaaaatttttattttttttgtgttgggttgatttatggttattagttttgatatttattatttattttttttataaatatttaaattattttgttatggtataattagtatatattggttgatgtgtttttggattgtttattgataagagttaatttaatttttgttttgtaattttagtgttattagaaattttgtagaaattttagtaatttttttatttttttatttggtttttgtaaatattggttttttttttttttaaatttaggagataatagggaaagtgatagtttattaaaatgttaaagaatataatatattattttatttatatttttaattttttgtataattaaagatgagtaatttttattaaatatttttttttaaaattgaaatttaattatgtatttgttatttttttatgtatggtttaaaatttgttattgatttaagttgaatttttaggaaattaatttttattaatttggattgagggagtattttagtttttgtttggatgggtaaagaatttattgtttttaatatgttttagtgggatttatagggaaatgatttttttatttgatggggtttgggttataagtagttgttttggttaatagtttgaagagaaagtatttttgggtatagaaattttgaggaattattgtatttttagttttttttattgttatttttttgattttatgaagtataaataaaataaaattttataagtttttaatttgttagtaattagtaagattaggtattgtgaggtttgaaggttttgggttttagtgtgtgtttttttagtgattaatttattgagttgtttatgtttgatgttttttgaggttaggttttttgggtgtttgttttatagaattggtatttggggaattgtttgaaatatttttttttgttttgttggtttttttgttttgagtagaagaatttaagtgtaggggaaatttttaaaaagaatatataatttttattagaaaaaataatggttggtagaagttggttttatagttaggggatgaaaaatttattatttttatttataattttggatttgttatttttagtggtttttaagggtataaaatgaggttgtttttaaaaaatagaaagtgtattttttgttttagagttttttttttagttaggaggtggattgttgataaatattttaattttgttatatatttaggagttgttagtgagagggattgtgatgtattaagttagggaaattattggattttattatttttagtttttgatttaaaagttataaatagataagtagtgggttaggtagtattgaatatttaagattaataaagttagtttttttaaagttaaattagaatatgttgaaaagtaagttaaggttaatattttttagtaggtaaagtggggttttaaatatattttatggttgggaaagggttattattgttggttgtaggttgtttttttatttttgtgtattgttttgttaattttgtttggttgtttgatggattagtttttgggtttattaaatgtgtgtttttagagttagttggagttttaattaaaggtgttgttgggtggtttttgttgatattttggtttttttgtgttggtattttgtaggtatttttggggggttgtgggggtttgtagtagaatttgggtaagttgtttttttttattttttgttatttgtatttgttttttaggggtttgtgattttgaaaattgaaattttatttgtgttggtttgttttttttatgtttttgtagtgtttttttaagttttgggttaattttttgtggtttattgggttgaagaggtttttgtaggttgagggtttggggtgttttgtttgtttggtgtttatttgttttaggttagggtttttgttagatatttgtatgtttgatattttttttttgggtttgtatgattgttttttttgtatttttaaaaaaataaaattgaataaaataaagtgtttttatgtagtttgaattttttttggaagtttagtgattgtttttggagttaaaagatatagattttgatgagttatggtttgagttttaggagtgtgtaggggttgtggggaagttttggtttggttgttgagtttttgttgattaaatggattggtgagtgggagggtggagaggagaggggattaggtaagtggagagggtggtaaagtttgtttgagtttgggtgggtgtaagtttgtgggttttgtgaatttagttgttttttaaattttgttggtgttggagttgtagagttgtgagtaagtggggataggggagggggagaaaaatattttgaaaagatgagttttttttttttagtggtttaatatggtggtggaagggaggttgatgaagaagaaaatgattgatatggtgagtttatttaaatagaggaggagatttattggttgtggtggtgggagttgttttgttgaggttggtgagtgtggttttaaggtggttttggtgtggttttgttatttttttttgtttttgagtgtgttgtttttttgagtgttgttgggagattggttggttgtgtgattgttggaggggtattgttgttaataaatttgttttggttggttttggagaaattaaaattaagataaataaattagttaaatggttgggaatttggggtggggtttgaggtttggggtttggtgttgtgttggtgggtttgttgtggtgtttaagttttgattttttttttgttttttgtttgggaagttgggatttggattagaggattgtgaaggttgttggtagtttgttaggagttggggtggtgagttgtttttagtttggttttttttagtggtttttattttgtggtttgtgggggaggttgtggagtgtttgttgggggggttgggtgtttttttgttggtgtgtttttgttgggggttggtggaggtagtgggtaatggtttgtttagttttaatttagaagtttttgttatttttggggaggttgggggtttagggaagaagttaaagtgaatgttttttttttagaaattagttaggagtagatgtggtatttattatgaatttaagtttttttttaatgaaaataagaaaggaatttaagattaaaaaaaaaaaataaaaaattttagttttttaagttttttaataaattttgtagttgttttagatatgtttagttttgaaaaatgagggtatatttttggtttaggatttttttttttaagtatagttaaggttatggatattggttgtgtgtgggaatttgtttttttttatttttttgtttttttttgggattgtagtagttttttttatttgagtttagttgttaaatataatagtttttttttttttttattttttttttttattagattttattgttttaataaatttagaataatatttagatgttagtgaatgtttttagagggttgaagggtgaaaatattttttttggggttaaattttagatgatgaaatgatttttaaaatattataattatgttttaatgtttgatattagtattttagtgtttttttttttttttttgtagttggaaattttttttttagtgtgggtttgagtattgtggtggaaggtaaagtaggatgatgagtagggttgttttgagataaagtttagtggatttttaattgtttttttatttttatgtttggtatttattattttggtttgagttaaagttaatgtattttattggaaattaattttttgttttaatattatatagtagtaaagtttttttaagtatttatgttatagatgagtttgatgtgtagtttgtttttttagttatattttgtttattttgtgtgtttattttattttatatgttttagaatgtgatagttggaagggatttttgggattttgtggtttaatttttttttttttattatggaggaaattgagatttagagaggttttttgtttagggatatgtatttggttggtattggagttaggattagatgtaagttttttaatatttaggttggtttattttttgttttttttttttttaatggtttttattggtttagggttttgtttgagtttgattgtgttgtagtttgtaggttttgttgttttataagtgattgaaaatggtttttttttaggttttgggttgtttgtagatgtttttttgatgtggtttgtggttattgatatttaaatgtagttgttttgagtttgtggtattattatttattagtttaattaaaattgaaggataggggttgatatttagagaatagtaaagggggtagtgtttagaattagtttttaagttaggattttttatttaattgatagaaaagaatttatttaggattaagtaagaggttttattttttttagtttttttatttttaaggttgttaatttattggattgtagattgggggaaaaggaataggaaaattagggtaggtttttttattataatttatattttattttagaaattagataattgtttaaattttaaaataattgttagataatataggaattttatatatgtgtatttatttatatgtataaatatttaaattattatatgtatgtaaatggagatat

SEQ ID NO: 642 - DNA, 6196 bp, Artificial Sequence
  chemically treated genomic DNA (Homo sapiens)
tttgtatttttagtagtgatggggttttattatgttggttaggttggttttaagtttttgattttaggtgtttttatttgttttgttttttaaagtgttgggattataggtatgagttattatatttggttagaaaaattttaattatatttgaaatttatttatattattataagaaatttatatatattaatgaaaaaaaaaagagatattgaatttttagaatttaattttaaattgtttataatttaagataataataatagttgtaaatgtattatttatgtgtttgtatagttttttatttgaaagttattattaaaagtataaagaagttgttgttgaaatttttaatttgtatagttgttttaatatgaaattataaagaaaaagttatgattatgaaattaggtttaagttttttttaattttaaaaatattttatttaaagttttatttaaattatttatttttaatattttgtattttattgtttttttttaataaaaaataatatatttttgttaagtgatttatagttatgtttttaatttattgtagttattttatttataaaattttatattttatgaatataaaaaattgagaaataatgttttatattatattaattagtttagagtataattgtggttatattggttaatgggttaatagggttatttatttattgttaataattttttttttgtgagtaaaataatttggatttttaaattataaattataaatttattaatgttttaatttatgagatggagtaagtttttttaggtaaattgtaattggttatagttttatttgtaaatgtattttgtttgttttaaatagtttttagagagttgttttgtaatgtgttttaggattatttttagaataattttttatggttgtgtgtattgtggtttaagggattttttattggtaggtttaaaatttatttagtttgtttttagaagagtaggattgtttttgtaagtttgtataaaaaataaaaagttagattagaaaaatgtaaggagtttaggtaaggtggtttatgtttgtaattttagtattttgggaggttgaggtgggtagattgtttgagtttagaaatttgagattagtttgggtaatatggtaaaattttgtttttaatgttatttaaaatataaaaattagttgggtgtggtggtatgtgtttgtagttttagttatttgggaggttgaggtgggaggattatttgagttagggaggtggaggttgtagtgagttgagattgttttattgtagtttagttagggtgatagatttagaatttgttttaaatatattatatatatatatatatatatatatatatatatatatatatatatagggagtttatagattttttttttttttttagttgtttttttttttttggtttttttgttaaaaattttatatatgtttttaagtaaaattttttaatttattttaatagatgaatttgttttggattaagttagaagtaagagagaattttgttagattagttattttattagttttttaaaatgtagttatatttgggagatttttgtgtaggaagtaaggttaataatgtagtttttagaagattaggtgtggttttaatgagtttatataaggtgggtggggaggggagtggttttatggttttatttttaaaatttgtgtaaagattattttttgttgtttaaatatggtagtagagaaagagatgtttttgttttttatgttataattagaggtaataatttgtgttaatttggtttttagtgaaaaggttaaaagtgtattgataattttggttttagttgagattgggataatttgtttgagttagtgttaaattttatttatttggtgtgtaagtgagtggggttttttttttttaattttggtttaggttgtttttgttgggttagtgttgttgggttggtggaagttgttttttttttttttaagattagaaaggtggagggtttaggaaggggtttttttttaggtgtaagggattgtttggatatttggagggaatggtaaagttttgttttatgaggtgaatgaatataaattaaattgtttttgtatttaaaataatttgatggatgatagtgtttatttagttaattggtttttgatgttggatttgttatttgggtttgttgtttgtgagttaaggttttgtaaaaagtttttggtttgttattttaattaatttattttttttagtaatttttttaatatatttttgggttgtattgtaatttattttttatagtagaaatgtggagggttttagagaaggtataaggtaaattttttttttaaattttatttttggttggttgtggtggtttatgtttgtaattttagttttttgggaggttgaggtggatgaattatttgatattgggagtttgagattagtttgattaatatggagaaattttatttttattaaaaatataaaattagttgggtgtggtggtgtatgtttgtaattttagttatttgggaggttgaggtaggagaattgtttgaattagggaggtggaggttgtggtgagtttagattgttttattgtattttagtttgggtaataagaatgaaatttagttttaaaaatttttttgttttattttattttttaaatttgagataaggttttgttttgttgtttaggttggagtgttatggtgtaattatagtttatggtagatttgaattgttgggtttaagggatttttttattttagtttttgaggagttaggatgatatgtgtgagttattatgtttggttaatttttagattttttgtagagatggggtagttatgttgtttaggttggtttttaatttttgattttaagtgatttttttgttttggtttttaaagtgttgggattataggtgtgtgtaattgtgtggaggtaatttagaaattgtagagggagtatggatttgggtattgggaagaatagggtgtggatttggagtgtgattgtgtttgaatttgggttgtgtttgggatattttattttttgggttgtaggtggggggggagagagagagagagagagagagagagagaggatgttgattttatatggtttttagttttttgtgttttagttgaatgtttggtttttagtgggtgtttgatatgtgggaaatgtagggggagggggtggtggggtattgggaatgttttgtagagtggattttgggagagtggtgtttttttttagaatttttttttggttatatttggagtaaaagtttgatattttagaaggaaaattttagatgagtagttaggattgagggttagtggtaggtgggagtggggagatagtataagtatgttttttaatgaggtggtgttgtaaaataattaattttaataaagattgtagagaagaaaattaggttttgttggtggagtgtataggtttttagttgagtgtttaataattaggttttgggtttattttgttgtagttttttggaaatttttaagttggaatgtgtgtgtgtgtattatgggttattgttttttttgtgtgtgaatttgaagtgaaatttgggtgaggtggggttgtgttattagtaattggatttatagttgtggttttaagaagttttgaagtttttttggttttttgtagtattgttgggagggtatatggtgtttttgtttttattttagagtgtggggtgtgtggaaaaaggtttggtgattgttttttttgttgttttttgggagtgtgtttttttgttggattttgggattttagagaagtgttgagggtgtgagtatattaagatatatgattttttttggggattgggaagggtataattattttttgtaattttgttattaagatgttttgggttattaggtttgggggaaaatttgtttttgttttaggtttttgatttgggttgtagtttatgttttgtgtttttttttgtgtgttgttttgtttttttttagttttgtttttagttttgtttgggtgtttagagggtaaatgaggggtggtggggtggtgggtgggggggagatgtggaattttttagtgtgggggttttggtttattttgtaattgggtagtttttttttgtttatggagagaaaggggaaatggaaaagttggggaggtggtggttggtgtttgttgtgttgtttttgggtaggtttagatgttgtgagttaggggtagagtagggtggtttgagtgtgtgggtgatgtgggttttatttgtttgttttgttttggattgtgtgttatgttttggggtttggtgttttggtttttgtttttgttgttgttgttgttggattttagtggtttggtgtgtttggtttttataggtttgtagttagtattgtattgaatttttggggggttgtggttggagtgtttggttggtgtgggagtgttaaggttgtaggtaatttagggttgggggtttttggtgtgttttttgggttgtgttttgtttgggtgttttggggatttttatgtagaaatggagggtgtttttagtagaggggaaaattttggtgtgggaagaggtgggggtgtgtttatagttgtgtttgtgggttgttggttgtattaggtatagttggaaagtattttgtgtaagggttttatggggtgtagatttgtgatttttttttttttttttttttttttgtatttgtagtgttagggtagtgttggtttgggtagtgtgtggggaagtggggatttgttgttattgtgttttttgttgttgatgttgtttggatggttgtattttttttgtttgagatttggtgagtgtagtttggaggttggaggatttgatttttttaaatgttgggtgttttgataatttataagttttttaggtttttttgatttagagaattaggaggaaaggagtgggagtgtgggttggtggagtttagagatttgtgaatggttggaattaaatttaagtttgtaatttggattttattttatgattaaagaggttatagtagaatatgaaggttgggtttttggtttaagaaagaatattaggagaaaaaaaaagttatttttatggaagttgtttttgagtgatagtgtatgattaggattttgaaatttttttagttttgggtggagaaggatgtttagggattgtttttatagttaataggggaaggttattggttgtttgtaagagagaaatgttgtgatgtttgtttattttatttttgggaagataagattaaaggttgtttttgataaaaaatagggatagaaaggtttttgtagttgttttatatatttgtggtttgagttgtttgtgttaaggagagtgtaatttatttttagttgatgtttttagttttttgtgatggattgaggtttgtgtgtaggatgtttggtatatggtttatgaggattttgttgtgtaaagtaaatgggaatgttgaggtatgtagaggttttgaagtagagtgttggtttttttttttatatgtttgaaatgtataatttggggttttttgagagtaaaaatatagttagaaatgtgttttgagggagaatgtattattttggtatatatatgtatatatgtatatataatttttaaattttttttgagagggggttttatttttgttgtttaggttggagtgtaatggtgtgattttggtttattgtaatttttattttttgggtttaagtgatttttttgttttagttttttgagtagttgggattataggtgtttgttgttatgtttggttaatttttgtagagatagggttttattatgttggttaggttggttttgaatttttgattttaggtgatgtattttttttggttttttaaagtgttgagattataggtatgagttattgtgtttggtttaaaaaaatattttaaatgagaaataatataagtaatagttattttttgttaggtagaagtatatgttgttatgttggttatttttatttatatttgttaggaaatatttatattttgtttttgtatatggaggtagttaagagtattatgttaatgtttaggaagagaatttttttgtgattttattgttgatttttgaaataatttagtgtaattaattttgattgtat

SEQ ID NO: 643 - DNA, 6196 bp, Artificial Sequence
  chemically treated genomic DNA (Homo sapiens)
atatagttaaaattagttatattgaattattttagaaattagtaataaaattatgaggaaattttttttttaaatattaatataatatttttggttgtttttatatatagaaataaaatgtgagtgttttttggtaagtgtgaatgaaaatggttagtataatagtatatgtttttgtttaataaagaatgattattatttgtgttattttttatttaaaatatttttttaggttgggtatagtggtttatgtttgtaattttagtattttgggaggttaaggagggtgtattatttgaggttaggagtttaagattagtttggttaatatggtgaaattttgtttttataaaaattagttgggtgtggtggtgggtgtttgtaattttagttatttgggaggttgaggtaagagaattgtttgaatttgggaggtggaggttgtagtgagttgagattgtgttattgtgttttagtttgggtgataagagtgaaatttttttttaaaaaaaatttaaaaattatatatatatatatatatatgtgtgttaaaatagtatatttttttttagggtatatttttgattatgtttttgtttttaaaaagttttggattatgtgttttaggtgtatggaaggaaggattgatattttgttttaaaatttttatatgttttaatgtttttatttgttttatatgataaagtttttatgggttgtatgttagatgttttgtatataaattttaatttgttgtagagagttgggggtgttagttggaagtggattatattttttttggtataaatgatttaggttataggtatgtaaagtaattgtaagagtttttttgtttttgttttttattaagagtagtttttaattttgtttttttaaaagtgaaatagataagtattgtaatgttttttttttataggtagttggtggtttttttttgttaattatggagataatttttaggtgtttttttttgtttagagttagaaaaattttagagttttgattatgtattattgtttgaaaataatttttgtgaaaataatttttttttttttttagtatttttttttagattaaaagtttagtttttgtgttttgttatgatttttttagttatgggatagagtttgggttataaatttgaatttagttttagttatttataagtttttgggttttgttaatttatatttttatttttttttttttggttttttaagttaagggagtttaaaaggtttataaattattaaagtatttagtatttgggaggattgggttttttagtttttgagttgtatttattgggttttgggtagggagagtgtggttgtttaggtggtgttggtagtgggaggtgtagtgatagtgggtttttgtttttttgtgtattgtttagattagtattgttttggtgttgtggatatgggaaggaggaggaagggggaggagttgtgagtttgtattttgtgagatttttgtgtaaggtgttttttagttgtgtttggtgtagttggtgatttgtgagtgtagttgtgggtatgtttttatttttttttatgttagagtttttttttttgttgggggtattttttatttttgtatgggaatttttggggtatttaggtgggatgtgatttgaaagatatgttggagatttttaattttggattatttgtggttttggtgtttttatgttggttgagtgttttagttgtggttttttgaaggtttggtgtgatgttggttgtaggtttgtgggagttgagtatgttgggttattgggatttggtggtggtagtggtagaagtaggaattagggtgttggattttagagtgtggtgtgtagtttagagtggagtggatgagtgagatttgtgttgtttgtatgtttagattgttttgttttgtttttgatttatggtgtttgagtttgtttaggggtggtgtagtggatgttagttattgtttttttgatttttttattttttttttttttttgtaaatagaaagagattgtttggttgtagggtaagttagagtttttgtgttgggaaattttgtgttttttttttatttgttattttgttgttttttatttgttttttgggtgtttgggtggagttggaggtgggattagggaggagtagagtggtgtgtagggaggagtgtgggatgtgagttgtggtttgaattgagagtttgggatggggatgagtttttttttgggtttggtgatttaaggtgttttagtggtggagttgtaagaggtggttgtgttttttttggtttttagggaaggttgtatattttagtgtatttgtgtttttggtgtttttttggagttttagggtttggtgggagggtatgtttttggggggtggtggggagggtagttattagatttttttttgtgtgttttatgttttggggtggggatagaggtgttgtgtgtttttttagtagtgttgtgggaagttggggaagttttggggttttttggaattgtgattgtgggtttgattgttagtagtatggttttgttttgtttagattttgttttaaatttatatataaagagggtagtgatttgtggtgtgtatgtatatattttaatttagagatttttaagaggttgtggtagggtgggtttggaatttggttgttgggtgtttggttgggagtttgtgtattttgttagtagaatttggtttttttttttgtagtttttattaaaattggttattttgtggtattgttttattaggaagtgtatttgtattatttttttgtttttgtttattgttaatttttagttttagttgtttatttggggttttttttttagagtgttaagtttttattttaggtgtaattggaagagagttttagagaaaagtgttatttttttgaaatttattttgtgggatatttttaatgttttgttattttttttttttatattttttatgtattaagtatttattaggaattaggtatttggttagagtgtggagagttaggagttatgtaaggttgatattttttttttttttttttttttttttttttttttttttttatttatggtttaggaggtggggtgttttaggtataatttagatttaaatgtggttatattttaagtttatgttttattttttttagtgtttaggtttgtgttttttttgtagtttttagattgtttttgtgtggttgtgtatgtttgtaattttagtgttttggaggttgaggtgggaggattatttgaggttaggagttggagattagtttgggtaatatagttattttgtttttataaaaaatttaaaaattagttaggtatggtggtttatgtgtgttattttagttttttggaagttgaggtagggggattttttgagtttagtagtttgagtttgttgtgagttatgattgtgttatggtattttagtttgggtgatagagtgaggttttgttttaaatttaaaaaataaaataaaataaaaaaatttttgagattgagttttgtttttgttgtttaggttggggtgtaatggagtgatttgggtttattataatttttgtttttttggtttaagtgatttttttgttttagttttttgagtagttgggattataggtatgtgttattatgtttggttaattttgtatttttagtagagatggggtttttttatgttggttaggttggttttaaatttttgatattaggtgatttgtttgttttagttttttaaagggttgggattataggtgtgagttattgtggttaattaaaaataaaatttaaaaaaaaaatttgttttgtattttttttagagttttttatatttttgttatggaaaatgaattataatataatttgaggatgtattgagagaattgttggaggagataggttagttgaggtgataagttaggggttttttgtaggattttaatttgtagataataagtttaggtagtaaatttaatgttgagggttgattgattgaatgggtattgttatttgttaagttattttaaatatgagagtgatttaatttatatttatttattttatgaagtagggttttgttattttttttaaatatttaggtagttttttgtatttagaggagaatttttttttgaattttttgtttttttgattttggagggagggaaggtagtttttattaatttggtagtattgatttggtagaagtagtttgggttggggttggggaggagaagttttgtttgtttgtgtgttggatgggtggaatttggtattggtttaagtgggttattttagttttagttgaagttgaagttattagtatatttttggtttttttgttggaaattaggttagtataggttgttatttttgattgtaatgtgagaaatagagatgtttttttttttattgttgtgtttagataataaaggatgatttttatatgagttttaaaaatagaattatggaattatttttttttttatttgttttgtgtgagtttattaaaattatatttaattttttgggaattgtattattagttttattttttatatagaagttttttaaatatagttgtattttagggagttggtgaaatggttggtttagtagggtttttttttgtttttggtttaatttagagtaggtttatttgttggggtaaattagaaggttttatttgaaaatgtatgtagagtttttaataaggaggttaaaagggagagagtaattgaaaagaaagaaaaagtttgtggattttttgtatgtatgtatgtatgtatgtatgtatgtatgtatgtatgtatgatgtatttgagataggttttggatttgttgttttggttggattgtagtggggtgattttagtttattgtaatttttatttttttggtttaagtgatttttttattttagttttttagatagttggaattataggtgtatgttattatatttggttaatttttgtattttgggtagtgttagagatggggttttgttatgttgtttaggttggttttaaatttttgagtttaagtgatttgtttgttttagttttttaaagtattgggattataggtgtgagttattttgtttagattttttgtatttttttggtttggttttttgttttttatgtaggtttataaaaataattttgtttttttaggggtgagttaagtgagttttaaatttattaatgagaagttttttgagttatagtgtatataattatagggggttattttggaagtgattttaaagtatattatgaaatagttttttagaagttgtttgaagtaagtaaaatgtatttgtaaataaggttgtaattgattgtagtttatttgaagaagtttgttttattttataggttgggatattaatgggtttgtaatttgtagtttggaaatttaaattattttatttatagaaagaaaattattaataatgggtaggtaattttgttggtttattaattgatgtaattataattgtgttttagattaattaatatgatatggggtattgttttttagttttttatatttataaaatatggaattttgtgaataaaataattgtaataaattgggagtatagttataggttatttggtgaaaatatgttgttttttgttaaaaaaaaataataaaatataaagtattgaaagtagataatttgaataaagttttaaatgagatatttttaaagttaagaggaatttgagtttgattttatgattataattttttttttatggttttatgttgaaatagttatatagattaagagttttaataataatttttttatatttttgataataatttttaggtgagaagttgtatagatatgtaggtaatatatttataattattattattgttttaaattgtgaataatttgaaattggattttaaaaatttagtatttttttttttttttattgatatgtgtaagttttttatgataatgtgagtggattttagatataattgaagtttttttggttgggtgtggtggtttatgtttgtaattttaatattttgggaggtgaggtaggtgggaatatttgaggttgggagtttgagattagtttgattaatatggtgaaattttattattattaaaaatataaa

SEQ ID NO: 644 - DNA, 6191 bp, Artificial Sequence
  chemically treated genomic DNA (Homo sapiens)
ttagtatatatttgttaatatagtatatatgaaggttttatttataatttttttggttaagtagaaattttggtattatttattttaataaatttttaagatattatgaaatagaattttaggttttgatattattatttgttttaggttttgaagtgttgttggataagaggggtaaaatatggttttgttttggatttaaagttggttttttatattagtaagtatattttggtattttggttattttttttggttatagtattatattgttataaaaggtagatataagtattaattagtttataggttattagataagtttagtttgattaatgtttaatatagtaattgggttattattgttatttttgtggtggtggtatatatatttagtttttgtttgggttatggtttaggattattttttatagaggttgtgagttagagttttaattgtgtagggttttaattatgttaggttatttattttttttaagaggattttattagtgtttgtttggttatatagttttttatttattaagtaatatagttattagtatattttaggtattagttaaggattataaaattaatgtgaatgttagtttttgtattaaaagtttaaaggagaaatttaaattttatatagatgttttatgaagatgtttagtaaatttatttttttttgttttttggaatttattttagtattgtgttatgtgtgtgtttagtaattttttataaaaagttttgttttttgtgatgttattagattatattgaagaatatataagttgtattatgaaggttgttgttttatatagttttaatgtagtgagaattgatgtttttatatgttgtttttttgggtatttaaagaaatttttgtatagttttataaattagttgtagtttaaattgatttgtgttgtgatttgtatatataggttatatttttttgatagaaaatatagtttaaaattaaatttgtagtttttgttaagtgaatgtataggattttattgtatttaggttttttattgtaagatttatttttgtttttattttatgttttattgttgtgttttttatttgtttttttttagttttgttttttgtgtttttatggattgtttttagtttaggtgtgtaggaagtatatatatgtttgtagagtttttatggtttttgtatttagggtatgattttaatgtatagtggttgtattgatttgttaaaataaaggaatagattattttttttaatttatagggaagttttaggttgtgtgggtagtgagtagatttgtgtttgtttgtgtttgttttggtgaaaaattttattgtttaggttgtagggtgtgagatttaggtataaatattttgttggatgaggaggaaagatgtaaggttgtttttttttagagatagtaaagggtaggtttgtagttttatttattttaggattgtgatttttgatagagttgagagattagggttgttgaattaggtttgaaggttttagtgaattttgtgaagagaggaggggtttggttgtaatatggatttagaggatatttttattgtaggagaaggaatagtggggatggggtggatttgttaaaggaatatagtttaagtttttgtagtttaaaaaagtttagttttttttggttaaagtttttgtgagtttttttggtattttttttgtgggagttataggggtagtgggatatttagtttttttaaaagtatttttatggttgtttgtgttaagtttttattttaagagttttatttttgtgaagtaatgtgttttatatattggttttaaagtatttatggttggttgtaataaatattaaggaggtttgtttttgtatttggagttgggtgtttttattttagatgattttgagggtgtttgataagatttgaaggatttttggattttagagtattattttggatgtttggtatttttgttgtgtgggtatggtgatttttttagttgttaggttagtttttgatttttgagagggttttgtagtgttgtaggggaggtggggatttgaataaaggagtagtttttttgttggtgttattatttgatgttggttttaaggtttggttagtttgtttaaagttggtataagtttgttttgtaaaataaaagaagggaaagggggaaggggattttggtatagatttggtttgatttggatataggttgggtttgtaagtttgtggggattgggtttagaggggtagtgttgggaatgttttttttggaaattaattttttagggtatttgttttttttttatgtgttgttttatttttgttggagattaggttttgtgggggttattgttgtttattgtttttggtggttgttggttttgggtttttgttgttggttttttttttttttttttgtatttttttttttttttgttttttttgattttttttttgttgtttggttttttttttttttgttttgtttttttgtgttttggtttgtgtgagttagatgtttgggtagtttttggtgtagtgtggttgtagtagtttttgttttttgtatggtgtgagtgtttgatgtggttgaggtggttggagttttgagttagttttggtggttgttgttgtttagattggatgataggttattttgttggtgtttgtttgagtttttgttttgttgttaatgttataattattgtgtatggttttttgattttgtttagtattgattgggagagttggagtgagttttttggggagtagtgatgtgattttttgggatggttggggtagtgtttttggtgttgttggttgtgttttgtttggtgagttgggttttggaggaaaagaaaggtaagggtgtgttttgttggtttttgtgttgtttttggattgtgttttggattttgtagtttgtttaattgtgtattggtgtattggtttggtgtttgtgtttttgtttgtttttttttgtttttttgagattagttgtgttgttgattgggattgtgggaggaatgggatgttttgttttttggttgggagagtttggggtgggtggaggaggagatgtgtgggatattgggttgtaggttaggtggggaatggttgttgggatttttggtgttttgaattgtttttaattttttttttttattttttttgtttagttgtgtaggattggtgttagtgggtgaaagttgggtgttggtgggtgtttggggttggggttttgtatgtgtgttttgtgttgtttttttagggtgtgatggggttttggtgtgtatttgaggggtgggtgttgtttatttgttgagattgtattgtttagggaagttgaggaaggaatttaaaaatatagtttttttttggattttgtgggataggtggttttttgagaggatttttttgtttttgttttttgtgtaggttttaaattgaagttggtgtttgttagtttggttttggtttttttttaggtttttgtgatttttgttttttagtgtggagttgtagttttgatttgggagttgggagaatttgtttattattatttgtggtttttggggaggggtggtgttggtggtggttagtttttttgttggtaaaaggtaggtggggtttgatttgttttttgggtgtagattttggttgtttgttttgtttggtgtgtttttgttttgtttatttaagagtgttttttattttttggggattttagtttttttttgggtgtttgtgttgaaagttttaggtttttttttgatggttgttttgtggagatgtttgggtttgttttatttgtagttttttggttgtgtttgggttttgtggtggagtgggatgtggttgtttggttattgtagggggggattgtgggatttttgagtggaagttttggaagtagagtttattttggttaatattatggtgttttaaaatggggtttatagtaaatttttttttaaaatttggagatttttttttttggatgtttttttttgttgtttgaagaatttgagttaattaaaatattaaatttgttttatatatatatatatatatatatatatatatatattggattgttgtttttggtttaagtgtgttaagtgtgtagatagaatatgagtgagtttggttttgtgattattgattataaatttatttgataggggaaatatgttttggaaggtttaattgtataattttaattttgagttgtgtgggttttaagagttaggtttgtatttgttgttgatgttattggtttggggagttggggtttggtgtttagtgtggttgttgggggaggggtaaggtatagaatagtggtttttagattttgttgtatattggaattatttgggattaaaaaaaaaaaaattaaaataaaaattagtgtttggtttttgtttttagatattttgatttaattggtatggggtaagatttggatttgggattttttttaatgttttttatgtgatttgttgggtagttagatttggggattattagatggaagaaggattgttaaagtttttggagatgttatttgttaatgttaagagttttttgaggatatttggaattgttataatattgttaaatataggaaagagggaaaaggtagagtgtgattttaataataaaggattttgttttttattgaaggaattggtggaaaggttttttttttgttgagtttgtaggtttgttttgtttgtttggggtgtttgggagatgtgggtttgttttggagattgttgattgttggttttgttagttaggtgttagttttgtttttgttgaagagatttttttttttattttaaattaaatttttagagtattattaaagtattatttttttttttttattggtgtttttattttttgatgttatttgtttgaatattattattagtagttggagatttgtttttgagaaaaatataaatattatttaatttgtttgtttgttttgtatttatttaaaatagaatgtttttgaagataagagagagagtaggagaatagatgttattttattatagtaatataaaagattggatttttaggggtaaattattaaaataggagatgagtttttttaatagaaatttgtttaaggtttgtgtttattaaatttagtggattttatttaagatgtattttgtttagtgggagttttgtttggttttgggatatgttaatttttagatttgttgtttttagaggtaatgattgttagatattattttatgagttttaatttttatattaagtataagaggtgtatattttttttttatgggggaaattgaggtatgaagaattaaagtgatttttttatagttggtgggaggtagatgggaaatttatattaggggtttttaattttagattttttttttaatttttaaattttattgttttgtttgagttttggttttaggagatttaaattaggtgtgtgtaaatgtttaatgttagagttggtaaggggaaagggtttagggagttggtttatgatgatgagtttgtttgaagttttaatgtgggttgtttggtagtttgtatttttgttgagttttttagttttttgttgggttattttttatagaggtagtttagtttttagtttagtgagtatggagtggagattgtttgaggggtgttgagtaaagttttgttttttataggatgaaggtgttttttagaagggatattggaaagtattttaaggtgagttgaatttttaattgagggagttttgtggaaataagtttgtttagttttatttttggagatgtttttatttagtaggtttgagttgttttaaagagaaattaaagtggggatattaatggtatttaaagtgagatttattttattttttttttttaaaggaggttagattaagaaagtttaagtttggtttggtaattgggatttttttttttattttagtttagggtgaaggtggataagttattttgattttttaggtttttgagttgttgtttttgaatttagtgaatatttattgagtgtatagaatatgttagatattttgggttaaaggttgaagggggggtgagttttaagggtttttgtttttgtttttagattgtttttaaatttggaaag

SEQ ID NO: 645 - DNA, 6191 bp, Artificial Sequence
  chemically treated genomic DNA (Homo sapiens)
ttttttagatttgaaagtaatttggaagtaagagtagaaatttttaaaatttattttttttttaatttttagtttagaatatttagtatattttatgtatttagtaaatatttattgaatttagaaataatagtttagaagtttgaagggttaaagtgatttgtttatttttattttgggttggagtgagaagaaaggttttaattgttaggttgggtttgggtttttttgatttgattttttttgaggagggagggtggggtagattttattttggatattattaatatttttattttggtttttttttaagatagtttggatttattgaatgggaatgtttttagaagtggggttgggtgggtttatttttataaagtttttttagttgggaatttgatttgttttggaatattttttagtgttttttttggagagtatttttattttgtaagaggtagggttttgtttagtattttttaagtagtttttattttatgtttattgaattgaggattaagttgtttttatggaaggtgatttaatagagggttgaggaatttggtaggaatgtagattgttggatagtttgtgttgaagttttagataggtttattgttatgagttggttttttgggttttttttttttgttagttttgatattagatatttgtatatatttgatttggattttttgaaattagaatttggataaggtagtggagtttggaagttgagagagggatttggagttggaagtttttggtgtgaattttttgtttgttttttattagttgtgggaaagttattttagttttttgtattttagttttttttataggaggagagtgtgtattttttatgtttaatgtggggattaggatttatgaaatggtgtttggtagttattatttttaagagtagtaagtttagaagttagtatgttttagaattaaataaaatttttattaaataaagtgtattttgaataaaatttattgaatttgatagatataggttttaaataaatttttgttaaaagagtttattttttattttaataatttgtttttgaaaatttagttttttatgttattgtaatggaatagtgtttgtttttttatttttttttttgtttttaggagtattttgttttgagtgaatgtgggataaataggtaaattaagtggtatttatattttttttaggaataaatttttaattattaatagtggtgtttaaataagtaatattaaagaatgagaatattaatggagggagaaaagtgatgttttggtggtgttttgagggtttaatttaaaataaagagaagagtttttttggtagagatagggttgatatttgattaataggattggtagttagtagtttttggagtaggtttgtgttttttgggtattttaggtaggtaggatgggtttgtaggtttagtagagaagaaatttttttattagtttttttaatgaaaagtggaattttttattattggaattatattttatttttttttttttttttatatttggtaatattgtaataattttagatgtttttaaagagtttttagtattggtaagtaatatttttggagattttaataattttttttttgtttagtgatttttaaatttggttgtttaatagattatatgaagagtattaaaaaaaattttaagtttaggttttgttttatgttaattaaattagaatgtttgggggtgggagttagatattggtttttgttttgatttttttttttttaattttaggtaattttaatgtgtagtaaggtttgggaattattgttttatgttttgttttttttttaatgattgtgttgggtattaaattttaattttttaagttaatgatattaatagtaagtatgggtttggtttttggaatttgtgtagtttaaggttggaattgtgtaattaaattttttaaggtatgttttttttgttaagtgggtttatggttggtagttatgaagttagatttgtttatgttttgtttgtatatttggtatatttgaattagggatagtaatttggtgtgtgtgtgtgtgtgtgtgtgtgtgtgtgtgtaagataggtttaatattttggttggtttaaattttttaaatagtaaaaagagatatttaagaaagaaagtttttgggttttgaggagaagtttgttgtgagttttattttgaaatattatggtgttggttaggatgagttttgtttttggggtttttgtttaagagttttgtgatttttttttgtagtggttggatagttgtgttttgttttattgtgaagtttaggtgtgattgaagggttgtaggtggagtagatttggatgtttttgtgaggtggttattgaaggagagtttggggtttttggtgtgggtgtttaggagggagttggggtttttgggaggtggggggtatttttggataggtaagatgagggtgtattgggtgaggtgagtggttggggtttgtgtttaaggggtgggttggattttatttgttttttgttaatgaggaaattaattgttgttagtattatttttttttgggagttgtaggtggtggtagatgagtttttttagtttttaggttgaggttgtgattttatattggggaatgaggattgtggggatttggagaggggttggggttaggttggtgggtgttggttttagtttgagatttgtgtggagggtggaggtggggaggtttttttagaaagttgtttgttttgtggggtttgaggggaggttgtatttttgggttttttttttagtttttttaaatagtgtagttttggtgggtgggtagtgtttgttttttgggtgtgtgttaggattttgttgtgttttgggaagatagtgtggggtgtatgtgtgggattttggttttaggtgtttattagtatttggtttttgtttattgatgttgattttgtgtagttgggtggggaaagtgagggaagaaagttgggagtggtttggggtgttggaggttttggtggttgttttttgtttggtttgtagtttggtgttttatgtgtttttttttttgtttgttttagatttttttggttgaagaatgaaatgttttgttttttttgtggttttggttggtggtgtagttgattttaaggaaataggaaaggatgggtgggggtgtgggtgttgagttggtgtgttggtgtgtggttgggtgggttgtggggtttggggtgtgatttgggggtggtgtgggagttggtgagatatgtttttatttttttttttttttagagtttgatttgttgggtagagtgtagttagtagtgttaggagtgttgttttggttgttttggagggttgtattgttgttttttgaagagtttgttttggtttttttgattaatattggatggagttagggggttgtgtgtggtggttgtggtgttggtggtgaggtggggatttgggtggatgttgatgaggtggtttgttgtttggtttgggtggtggtggttgttggggttagtttgggattttggttgttttggttgtgttgggtgtttatattgtgtggggggtggaggttgttgtggttgtgttgtgttgggggttgtttggatgtttagtttgtgtgggttgaggtgtggggaggtagggtgggaggaggagggattaggtggtggaggagggattgggaggagtagaggaggaggagaatgtgaggaggagggaggagaattagtagtggggatttaaggttagtggttgttggaggtggtggatagtggtggtttttgtgggatttagtttttggtgggagtggggtggtgtatgggaggggagtgggtgttttgaggagttaatttttgagaggggtgtttttagtattgtttttttggatttggtttttgtggatttgtaggtttagtttatgtttaggttgagttaaatttgtgttagggtttttttttttttttttttttttttgttttataaagtaaatttgtattagttttagatagattggttgagttttagagttagtgttggataatggtattgatggggaaattgtttttttatttgggtttttattttttttgtagtattatgggatttttttggggattagaggttggtttggtagttgaggaggttgttgtgtttgtgtggtaggggtgttaggtgtttgaggtggtgttttaaagtttgagggttttttagattttgttaagtatttttgaaattatttgaaatgagggtatttaattttgggtgtagagataggtttttttaatgtttattgtaattagttatgggtattttgaagttaatgtgtgaagtatattattttgtaaaagtgaagtttttggaataaaggtttgatataaatagttgtggaggtgtttttagagaggttaagtgttttattgtttttgtagtttttgtaggagaaatgttagggaaatttgtggaagttttggttaaaagaaattgagtttttttgggttgtaggaatttgagttatatttttttggtaagtttattttatttttattgtttttttttttgtagtaaaaatgttttttaggtttatgttatagttagattttttttttttttatgagatttattaggatttttaggtttggtttaataattttgattttttggttttgttaaaaattataattttgaagtaagtgaagttatagatttgttttttgttgtttttgaaggggagtaattttatattttttttttttatttagtaaaatgtttgtgtttgggttttgtattttgtagtttgaatggtggggttttttattagggtaagtgtagatagatataggtttgtttattgtttgtataatttggaatttttttgtgaattaggagaagtaatttgtttttttgttttaataaattagtatagttattgtgtgttgaagttatgttttgaatgtagaggttatgaaggttttgtaggtatgtgtgtgttttttgtatatttgggttgagagtagtttgtagaaatatagaaaataaaattagagaaaggtaaatgggaagtataatagtggaatataaaatgaagataggagtgagttttataataaaagatttgaatataataaagttttgtgtatttatttaataagggttgtaaatttggttttaaattatattttttgttaagggaatgtgatttgtgtgtataagttataatataaattaatttaagttataattgatttgtaagattgtataggaatttttttgagtgtttaaaaagatagtatgtaagaatattagtttttattatgttaggattatatgagataatagtttttatagtatggtttgtatattttttaatgtgatttgatagtattataagaaatagagttttttgtaaagaattattagatatatatatagtataatattgggatggattttagggaatagagaagaatgggtttgttgaatatttttatgggatatttatgtaaagtttgagttttttttttgagtttttgatataaaagttgatatttatgttgattttgtagtttttggttagtatttggagtgtgttgataattgtgttatttggtaagtaaaaaattgtatggttgagtaggtattaatgaagtttttttaagagagataagtagtttggtatagttagggttttgtatagttagggttttagtttatagtttttgtggagggtggttttagattatggtttggatagaggttgggtgtgtgtgttattattataggaatgataatagtggtttagttgttgtgttaagtattggttagattaagtttatttgataatttgtgagttggttaatatttgtatttgttttttatagtaatgtgatgttgtggttgggagaagtgattaggatattaaggtatatttgttagtatgagaggttaattttgaatttaaggtagagttgtgttttattttttttgtttagtaatgttttaaaatttgagataaatggtgatgttaggatttaaaattttattttataatgttttggaaatttgttagggtgagtaatattaaaatttttgtttggttaaaaaaattatagataaagtttttatgtatgttatattagtaagtatgtattaa

SEQ ID NO: 646 - DNA, 6171 bp, Artificial Sequence
  chemically treated genomic DNA (Homo sapiens)
tttagttatattggttgttttgatgttttttgaatatggtaggtattattttattttagggtttttgaattggtatttttttttgtttggtatgttttttttgtagatattaaggttttttttgtttttattgtgaggttttaatttaagagttattttttttatgtttaagattttaattatttttaatatttgatttttatttgttttattttattatttttttttagtatttgtttattatgttaattttatttatttattttgtttatatagtttgtttttttagtttgggtttttttttttttttttttgagatagagttttgttttgttatttatgttggagtgtatggtgtaattttggtttattgtaatttttgttttttgggtttaagtaatttttttgttttagttttttaagtaattgggattataggtgtatgttgttatatttagttaatttttttgtattttagtagagatggggttttattgtgatgtttaggttggttttgaatttttgagtttaggtaatttatttattttagttttttaaagtgttaggattattggtgttagttattgtgtttagtttttttaatttttaataaatgttagttttataagtataaatattttgttttgttttgttttttgttatattttagtatttagaagagtgtttggtatttataaggggtttagtaaaggttggttgtaggaatagttttaattaattagtttttatattttttttttttttttatgtgatttttatattggtgttttaaattattttttttttatttatttatgggataaatttttattgagtatttgttgtttatttggtatatttttagttgttggagatatagtggtgaatgagtagataaaaattgagtttttatgggatttatattttaatgaggagagatagataataaataagtaatttatatagtgtgttagatagtgataaagggtaatgggataaattagggatttggtttgagttttgttgggtgtgtagttttagatggttagggaggggttgattttttttgtttttataagtagtattgttaggaattttttttttatatatgtgtttttgtatagtatattttaagtattatggtgtgataattaatttttaatgaaataatattatttaggtataataaaattaaattatttttagaaatattttttatgtttgtgtttttaagagagtgtattatatatattatagtggttgttttttgggttttttttttttagaaaaagggattttgttatattgtttaggttggtttggaatttttgggtttaagttatttttttattttagttttttgagtagttgggattataagtgtatatttttgtgtttagttatatattatagttttgtgaatatatttttttaatgtaataatatagtttttatttatatatataattagtatttttagaaatagtttttatatttatgtttttatagagtatattatgtattttagttttgtgaatatatttttttgaaaaggaggaaaatttttatttatatataaattggtatttttagaaatattttttatatatgtatttttttatattgtattttatatattatagtgtggtaaatattttttgggggttggtatttgaatagagtgttgaaaggaattatgtagagatttgggggtggtgtttaaggtataaagaatagttaatgtaaaggttttgaggttggtttatgtttgttatgtttgaggagttgtgtggtggaattagtgtggttggagtatagtaagggggtgggaaggtataggtggtaatgttagaaaggttatttgttttattattaatttatagttaatatttatttatattggaagggattttagttttgattttttattttataaatgaagaaaaaggtatagagaggaagtggttaaattatttatttaaggttatatagttgttgggattggggggtgggtgggtgttgagagaaggtgaggaatgaagattgttttgtaggtagagggaatagtaagaataaaagtttggaggtgagaattaatttggtttttaaggattgaggttttatgtggggtgggatgagatttaagaggggagttttaaaaattattttgtgttttgagtattttttgggttatttttgagtaaggaatttaatttttttatggtttaatttttttattatttattttatggggttgtggtgaggattaaaggaatttatttatatgaaatattttgtttgatatatggtaggtgtttaataaatgttagtttttattggtattattattattattggtgttaatgtatttatttattgtagtgaggtagaatgtttttgtggttatgagtgtgattaggttgatttattattaagaggtggaggatagggaaggttgtatagtgttttattataaggaaaagaggattagtatgtttttttttgggaagggaaaaaaaaagagaaggaaattgaaagtatatggttgatttttttttaattataaagtattggatttatgggagggtatgtgggggattgtgtaagtatataggggtgtgggggaggaaggttaatgaatagatttattgtaaagggaggggtgatgaggtttattgtttgaggggaaggggagtagaaaattttatagatttttgtattatagtgagaggagagaaaagttattatatagattgatttaaagtagagagggaaaaggttatggattgagttattgaaaatagggagatgtaaagtattaaattaatttattattaaaaaggagagaattttaagtgttagagtgatagtttatgaaaaagaggagatagggtaatggattgatagttaaagggatgtgaatttaaatatgaagattgatttattataaaatggtggtggtggtggtggggggggggggtggttttgaaaaaagttatggattgatgtattgggggattggaggaggtaggaatataaatttaggtagatttattgttaaagagggatgtggaggagtgtggtgttatggattgatttgttatgatgtataggaagggtggaataaataaggttatggatgggttttttgaaagttgaggttaggagaaatttaaatatttagatatatttattattaagggggttgaatattgttataggttagttttttataagtgggggtgggtggggggtgggtgggggtaggggtagggggaaagtttatggatgagtttattttaagttggtgtggggaaaaatataagtatgtagattgatttattatataatgggagggggaggttaggttatggttagatttattataagggatgaagggtttgagtaatgttatatgtaggtttattagttgtggtggtggtggtggggagttgaatattagtaggttattggttaagttatattttttgtgtgggggtgggaaggatatgtggggttatggattgggttttttattttttaggtttagagtttatttgtgtgtagtgtggtggtggtgttggtaatgttggtagttttggggggtgggggttttatatgtggttttattgttttttaggtttgggttttgaggtggtggtggaggtggtggtggtggtggtggtggtagtatttagaagttgtttttgtgtttttttatagtttatgtgggtttgaggaggaggagtttaatgttttgttgtttgttgattggttaaagtgttattaattggttgtaaggttttgaggggttgggggatgggtttttttttatagagttgtgttgtgattggtgtaaggggaaatgatggaatgtttatggtttttggagttttgaggaggtgtgtttggtttttatggtgttttatgttgattggtttaaggattgatggattgtgagtaattgaaaaggtttggggtttgtgttgggggggtgggggtttgttttatattgattggtttatatgggattgatggaagatagtttttaaggatgggggtgggtggttttgtttttttttgattggtggatgagggatttttagatttttgttaaaatattaagggggtggtgttgtatgttatgttgtttagtggaagtagggtttgtatagaaatgggtgtagtagttggtgggagtgggttggattgggttttgtgtaggtgggtagggtagttttatggttagataagattatagagttgggtaaagatgaatttagaatatagtggaggtaggagggtaggatggttgttaggtatatgaaagagtattgagtggtagaaatgaaatgtttttagagggtagggttgaattgtggttagagttaaaaaggggaggaatttggttttgtattgattggtggtggttggatttaatttagaataggggtttgattagggagagtgggatttaggtttgtgtttattggaagttggaatatttataagtaggggttaagataaggtagggttgagttagggtttgggtgtaatttggggtatttggggaatgattgggtgtgtgaaagtgtaaattttagggttttttgattgttgtgggaatgaataaatttttattatgaattggtttattttttatggtaatttaaagggtggtgtttaggaaaaggaatggaagaaagggtgaggtggggggtttaggttgttaagatgatagaagagagggtagtgtataaggttaattggtaaatattgttaggtaataggttggaggtaggattgttggggtattttggaggttttatagagagattggatttttgggttttttagtaattttgtgttttaggaataggtttttgtggtaattagtagggtttatggggaaaaagaagggttatgtgatttaaaggtatttaggttttttaatgtttgaggatggggggaagaagttaatggtgaggtttttttgggaaattttgtaggttttgtagttttttaagtttttgaaaaagaggatagaagagattgaataaagattgggtttgggttatgtttttaggtttgttttgattttttttttttgattttagtttagagggaaagatggtttttttttttttttgtttttttttttttttaggttattattttaaatatagagtttggtagtggggtgagttgtttttatttttagtaatatgtggatatgggttttgatatttatggagtttttggtgaggttgttgttgagtttagagaaaagaaataagaaagggtaaaatgggttttatatgattatgatgatttttttttattattttaagatttatttatattttggatgatttttatttggtttatttttatgtggaaatgttaagttattatttggtttttattgatttaaagattattaaatgtttattgtatgttaggtaattttaggtattgggagatagtagtaaatataataaataaaatttttggtttgatggattttaaatttttgtaaagaaagatataataaaaaattaatggaataaaagttatgtgttagatggttttaattataataataaaaattaaaaatgagagataataaggagtataggagtggggggttgtaattttaaagagggtttagggatggttttatggagaagtatttgagtaaagatttaaagatagtgaattttgagtagtgtggttatatggaggatgtgttttatatataaggggtagtaaatataaaggtattgaggtgggagtgtgtttggtatgtttgaggtgtagtaaagaggttattttggttggagaagaataagtgaagggggaatgtaagaggtgaggttagagaggtaatgagggagataaattgtgtgaagtttataaggttatggtaaggattttggttttgattttaagtgagatgggagttaagggaaggttgtagtagaggaaggaggttgaattatatgaattagttagttgattttttttttttaagttagtttggattagattttgtttaaaagaattttaattgatataaagggttaaggaaggttttttttaagaatgaagaatgagaaggaattgaagaatgtttaatggttaagtagtaggaaggttttttttataaaa

SEQ ID NO: 647 - DNA, 6171 bp, Artificial Sequence
  chemically treated genomic DNA (Homo sapiens)
ttttgtggaaaaggtttttttattgtttaattattaggtattttttgatttttttttattttttatttttgagaaaggttttttttgattttttatattaattaggatttttttgggtgagatttgatttaaattggtttagagaaaaggagttaattgattggtttatgtaatttaattttttttttttgttgtaatttttttttggtttttattttatttaaggttaaagttagggtttttattatggttttgtaggttttatatagtttgttttttttattatttttttgattttattttttatattttttttttatttatttttttttagttagagtggtttttttgttgtattttaaatatgttaggtatatttttattttagtgtttttgtgtttgttgttttttgtgtgtggaatatattttttatatagttatattatttaaaatttattgtttttaagtttttatttaaatgtttttttgtgaagttatttttgagttttttttaaaattgtagttttttatttttgtattttttattgttttttatttttaatttttgttattgtagttagaattatttgatatatagtttttattttattggttttttgttatgtttttttttataagaatttgaagtttattaggttgggagttttgtttgttgtgtttgttgttattttttagtgtttaaaattgtttggtatatagtaggtatttaataatttttgaattagtgaaaattagatggtggtttggtatttttatataggaatgagttaggtggaaattatttaggatataagtagattttgaagtgataaggaagggttattataattatgtggggtttattttgtttttttttgttttttttttttaggtttagtaatagttttattaaggattttatgaatattaaagtttatatttatatgttgttagaggtgagagtagtttattttattattagattttgtgtttagggtggtgatttgaagaaggaagagagtgaaagaagggaaggattatttttttttttaaattggagttaagggagggaggttagagtaagtttgggggtgtaatttagatttagtttttgtttaattttttttgtttttttttttaggggtttagagaattataaggtttgtagaattttttagagaagttttattattgattttttttttttatttttagatattaaagagtttgaatgtttttgagttatatggtttttttttttttttataaattttgttagttgttatgggggtttgtttttagggtataaagttattgagagatttagagatttagtttttttgtggaatttttaaaatgttttagtagttttgtttttagtttgttgtttggtagtatttgttagttgattttatgtattgtttttttttttgttattttggtaatttgggttttttattttatttttttttttatttttttttttagatgttattttttgaattgttatagagaatgggttaatttatggtggaggtttgtttatttttataataattaaagggttttaaggtttatgtttttatatatttaattattttttaggtattttaaattatatttaaattttaatttagttttattttgttttagtttttgtttgtaagtgttttagtttttaatgggtatagatttggattttgttttttttagttgggtttttattttaggttgagtttagttattgttaattaatgtagagttaggttttttttttttttaattttggttgtagtttaattttgttttttgaaagtattttgtttttgttatttaatgtttttttgtgtgtttgatagttattttgtttttttatttttgttgtgttttaaatttgtttttatttagttttatggttttgtttaattgtagagttgttttgtttgtttatgtggagtttagtttgatttatttttgttggttgttatgtttatttttatataagttttgtttttgttgagtagtatggtgtgtgatattgtttttttggtgttttggtaggggtttagaagttttttgtttgttaattagagaaaaatagggttatttatttttgtttttgggggttgttttttattaattttatgtaagttaattagtgtgaggtagatttttgtttttttgatataggttttgagtttttttagttgtttatagtttgttagtttttgagttaattggtgtggagtattgtgaaggttgaatgtgtttttttgggattttaggggttgtgagtgttttattatttttttttatgttaattatggtatagttttgtagggaagggtttgttttttaattttttgaggttttgtggttgattaatagtgttttggttaattagtgagtggtgggatattgggttttttttttttgggtttatgtgagttgtagggaaatgtaggggtggtttttaggtgttgttgttgttattgttattattatttttattgttgttttggaatttaggtttggggggtggtggggttgtgtatggagtttttgttttttggagttgttaatattgttaatgttattgttatgttatatataggtgagttttgggtttggagggtggagggtttagtttgtgattttatgtattttttttgtttttgtgtagaggatgtggtttggttggtggtttgttggtgtttgattttttgttgttattattatggttggtggatttgtgtgtggtattgtttaagttttttgttttttatagtggatttgattgtggtttaattttttttttttgttgtataatggattggtttgtgtgtttatgtttttttttatgttaatttagggtggatttgtttataggttttttttttatttttatttttatttgttttttatttatttttatttatagggagttagtttgtgatagtgtttagtttttttaatagtaggtgtatttgagtgtttggattttttttagttttaatttttaggagatttgtttgtggttttatttattttattttttttgtatattgtagtgaattaatttgtggtgttgtatttttttgtatttttttttaatagtgagtttatttgagtttgtatttttgttttttttagttttttaatgtattagtttatggttttttttaaaattattttttttttttattattattattattattttatagtggattagtttttatgtttggatttatgtttttttagttattagtttattgttttgtttttttttttttgtagattgttgttttagtgtttggggtttttttttttttaatagtgggttagtttagtgttttatatttttttatttttagtagtttagtttatagttttttttttttttgttttgaattagtttgtgtgatggtttttttttttttttattgtggtgtaggagtttgtaaggttttttgttttttttttttttagatgatgagttttattatttttttttttgtagtggatttgtttattggttttttttttttatatttttgtatgtttgtatagttttttgtatatttttttgtgagtttagtgttttgtaattgggggaagattggttgtgtatttttaatttttttttttttttttttttttttttagaagagaatgtgttgatttttttttttttgtgatggagtattgtatggttttttttgttttttattttttaatagtgggttagtttggttatatttgtaattataaagatgttttgttttattataataagtgaatatattagtgttagtgatgatagtaatgttaataggagttagtgtttattgagtatttgttgtatattaggtagagtgttttatatgaatgagtttttttaatttttattataattttatgagataggtagtgagggaattgggttatagggaggttaaattttttatttaaaggtggtttaggaagtatttaggatataggataatttttgaggttttttttttagattttattttattttatgtgaggttttagtttttaaaaattaaattagtttttatttttaagtttttgtttttgttgttttttttgtttgtagagtagtttttattttttatttttttttagtatttatttattttttaattttagtagttgtgtgattttagatgagtgatttaattattttttttttgtgtttttttttttatttgtgaaatgggggattagaattagaattttttttagtgtaaataaatattaattgtgaattaatggtaaaataagtaatttttttagtattattgtttatatttttttatttttttattgtgttttaattatattggttttattatatagttttttaaatatagtaggtatgggttagttttagggtttttgtattggttgttttttgtgttttgaatattatttttagatttttgtatggttttttttagtattttgtttaaatattaatttttaaaggatgtttattatattgtggtgtgtggaatgtagtataaaaagatatatgtatgaaagatgtttttaagaatgttagtttatatatgagtaagggttttttttttttttaaaaggatgtgtttataagattgaggtatgtaatatgttttgtaaaggtataggtataaaagttgtttttaagagtgttagttgtatatgtgaataaggattgtgttgttgtattgaaagaatgtgtttataaaattgtggtgtgtagttgggtataggggtgtgtatttatagttttagttatttgggaggttgaggtgggaggatagtttgagtttaggagttttaggttagtttgggtaatatagtgagatttttttttttgaaaaaaaaaaatttaaaaaataattattgtggtgtgtgtaatatatttttttaaaggtataggtgtaaaagatgtttttaagagtgatttgattttgttgtatttgggtagtgttattttattaaaggttgattgttatattatggtatttagaatatattatataaaggtatatgtataaaaaagaagtttttaataatgttatttgtaaaaataaaaaaagttaatttttttttgattatttgaagttgtatatttagtagggtttaagttaggtttttgatttgttttgttgttttttattattgtttgatatattgtgtgggttatttgtttgttgtttgtttttttttattagaatgtgagttttatgaggatttagtttttgtttgtttatttattgttatgtttttagtaattgaaaatgtattaggtaaatagtagatgtttaataagaatttattttatgaataaatgggaaaaagataatttgagatattagtgtaggggttatatgaggaagaagaagggatatgagagttaattagttgggattgtttttgtaattaatttttattgagttttttgtgagtattaggtatttttttaggtgttggaatatggtaaggaatgaaatagggtgaaatatttgtgtttgtggagttgatatttattaaaagttggggaggttgggtatggtggttaatattagtaattttagtattttgggaggttgaggtgggtggattgtttgagtttaggagtttaagattagtttgggtattatggtgaaattttatttttattaaaatataaaaaaattagttgggtgtggtggtgtgtgtttgtaattttagttatttgggaggttgaggtaggagaattgtttgaatttaggaggtggaggttgtagtgagttaagattgtattatgtattttagtatgggtgatagagtgagattttgttttaaaaaaaaaaaaaaaaaaatttaagttggggagatagattatgtgaataaaataaataagtaaaattagtataatagataaatgttgagaagaaataatgaaatagggtaggtaggaattgagtattgggggtggttgaaattttaggtatagggaaggtgatttttgaattagggttttatggtagagatggagagagttttaatgtttatgggaagagtatattaggtagaaggaagtgttagtttagaggttttgaggtgggatggtgtttgttatgtttaaggaatattaaggtggttagtgtggttgga

SEQ ID NO: 648 - DNA, 6249 bp, Artificial Sequence
  chemically treated genomic DNA (Homo sapiens)
aatgataatatttgttttttttggagttttggggatttagtgttttgaggaatgtggttgtaggttagagtggtatagagtagggtttaatgaagtatggtgtttatagtagtttttttgattggattaatttttttggatataatagtagggtaggggtggggtttggggagaaaggatatttttaattttgattttaatattttgatggtttttaaggttgtttgtatatttatttaggtgtaagttttttaaggtgtggtgtgatgaattagtgatttttggagttaggttagtgtattttttttttgtagggttgtaagttgtaggattgagaggtaggttgattaggttttgggttggatgatggggtgagagtaaggggttagttttgatatatgtttaatttttttttttagttttaagatattttgggtaaattgtttattttagtttttttgatttttattttaattttaatattagtttaagagaaaatagggatattgatggttatttagaagggttgttgtgttttatatatagtaatattttttgaatgtttgtgatagtggtttaaggaataagttaattttatattattattttggatatttgtataaaattttattttatttttattatatgaatgtgttagggttgtttttttgttttgttttttttttttttttttgagatagagttttgtttttgttgtttaggttggagtataatggtgtgattttggtttattgtaatttttgttttttaggtttaagtgatttatttgttttagtttttttgagtagttgggattataggtatgtgttattatgtttggttaattttgtgtttttagtagagatagggtttttttatgttggttaggttggtattaaatttttgattttaggtgatttatttgttttggttttttaaagtgttgtaattataggtatgagttattgtatttagttgtgttagggtttttttttgtttaattttttttttttttttgtttttttttttttttttaatggagttttattttgttatttaggttggagtgtagtggtaagattttagtttattgtaatttttgttttttgagtttaagtaatttttttgttttagttttttgagtagttgggattataggtgtttgttattatatttagttaatttttgtatttttagtagagatggggttttgttatgttggttaggttggttttgaatttttgattttgtgatttgtttgttttggttttttaaagtgttgggattataggtatgagttgttatatttggttaattttgtattatttttttaaagagagttttttaaattatataagttttaggttttataaaatttagatttgttttagtataattaaatttgggattatttattgagtaattattatgtgttaagtattgtgttgagtgtttttagagtattattttttttaattttagtatagtatgttagatgttgttttatagatgagttaattgagattagagatgtttagttatttgtttaaggtgatatgattgatatggaatagagttaagatttttttttttttttttgatatggagttttattttgttttttaggttggagtgtagaggtgtaattttagtttattgtaagttttgttttttaggtttatgttatttttttgttttagttttttgagtagttgggattataggtatttgttattatatttggttaattttttgtatttttagtagagatagggttttattgtgttagttaggatggttttgattttttgattttgtgatttgtttgttttggttttttaaagtgttggaattataggtgtgagttattgtgattggttagatttaagatttgaatttaggtttttttggttttagaggtttttgttttttaattttttaggatggtatagtaatttgttttataagaggtgtttgttttaagtgtgtttagtatatggaagtaagtttagaaatgtaagtgtatatttgtaaagaggtgtgggagatgggggggagggaagagagaaagagatgttggtgttttttattttttagtttttgataggtgtttttgatttttttttgattagtatagttgtatttttggttggggtattttaattagaattgttaaatttagtatataaaaataaggaggtttagttaaatttgaattttagataaataatgaataatttgttagtataaatatgttttatgtaatattttgttgaaattaaaaaaaaaaaaaaaagttttttttttatttttatttttattattaggtttaaggaatagggttaggggttttaaatagaatgtggttgagaagtggaattaagtaggttaatagaaggtaaggggtaaagaagaaattttgaatgtattgggtgttgggtgtttttttaaataagtaagaagggtgtattttgaagaattgagatagaagtttttttgggttgggtgtagttgtttgtggttgtaattttagtattttgggaggttgaggtgggaggattatttgaggttgggagtttaagattagttttattaatgtggagaaattttgtttttattaaaaatataaaaaattagttggttatggtggtatatgtttgtaattttagttgtttgggaggttgaggtaggagaattatttgaattagggaggtagaggttgtggtgagtagagattgtgttattgttttttagtttgggtaataagagtaaaagtttgtttaaaaaaaaaaaaaagtttttttgatgtgattgtttttttttaaatttgtagatttttttaagattatgttttttagatattttaaagattttagaagatatgttttgggggttttggaagttataaggtaaatataatatatttttttttttgattattaattttattagaggatgtggtgggaaaattattatttgatattaaaataaataggtttgggatggagtaggatgtaagttttttaggaaagtttaagataaaatttgagatttaaaagggtgttaagagtggtagtttagggaatttattttggattttgggggagggggtagagttattagtttttgtatttagggattttttgaggaaaagtgtgagaatggttgtaggtaatttaggtgttttggtgttaggagggatgtatttaggtttgtgtgaagagagggagaaagtgaagttgggagttgttatttttagatttgttggaatgtagttggagggggtgagttgggagtgtgtttgtttttaattataggagaaggaggaggtggaggaggagggttgtttgaggaagtataagaatgaagttgtgaagttgagatttttttttattgggattggagaaattaggggagttttttgggtagttgtgtgtttttttttatggggttttttattgtgttgtgtgtttggtttttattttttgtagtattttgtgttttgtgtttttttagttgggtttagttggagttatggggttggagttgtagtgagtattatggagttggtggttttgtgttgttgggggtttttttttgtttttttgttttttggagttgtgagtatttaaggtgggtttggtgtggggaggggatggagtagtggtgggattttgttttgtggatgttttgttgaggttttgtggttggtggggttagaggggtttggatgagtttttttattttgaagttgtggatagttgagatgtttagggtagttgggttttggggtttttgggtgggagggggtagttatatggtagtggtttgagatggtttatttaagagattggtgttttttaggttttgaggggttttgggaatttgttaaagaagttttttgaaattgtttagaaagtttttttgtaaagggtgtattgtgtagagtgtgtgtgtgtgttttttttttttttgagtttttttaagtttttttaaagtttttttagttggtagtttttgtttttggattggtttgggttggattttttgggggggttttttgttttgttttttttttagtttttttttgtttttttttagatgattttggtttggttgtttttgtttttggtggggttgggtgtgtgtgtgtgtggtggagtggagggtggtatagtaatttgttttaattagagttggggaggaaagggtggtttggagggtggttttttgttggggtttgggttgggggtgggggagatgtttgttttgaatagatttttggggttagtttagggattgtgttttgtgatttttggagtgtgtggattatggaggggtgggggtgggttttttggggtgtaaagtgggagagtttttagagaaggaagttaagaaataaggttagatgggagtttagggagggttgtgttgttttgttgttttttttttggtgttgtgtgtggggaagggtgagtgggggtagtgtgtattttgatttatttgtttatttgtgtgtattaattataaaagttaatatatagtttgggttaggtatattttgttaggaattgtttgtggtgttttgtatgtatttttttttaattttagaatatttttatagtggaagttttgttagtattttggattgagtagtagtttagaggttgagtagtagttagtaagtggtggggttaagatgggattttaggtagtgtgatttttaattatgtatttgaaattgttatatggatgagtgtatttggagtaatgagggatattgttttttgagttattgggttgtaggggagataaaatgaaagtgttttgggagttgtgggtggtttttataggttagagggtttggggagggagtgggtgttattgtggttgtgtgttgtttgaggggttttttgtgagtgagtgtatggttgtgttatttttgtaggtttatgttagggtgttttttagttgtgtggtttttgtatttgtgtgtttgggttttgtgttgttaaatagtagtttttttgttgatttggggatataggttgaattttgttttttgtaggaatttttttaaggtgttgggttagatttgttataaatagagggaggtagttttttatggttatgtttttttgttgaggaagaaggttttttttttttagggagtatatttttgttttttttgttttttagataagtatttttattttttattttttgatgagaagggtgaggttatattgagttgttaggttgagttgttgtttttttttattttgggttgggagttgattagggaatggtagttgttgtagagttggatttgagggttgggttttttggatggggtttttttatgtttttattttttaatttgtattattgattgtgttgtgtaggagttagttaaaaagttattgtatagtttgggtaataaggtaaaattttgtataaaaaatataaaaattagttggatgtgattatatgtgtttgtagttttagttattttggaggttgaggtaggaggattatttgagtttaggaagttgaggtttgtagtgagttgtgattgtaaatgttttttagtttgggtgatagtgtgagattttgttttagaaaaaaagtatattatttagttgtttttagtatttagattttatttaaggggtgaggtttggggtaggaatgtgggggaaggggaggtttagggggagttttagaggggttaggatttttttgaaatttttttttagaggtatgggttttataaattgtagtaaatatatttttttaattttgtagaatttttttatattttaattttagtatgatttttttaatagttttttttttttattatatttggggaaagtatttattttatttgttaagaaaaaaataattgaaaagatagggattaaatgtaaaaagaaaaaatatgtggtattttaaagttaaatataaagtatgtttaatttttttgtggtttgggattatttatatttttgttgtatgaatttgttttgttttaatttttaagaaatgtatggtgtattttttatatgttaggtttttatttatgtttttatttaatttttgtgatagttttgtgaagtaggtgtatagatgagaaaatggaagtttagagaaatgaagtaatttatttaaggtttttagttatttagtaatgtttagggaatttttggattttgaagaggaggtattaagaggtggttagagttt

SEQ ID NO: 649 - DNA, 6249 bp, Artificial Sequence
  chemically treated genomic DNA (Homo sapiens)
agattttaattattttttaatgttttttttttagagtttaaaaattttttggatattattgggtagttgggagttttggataagttgttttatttttttgaatttttatttttttatttgtgtatttattttataggattgttatagagattaaatgaaagtatggataaaaatttagtatataggaagtatattgtatattttttaaaagttaagataagataggtttatatagtaggaatatgggtaattttaaattatgagaaaattaaatatgttttgtgtttgattttggaatgttatgtattttttttttttatatttgatttttatttttttaattgttttttttttgataaataaaatgagtattttttttaagtatagtaaagagaggaggttgttggaagaattatattggaattaaaatatgaaggagttttgtaagattaaaaggatgtatttgttgtaatttgtaaaatttatatttttaagaaaggattttagaaaaattttgatttttttggggttttttttaggttttttttttttttatatttttgttttagattttattttttgggtaaaatttgggtgttggaggtagttgggtggtatattttttttttgaaatggagttttatattgttatttaggttggagagtatttgtaattatagtttattgtaagttttaattttttgggtttaggtgatttttttgttttagtttttggagtagttgggattataggtatgtgtaattatatttaattaatttttgtattttttgtatagagttttgttttgttgtttaggttgtgtaatgattttttaattaatttttgtataatataattaatagtgtaggttgaggggtgaggatatgaggaggttttatttagagaatttagtttttaaatttagttttgtagtaattgttattttttgattaatttttagtttaaggtgaggaagggtagtagtttagtttgatagtttagtatggttttattttttttattagaagatgagaggtgaagatgtttgtttgggaaatagggagggtaaggatgtattttttggaagagaggaatttttttttttagtaagaaggtgtggttatagaaggttatttttttttgtttatggtagatttggtttagtattttaagggagtttttgtagaggatagagtttagtttgtgtttttaagttagtagagagattgttgtttggtaatataaagtttagatatataaatataaagattatataattgaggaatattttggtgtagatttgtagagataatatggttatgtatttatttatagagggttttttgggtaatatatagttatgatgatatttattttttttttagattttttgatttatggagattatttatgatttttagaatatttttattttgttttttttgtagtttagtgatttagggagtagtgttttttattgttttaggtgtatttatttatatagtgattttgaatgtatggttgggggttgtattgtttggggttttattttgattttattatttattagttgttatttaatttttggattgttatttagtttagaatgttggtagaatttttattataggggtgttttaggattaaaggagaatgtatgtaaaatattataaatagtttttggtagagtatatttggtttaggttatatgttagtttttatgattaatgtatataggtggatagatgggttaggatatatattgtttttatttatttttttttatgtatagtattaaggaaaaggtagtagaataatgtagttttttttaggtttttatttggttttattttttagtttttttttttgggaatttttttattttatattttaagaaatttatttttatttttttatggtttatgtgttttaaaagttatagagtatagtttttaagttggttttaagaatttgtttaaagtaaatgttttttttgtttttaatttagattttagtaagaggttattttttgggttatttttttttttttggttttggttgggataggttgttatgttattttttattttattatatatatatatatttgattttgttagaagtaggagtaattaaattaaaattgtttgaaggggagtggggaggggttggaggaggggtagggtagaggatttttttaaggaatttagtttaggttagtttggaggtggaggttgttaattggaaaggttttgagaaagtttgagggggtttaagaaggggggaaatgtgtgtgtgtgttttatgtaatatattttttgtgggaaaattttttgaataattttagagaatttttttgataagtttttggagttttttggagtttggaaagtgttagttttttggatgggttattttgagttgttgttgtgtaattgtttttttttgtttgagggttttagggtttggttgttttgagtgttttgattgtttataattttgggataggagagtttgtttgggtttttttggttttgttggttgtgggattttggtggggtatttatagggtagggttttgttgttgttttgttttttttttatattagatttattttgggtgtttgtggttttggggggtaagagggtgaggaggagtttttagtggtataaggttgttagttttatggtgtttattgtggttttggttttatggttttggttggatttggttgggagggtgtggggtgtggggtgttgtgaggggtgggggttgggtgtgtggtgtagtaaagggttttgtgggaaggggtgtgtggttgtttggggggtttttttggtttttttggttttaatggaggggaattttagttttataattttatttttatatttttttaagtagttttttttttttatttttttttttttttgtgattgggagtaagtgtgtttttagtttgttttttttaattgtattttaataagtttgggagtggtaatttttagttttattttttttttttttttgtgtaggtttgggtgtgttttttttagtgttgggatgtttgggttgtttgtagttgtttttatatttttttttggagaatttttaaatgtagaggttggtgattttgtttttttttttggagtttgggataaattttttaggttgttatttttaatatttttttaagttttaggttttattttaaatttttttggggagtttgtattttattttattttaagtttatttgttttaatattaaataatggtttttttattatattttttagtaaaattgatagttaaggagggggatgtgttgtgtttattttgtggtttttaggatttttggggtatattttttggaatttttgaagtatttgaaaagtatgattttaagagggtttataaatttgggaggagatagttatattgaaaggatttttttttttttttaaatgaatttttgtttttgttgtttaggttggagagtaatggtgtgatttttgtttattataatttttgtttttttggtttaagtgatttttttgttttagttttttgagtagttgggattataggtatgtgttattatgattagttaattttttgtatttttagtaaagatagggtttttttatgttggtgaggttggttttgaatttttaattttaggtgatttttttgttttagttttttaaagtgttggaattataattatgagtaattgtatttagtttaaaaagatttttattttaattttttaaaatgtattttttttgtttatttaaggaggtatttagtatttaatgtatttaaggttttttttttgttttttgttttttattagtttgtttaattttattttttaattatattttatttggagtttttgattttattttttaggtttagtggtaggggtggggatggaaggaagatttttttttttttttttaattttaataagatattgtatgggatatatttatattaataaattatttattgtttatttgaaatttaaatttaattgggtttttttatttttatgtgttaaatttggtagttttagttggaatgttttagttaagaatgtagttatattggttaagaagggattaaaggtatttattagggattggagaatgaaggatattagtatttttttttttttttttttttttttattttttatatttttttataggtatatatttgtatttttaaatttgtttttatgtgttgagtatatttaaagtaggtattttttgtgggataggttgttatgttattttagggagttgagaaataggggtttttgggattaagaggatttgggtttaaattttgaatttggttagttgtggtggtttatatttgtaattttagtattttgggaggttgaggtaggtagattatgaggttaggagattgagattattttggttaatatggtgaaattttgtttttgttaaaaatataaaaaattagttaggtgtggtggtgggtgtttgtagttttagttatttaggaggttgaggtaggagaatggtgtgaatttgggaggtagagtttgtagtgagttgagattgtgtttttgtattttagtttgggagatagagtgagattttgtgttaaaaaaaaaaaaaaaaattttgattttattttatattagttatgttattttgggtaagtgattgagtatttttggttttagttggtttatttgtaaaatagtatttgatatattatgttggggttaaaggagataatgttttggaagtatttagtgtaatatttggtatataataattgtttaataaatggttttagatttagttatattggggtagatttaggttttgtggggtttgaagtttatataatttgggaaattttttttaagaaagtaatataaagttggttgagtatggtggtttatgtttgtaattttagtattttgggaggttaagataggtagattatgaggttaggagtttgagattagtttggttaatatgataaaattttatttttattaaaagtataaaaattaattaggtgtggtggtaggtatttgtaattttagttatttgggaggttgaggtaggagaattgtttgaatttagagggtagaggttgtagtgagttgagattttgttattgtattttagtttgggtgatagagtaagattttattgaaagaaagaaagagagtaagagagagaaaggaattgaatagaaaaagattttagtatggttgggtgtggtggtttatgtttgtaattgtagtattttgggaggttaaggtaggtggattatttgaggttgggagtttggtattagtttgattaatatggagaaattttgtttttattaaaaatataaaattagttgggtatggtggtgtatgtttgtaattttagttatttgggaaggttgaggtaggtgaattgtttgaatttgggaagtggaggttgtggtgagttaagattgtgttattgtattttagtttgggtaataagagtgaaattttgttttaaaaaaaaaaaaaaaaaataaaataaaaaaataattttagtatatttatatagtaaggataaggtggagttttgtataggtatttagagtgataatgtaaaattaatttattttttggattgttgttataaatatttgagaaatattgttgtgtatggaatatagtagtttttttggatggttattaatatttttatttttttttgagttggtgttagggttagggtgaggattaggggaattgaggtaagtaatttgtttaggatgttttagggttagagagaaaagttgggtatgtattaaaattgattttttatttttattttattatttagtttaggatttggttaatttgttttttagttttgtagtttatagttttgtgggaagaggatgtgttgatttggttttaggagttattggtttattatattatattttggagggtttgtatttggatgagtgtgtaggtagttttagaggttattgggatgttaggattagggttagaggtgttttttttttttaggttttatttttgttttgttgttgtgtttggaaaggttagtttagttaggaaagttattgtggatgttatgttttattggattttattttgtgttattttgatttatagttatgttttttagaatattgagtttttaagattttagaggaggtaggtgttattatt

SEQ ID NO: 650 - DNA, 6171 bp, Artificial Sequence
  chemically treated genomic DNA (Homo sapiens)
ttttttaatgtgggggagggtaggtaggagtggagatttttaagtagtattagtattgttgtttgatgggagtgtgaatttgaatatatgaagttttagttttagtagaatagtaagaaattttaagtaaggttaggtatggtttatatttgaaattttaataatttgggtaaattgaggtggaaggattgtagaggttaggagtttaagattagtttgggtaatatagttagatttttatttttatttttgtatttttatattatataaaaataataaagaaattttaggtaaggttagatggtaaggttaggtgtggtggtttatgtttgtaattttagtattttgggaggttgaggtgggtggattgtttaaggttaggagtttaagattagtttggttaatatagtgaaattttgtttttattaaaaatataaaaattagttaggtgttgtggtaggtatttgtaattttaattatttaggaggttgaggtaggagaatagtttgaatttaagaggtagaggttgtagtgagttaagattgagttattgtattttagtttgggtattaaaagtgaaatttaggagaatgttttgaatttaggaggtagaggttgtagtgagttgagattatgttattgtattttagtttgggtgatagagtgagattttattttaaaaataaataaataaataaataaagtagttagatattttggtgtttatttgtagatttagttattagggaggttgaagtgggagaattatttgagtttgggaagttgaggttgttgtgagttatgattgtattattgtattttagtttgggtgatagagggagattttgttttaaaaaaaggaaaaaaagttaggtgtggtggtttatatttgtaattttagtattttgggaggttgaggtgggtggattatttgaggttaggaattagagattagtttggttattatagtgaaattttatttttattaaaaatataaaaaattagttgggtttggtggtgtatgttttgtagttttagttatttggaagtttgaggtaggagaattatttgaatttagtagtgagttgagattaggttattgtattttagtttgggtgatagaaatagaataagattttgtgttaaaaaaaaaaaagtaatagattagaaggttatgaggttaaataaaataatgttttgtttttgttttgagatggtgttttattttgttgtttaagttggagtgtagtgatgtaattttagtttattgtaatttttattttttgggtttaagtgatttttttgttttagttttttaagtagttgggattataggtgtttattattatgtttagttaatttttgtatttttagtagagatggtgttttattatgttgattaggttggttttgaatttttgattttaagtgatttgtttgttttggttttttaaagtgttgggattataggtatgagttattgtgtttagttgaatgttttgttttttaagatggaagatattttagtattttggtaggttgaagtaggtggattattttagtttgggtaataagagtgaaattttgttttaaaaaaaaaaaaaaagaaaagaaaaaaaaagagagaaagaaattttaggtaaaagtttgagttttattttttaattatttgattattttaattattgttattaggtggatgattttggagaggttatatatttttagttttgtaaaatggggagttatattgtttaaattatataatttttatgttaagtgatatattttttaaggtattaagtttgaggatatattttgtaaatgaaatgatatatggaaatgtttgtatatgttaatggttttgttgttgttattattattatgattattatatatatggtttggagaaagttaatttttttaaagtggagattttttagtagagaataggttttttaggttgtatattaatagggagtatgtttaaggaatgttagttggtagtttttgttaggtgtgaggggtgaaatttttttttattaaggtttaattgtttttgaagtttttaggtttgaagttttggagaaaataattaggttttttgggtgagattttgaatattagtttaagggatttgaaatgtaaggttgtttgggattttattgttatggatgggtattaggtggtgttggttggatttgttttgggattagtagggttttgggtagtaatttgtagggagtttgattgtttttggttaggtttgggtagttggtgggggaggttttagaggtttatgttatttgtggatgtagtttttagtgttttttttgtgttttattttattgttttatttttttttttgtgagagtttggatttggaaggtatttgggagggtgtaagtgttttggtgtgtgtttatttgggtttttagaagagtggtgggaattgtggttgtttggatggtgtggttagattttagtgtggaaggggaggtagttgtttttttaggtggttgtggggggtagtagaggggatggtgataggtgtgggagttttttttggggtagaagtggaaaggtgggttttggggtttgtttttaggttggaaattatttttgttttttatttaaatttttgggagaggtttggttggtgttgggtttggaggaggaagtggttagagatagtgtaattttatgtggtttttgtggtttgggtttttgggttgggtggatgaattatggggttttgagtttgggagaaattgaggtggtttggatgtgaggtaaaaaatatttttttttttaaaaatatatagagagaaatatttatattttgagagaaaatttattaagtgaattaattggttaggggagttgagtgatttggttaatgggtgaggttaatttttagggggtagggttttggagagttttttatttttttatttattatttttttttggatttgggggtttttggaattttgatttttttttggtttattttttgtagaaaaattagggtgagttttatttttgatttgttttgttaagttgtgggattgtggggtgtggtatgtttggggtaggtggtttgaggttttgtaatttttattttagttttgtgtgggagggggtgtggttgtgatttatttttttttttttgtgttttttttttttttttttttttttttttatatatatatattttttttttgttatttttttttggattttggttttggttttgattgtaatttgtaatttttgttgttgttgttgtagtagttattaatttgttagtggtttaggtggtttttgttttgatgttttagtttaggggtttttgggttggatttggttgggttttttttattttttgtggagttatgagggtgaatgatgttttgtaggtgttgggtttgttttttagtttggtttggggttttgaggtgggtaatttttaggtaggtaagtggtgtgagagtattggtgggtttggtatttgggagttggaatttagtgtgtgtagttttggagggtatgggtatggttttaggtggtgtggggttgtgggtgttgtttttggtttgttaggattatttgggagaggggtggttaggtttgggttattggtgtggtttggttgagggtggtattttgggatttttatgttatttttttttagagtgttgttgattttttaattggtttttttagaagaggttgaggttgaaatagtagtttatatttttgaggggttttgtagggaggggagtagggaattttattttgtaaataggaggtgtttggaggtgggggttttggtgggaagggttttggtttgtttgttaattttttgttttttatttgtgttgattttagttatttttagttttgttgttttgttgatagggtggagttatagaaggttggagggggttgttgttttttggtgttggaaaaataggagtggtatttttttttttgtgagtgagtttgttttggggaggtttgagattaattagagggttaagtttaggtgatattaggtaggaggtttaatagaggttggtgttttttttttttagtatagtagagtttaagtaatatttttttgttaagatttaggttaatataatttatatttattgagtatttattatatataaggttttgggttaggagttgtaagggtaaggatgtttagtttttggttttttttttttttaatttgaggattaagagggtatttttgttattttttaagttttttgttttggggagttttttttgggtttagtttgtgttttttgtttttattttgtttattgtttgatattgtttttaggattttagatagagttttggattgtttttttttagtttttttttgatttttatgttatttgagtttatttttttggggtgtttttgggattgtggatatttgaggattgaagttttgtggatttttttttttttttttagattttagtttggggtttggtatagttagggttttttttttagtgtgggagtggaagaaattatttgtgttttttttatagttgttgggtttaaatttagattttgggatttttagatgtgaatatttttagttggtggaggggggtggtttggggattggtgtgggagggagtagtggagtgattgtataattgttttatttagatttttgtaatttttatttagaaatttaggagtattagagtttggttattttttttggggaggtaggaggtaggtatggttgggtttttttattttttatttgggttttgtagtttttgggtatttggttttgttttagtttttttatagtttttttgttttggttgtgatgggggtgggggatgttggaggggaggtttttggttgaggaggggttggagattttggttttattttatttttagtgttttttattaaaggagggtttgtgatattgtttttttttatgtttttggtttttgggtatagtagggatttttatgattttttttttttgttttgttttttaagttgtttagtttttttttagaggtgttgtttgtgttttttttttgtttaggttttttgttttttgtttgtgtaatatggattttatttttagggtagtagggaattgggttatttttaatattgtagttttttaagtatagatataaagtttgtataaatatttatgggtatgtgggatagatggggttatttgaaatattttttgtaaggaaatttaattatagatttttgagttagtaggattaatgtgtatgtgtttgtgtgtatattgtgtgtgtatgtgtgtgtttatattattatttttttgtgtagaaagtttggttttttttttatttggggagaagtgttggtattataatttgggaaagggggtattttgttaggaaggggattggggtggggttgttttagaaatgattaatttttttagttttttttattttaatttaaggattttggagtttttagtttttttggaattagttttttttgttgggattagttaatttttatggggagtgataaggagttttttaaggttaagaagttagattaggggtgtatgttataggagggattggggttttattagtttttttttttttatttttattgttgttttttattgagttattattgttttagggaagggtggttggaataggtggtatttattttttattttttattttatatatggtttttttttgaattagaggaaagagattggggtagggttttagagtttaggattttttatagtttgttgtttattatatttgtaaagaagagtgaatttttaaggttgatatgttatgtatttttagtttaggtttttttttagtgtgggtgaggattgttatggtgaaaggtttttttatgaattttttttaataatgaaattgtgtggaggtttaatatggggtatttgttattatttttttttaggtttttttgtatttgttgaaaaatattttagggttggaaagtgatgttgaggttgttagagtgtgttgggatgggggagagagtgagaaggaaattttgagtttaggaaggtggggaggtaattagttttttattttttagttttaaagataaagtttttattgatttt

SEQ ID NO: 651 - DNA, 6171 bp, Artificial Sequence
  chemically treated genomic DNA (Homo sapiens)
ggggttaatgggagttttgtttttaaagttgaaagataaggagttagttgtttttttgtttttttaaatttagggttttttttttatttttttttttattttaatatattttagtaattttagtattattttttagttttagagtattttttagtaaatatagaggaatttggagagagatagtagtagatgttttatattgagtttttatataattttattgttagaagaggtttatgaaaaagttttttattatggtaatttttatttatattaggggagagtttagattagaggtatatggtatgttagttttgggagtttatttttttttgtaaatgtggtggataatgggttatgggaagttttggattttgaagttttattttagttttttttttttggtttagggaaagattatgtgtggggtggggagtagggggtagatattatttgttttagttatttttttttgaggtggtggtagtttagtgggaggtaatagtgggaatggagggagggagattggtgaggttttaattttttttataatatatatttttagtttgattttttgattttggagggttttttattattttttatgaaggttggttagttttagtaaagagagttagttttagaggagttgggaattttagggtttttgggttgaaatgaaagagattaggaaggttagttatttttggaatagttttattttaattttttttttggtaggatatttttttttttaagttatagtgttaatatttttttttagataagggaggagttaagttttttgtatagggaagtagtagtgtgggtatatatatatatatataatgtatatatgaatatgtatatattggttttgttggtttaggaatttatagttgggtttttttgtaggaagtattttaggtggttttatttattttatgtgtttataagtgtttgtgtagattttgtgtttgtgtttggaaggttatagtgttagaggtagtttagttttttgttattttgagggtaaagtttatattatataaatagggggtaaagggtttgggtaggaagggagtataaataatatttttggggaggagttaggtagtttggggagtagggtaggggaagggaattataaaaatttttgttgtatttaggaattgggagtatagggaggggtagtgttataggtttttttttggtagagagtattaggggtgggatagagttagaatttttagtttttttttaattagaggttttttttttaatattttttatttttattatagttaggataaaggggttatagaaggattgagatagggttggatgtttagaggttgtaggatttagataaagggtaaagagatttaattatgtttgttttttgtttttttagggagggtggttagattttggtatttttgggtttttgggtgaagattgtaggagtttggatgggatagttatatagttattttattgtttttttttatgttagtttttagattatttttttttattagttgggagtgtttatatttaaaaattttaggatttaaatttaggtttagtaattgtgagggaagtataggtggttttttttatttttatattggggaaggggttttggttgtgttaaattttaagttgagatttgaggggaggggaggagatttatagaattttagtttttaggtgtttatggttttagagatattttaaaggggtgggtttagatagtatgggagttgggggaggattggagaagagtaatttggggttttgtttagggttttagagatagtgttagataataagtaaaatgggggtgggaggtataagttgagtttaggaaggattttttaaggtaggaggtttagaaagtagtagaggtgtttttttgatttttaggttggggagagaaaagattagaggttggatatttttgtttttatagtttttggtttagggttttgtgtatagtagatgtttaataaatatgagttgtgttgatttgggttttgataaagagatgttgtttaagttttgttatattgaggaaagggggtgttagtttttgttgggttttttgtttgatgttatttgaatttggttttttggttaattttagatttttttagggtaggtttatttatggaagaggaggtgttgtttttgtttttttaatattagagaataataattttttttaattttttgtagttttgttttgttggtaaaataatgaaattaggggtagttgaaattggtgtgggtggggggtagggggttggtgagtaaattgagattttttttgttaaggtttttatttttaagtattttttgtttatagaatgaagttttttgtttttttttttgtagggttttttagaagtgtgaattattgttttggttttagttttttttggggagattaattagagggttggtgatgttttggagaagggtggtgtgagggttttggaatgttgtttttggttggattatgttgataatttgagtttgattgttttttttttaggtggttttggtaaattgggggtagtatttataattttgtgttgtttgagattgtgtttatattttttgaggttgtgtgtattgggttttggtttttaggtgttgagtttgttggtgtttttgtgttatttatttgtttgagagttgtttattttggagttttgggttaggttgaaaagtaagtttagtatttgtagagtgttgtttgtttttatgattttgtagagggtgaagggagtttagttaagtttggtttgggggtttttaggttaggatattgaggtaagagttatttgaattgttggtgaattggtggttgttgtggtgatggtagtggaggttgtaaattgtaattggagttggagttggagtttggggagggatggtaggggaggggtgtgtgtgtgtgagagagagagagagagggagggaggaatgtagagggaagggggtgagttatggttgtgtttttttttgtgtgaggttggagtagggattgtggagttttggattgtttgttttgagtgtgttatgttttgtggttttgtaatttggtggagtagattgaggatggggtttattttaatttttttgtaggagataggttaaggggaggttgagattttgaaagtttttagatttagggaagggtaatgaatgagggagtggaaagttttttaaagttttgttttttgaaagttggttttgtttattaattaaattatttaatttttttagttggttggtttatttggtggatttttttttagaatgtgaatatttttttttgtgtgtttttgagggggagggtgttttttgttttatgtttaggttattttagttttttttagatttgaaattttataatttatttatttagtttaggaatttgagttatagagattgtgtgaaattgtattgtttttggttgtttttttttttagatttggtgttggttgggttttttttggggatttggatggggggtgggggtggtttttagtttgggaatagattttggagtttgtttttttatttttattttgggaggggtttttgtatttgttgttgttttttttgttgttttttatggttgtttgggagaatagttgtttttttttttatattggagtttggttgtattgtttgggtggttgtagtttttgttgtttttttggggatttagatgggtatatattaaggtgtttatatttttttaggtgttttttaagtttaggtttttgtaggaaaggggatggggtagtgaagtgggatgtggagaggatattagagattgtgtttatgaatggtgtggatttttggaattttttttattagttgtttggatttggttagaggtggttgggttttttgtgggttgttgtttaaagttttgttagttttgggatggatttgattggtgttgtttggtgtttatttgtggtagtggagttttagatggttttgtattttaaattttttaaattggtatttgggattttgtttggagagtttagttgttttttttagaattttaagtttgaagattttgaaaatagttgagttttgataaagaaaaattttattttttatatttagtaaagattattggttaatattttttaaatatgttttttattgatatgtaatttagagggtttgttttttattggagaatttttgttttggggaggttggttttttttagattatgtgtatagtagttataataataatagtaataataaaattattaatatatataaatatttttatatattattttatttataaagtatgtttttaaatttagtgttttagagaatgtgttatttaatataaaaattatatgatttaggtaatataattttttattttatagaattagaagtgtgtgatttttttaaggttatttatttggtgatagtggttgaggtgattaggtgattgggaggtggggtttagatttttatttagggttttttttttttttttttttttttttttttttttttttttttgagatagagttttgtttttgttgtttaagttggaatgatttatttgttttagtttgttaaagtgttgggatattttttattttaaaaaataaaatatttggttgggtgtggtggtttatgtttgtaattttagtattttgggaggttgaggtgggtagattatttgaggttaggagtttgagattagtttagttaatatagtgaaatattgtttttattaaaaatataaaaattagttgggtatgatggtgggtatttgtaattttagttatttaggagattgaggtaggagaattgtttgaatttgggaggtggaggttgtagtgagttgagattgtattattgtattttagtttgggtgatagagtgagatgttattttaaaataaaaataaaatattgttttgtttgattttatggttttttggtttgttgtttttttttttttgatatggaattttgttttgtttttgttatttaggttggagtgtagtggtttgattttagtttattattgagtttaagtgatttttttgttttaggtttttaagtagttggggttataaggtgtgtgttattaagtttggttaattttttgtatttttagtagagatggggttttattgtgatggttagattagtttttaatttttgattttaggtgatttatttattttagttttttaaagtgttgggattataggtgtgagttattatatttggtttttttttttttttttgagataggatttttttttgttatttaggttggagtgtagtggtgtaattatggtttatagtagttttaattttttaggtttaggtgatttttttattttagtttttttagtaattgagtttataggtgggtattaaaatgtttggttattttgtttatttgtttgtttgtttttgagatggagttttgttttgttatttaggttggagtgtaatggtgtgattttagtttattgtaatttttgttttttgggtttaaggtatttttttgagttttgtttttggtgtttaggttggagtgtaatggtttgattttggtttattgtaatttttgttttttgggtttaagttatttttttgttttagttttttgagtagttgagattataggtgtttgttataatatttagttaatttttgtatttttagtagagatggggttttattgtgttgattaagttggttttgaatttttgattttgggtaatttatttattttggttttttaaagtgttgggattataggtatgagttattatatttggttttattatttggttttatttaggatttttttattatttttgtatgatatggagatgtgggggtgggggtgggggtttggttatgttgtttaagttggttttgaatttttggtttttgtaatttttttattttagtttatttaaattgttaggattttagatgtgaattatgtttggttttatttaggattttttattgttttattgagattggagttttatgtgtttagatttatatttttattagataatagtgttgatattatttaagggtttttatttttatttatttttttttatattaaaggg

SEQ ID NO: 652 - DNA, 6214 bp, Artificial Sequence
  chemically treated genomic DNA (Homo sapiens)
ggtggaagatggggaaaattagagtatattttttagagagattttgtgaggattaaatgagatagggaaattgagattgagggagtagttgaagggaatttttttgtttttgtttttttttagataatataagtgttttttttatgtatgttagtaggtggagatttttttattattttgtgtgtgtattttatatgtttttgtttttgtttttatttttgtttttgttatttttgttatttggaatgtttttttttttttttttgtttttgttagttttatttatttttttaggttaatatgttattttttttaggaagttttttttgatttggaagtgattgttgtattttttgggttttttgtggggtttttattatttttagttttgggtagtagttatttgtagtttattttatttttttttaagtttgtgtttttttttttggtaggagtttttttgtattttagtatttttgggtggggttggaattattgtaatgtttttgtgttttatttgtttataaggtttttgatgtatttttggaggtggttttagggtttggatgatttttggttggggttgtggggggttgtattgagggtaggttagaggtttggggtaattgttgggttttaggaaatgaggttgtattatttattgtagtttttgattgttatttatggtgttgatgtttggtattaggtggaatttttaaggaataagaaatggaaggttatagatgaggtttgtgtggattgaggggtttttattgggtagaggttatattgttgtttatttttaatgtataggttagttttgggaatagaaagagtatagtttggtagttagagattgatttggtggtaaatttttgtttataagttgtgtggttttggggtaggttatataatttttttgtgtttttatttttttattagaattaatatttataaagtataaattgttaggaattgttttaattattttataaatattgatttatattattggtatagtaatatttttattttttttttttttttttttttttttttttttttttagatggagttttattttgttgtttaggttggagtgtagtggtatgattttagtttattgtaatttgtgttttttaggtttgagtgatttttttgttttagttttttgagtagttgggattataggtgtgtattattatgtttggttaatttttgtatttgtggtagagatagggttttattatgtttgttaggttggtttttagtttttaattttaggtgatttatttgttttggttttttaaagtgttgggattataggtgtgaattatagtgtttagtttagtatttttatttttagatgggagaatagttgtttgtagatatagagttaatgagtttagtagttgggtttttatttatttttgtatttgtttgtatgaagaggataattatagtttttagtttaaggggaggttgtgagaattaggtgagagaatgtgtgtgatagtttggtaagtggtaggtgtttagtgtagaggggttgaggtaggaaagagttattgttttgggtttaggttattttattgttttttttttttttttttttgagatagggttttatttttttatttaggttggagtgtagtgatttgtgggtttaagtaatttttttattttagttttttaagtagttgggattattgatgtgtattattatatttggttaatttttttttttttttttgttttttttttttttttttttttgagatatagttttgttttgttatttaggttggagtgtagtagtttgattttgttttattgtaatttttattttttggatttaagtaatttttttgttttagttttttgagtagttgggattataggtgtttataattgtgtttagttaatttttgtatttttagtagagatagggttttattatgttggttaggttggttttgaatttttgatttttggtgatttatttgttttggttttttatagtgttgggattataggtatgaggtattgtgtatggtttggttaattttttttaaatttttttgtagagatagggttttattaggttgtttagggtggttttaaatttttgagttgaagtagtttatttattttagttttttaaagtgttgagatgataggttttagttatttggtatggtaggttgttttaattttaattttagtttttagttgtttattggttgtgtgattatgggtaagttatttaatttttatgtgttttagtttttttatttttaatattgttataggtgaggattataggattttattgatgttaagaagtattttttaatagttttgaaattatagtttaattggtaatttaaaaaattttagtggattaggtatggtggtttatatttagtattttgggaggttgaggtagaaggattatttgagtttaggagtttgaggttatattgggtaatatagtgagattttatttttataaaaaaattaaaaaattagttgggtgtggtggtgtgtgtttgtggttaggttgttttttagttaggattttagtaggattgtttgagtttaggaggttgaggttgtagtgagttgtgattgtattattgttttatagtttgggtaatagagggagattttgttttagaaaaaaaaaaaaaaagaaagagaaggaaagaaaattagtggtataaagttatagtgggttttttttttaattgatgaggtttttgattttgtgaaatatggtaaatgatgtagtaagtgtttagtataatgtttttgtttttattttattagttagttatttgaggagtgggttgggatggggtttagtgttttgggagaagtgggttttagttttgttgttgggttttgggtgtgggtgtttaattgtttgggaagtgtttataagtttaggtaagttttgatagtggtagtttgagtttaagtgttgtgggtttggtgttttagtgattttagttttgggtttgaggtattgttggtggtattttttatttttgggtttgggttgttttaggttaggaagggagggatgttttgggtgatttagttgttgtgatttggttgttgtgatttggtggaatggatgttttttttttttttttttgttgatatgtgtttgtagttttttgataggaaatgggtatttgtagttttttgggtgttttttggtgggtagtgggtgttgttaggggttgagagtggggttgtgagagttgtttgtagtttgattttgtgtatgttttggaattttgaggtttttatttgttgtatttggtaaagggattgagggttggtttttggggatttggtaggttttattgtttggatttttttggattttttaggttgagaaatgatagggatttggtgatggaggggtgaaggatagatagatggatggatatgtggagggttgtagattgggttgggatttttattttggtttagttgtttttttgatggattttgttttttttttgtgtggggatttttattttagtttagattttagattttaggaatttagtttgaagtggagagatttttttagtttttgaggtgattattttaggtgtttatgttttttttgaagtagggtggatgtagaagttagaggtgggtaggaggagagaaagtgggtatggagatggagggatggatgtggatggtgagggagaagggggtggttgggagaaggggagtttgtgggtttttgttgtttgttgtgtggtgggggtaattggttttggatggtgaggggtaggatttttgttttagtttttagtttggttttgattttggttttttgttttagttttggagtgtgtgggagttgattttggttttttatgtgtggtttttttgtgggattattggtgttgggttttatttatttgttgggttgtttgtgttgtggttgggggttgtgtggggttgttgtatttgttgttgtttttggagtttgggttgggttttttgaagttttggaatatgtttggggttggtggttttgtggggtatatggttgttgggttttgatttatttgtgttgtgtggagttttttttttttatgaatgaaaagtttttgggttgaattattgtgattgtggggggtgggggtgttgtagtggtgtggttatttttaggttttatttttgagatgtgttgttttggtttgttggttttgaatttggtgatgtttttttaagtttggttgtagtttttttattgggatgggtttggtttggtgttttttggtggttgtgggtttgtttttttgatgtagttgtttatatatggtgtaatttttttgttgtgtttaggtggagttttgggtttttttgtggattgatgtatttgttagagtttgtgttttgttttagtttttttgaggtttgggttaatttttgtttttgtttttataaaatagtatgaaagaattatatttttaggagttatgttaattgttatttaaagttttgtggagtgaggtttttttattggttttgttttaaggttttgagtatatgaaaagtgaataaatgataaattagggttataaaaatggtggtatattttattttattttatatttttgagattgggtttttgttatttaggttggagtgtagtggtttgattttggtgtattgtaggtttaattttttgagttaaagggatttttttgttttagtgttttttttaagtaagtgggattataggtgtgtgttattatatttaggtaatttttgtgttttttgtagggattgggttttgttgtattgtttaggttgggtggtatattttaaatgtttgtgataaggtaatgttttgaattaattttatataaaatgtaatataatagtattatttaggataattttaggagttataatgagttttaatttagggttattataggtgttttgaggtttgataaatgttatttttattatggttagtgttttttggaggtttgtggttattagatttgtttggagagtatgttaaaggtgagtgaatgtgaggtaggtattatttttatttttgttttatagatggggaaattgaggttgggagatgttgaaatgaattgtttgaagttgttaagtgagtagttggtataggttgttaagttatagttgtgggtattttaagtttaggtttagttaagatttttaaagtttttatatttttatagatattttgttgtatatttagaatgttagtgttgggtattattttaaagtttttttttgattatttttattatagatgaggaaattgaggtttagatggagtattgagttgttagttgttatatgattatagaaagagggttggggttaggtgtggtggtttatgtttgtaattttagtattttggaaggttaaggtagaaagaattatttgagattttatttttataaaaaattataaaattttttggatatggtggtatgtttgttttgtggttttagttgttttggaggttgaggtgggaggatggtttaagttagggaggttgaggttgtggtgagttgtgattgtgttattgtagtttagtttgggggatagagtaagatttaaagtaaatagattaagagagggttgggtttttttgtttttttattggtttttttattttattagttttagttttgttttttgggttattttttttgggaatataggttagaagtttgtgggtgtatttaggatttagagttaggaagtttagattgtttttggggttttagttttagagttattattttttgtttgtgtgatattgggtaggttatttttttttaattgggtttttttgttgattttatagagttgttgtgggattaagtgagattatagatgtgaaaatgttttgtaagttataaagtgttatgtatttagaaagtggttattagtttggtgttttttttttgtttttgagtgatttaatgtttgttatttttttgttattattatttttgtgtgtgtgtgtgtgtgtgtgtgtgtgtgagagagagagagagagagagaaagagagagagaaaggagaggagagtgtttttgaggtagtatgatttgtggatagaatatttgtgttggggttagatagttttggggtttgggtttgaatgtggttaggttgttt

SEQ ID NO: 653 - DNA, 6214 bp, Artificial Sequence
  chemically treated genomic DNA (Homo sapiens)
gagtagtttaattatatttaaatttagattttagagttgtttgattttagtatgggtgttttgtttatggattatattgttttaaaaatatttttttttttttttttttttttttttttttttttttttttttttttatatatatatatatatatatatatatatagagatgatgatgataagagggtgataagtattgggttgtttaaaggtaaaggagaggtattaggttggtaattattttttgagtgtataatattttatagtttataaagtatttttatatttgtgattttatttgattttataatagttttgtgagattagtagggaggtttagttgaaggaaggtgatttgtttagtgttatatagatagaaaatggtagttttgggattagaattttaggggtaatttggattttttggttttaagttttgagtgtatttatagatttttggtttgtgtttttaaggaaagtagtttagagggtaaagttagagttgatgaaatggaaggattgatggagaagtaggagagtttagtttttttttgatttatttattttgagttttgttttgttttttaggttggattgtagtggtgtagttatagtttattgtagttttaatttttttggtttaagttatttttttgttttagtttttagaatagttgggattataaggtaggtgtattattatgtttagaaaattttataattttttgtagagatggggttttaaatggttttttttgttttggttttttaaagtgttaggattataagtatgagttattatatttggttttagttttttttttgtagttgtgtgataattgatagtttagtattttatttgggttttagtttttttatttatgatggaagtaattagagagaagttttgggatggtgtttagtattaatattttggatgtgtgataaggtgtttgtgaaggtgtaagggttttgaaaattttggttgagtttgggtttggagtgtttatggttgtgatttggtaatttgtgttagttatttatttagtgattttaagtaatttattttagtattttttagttttagtttttttatttgtaaaatagggatgaggatgatatttgttttatatttatttatttttgatatattttttaaataagtttggtggttataagtttttgaaaggtattgattgtaatgaagatggtgtttattagattttaggatatttgtagtggttttgaattaaaatttgttatagtttttgaaattattttgagtaatattattatattgtattttatgtggggttagtttaaagtattattttattgtaaatatttaaaatatattatttagtttgggtaatatggtgagatttaatttttataaaaaatataaaaattatttgggtgtggtgatgtgtgtttgtagttttatttatttggagggggtgttgaggtaggagaatttttttagtttaggaagttgagtttgtagtgtgttgagattgagttattgtattttagtttgggtgatagagatttggttttaaaaatataaagtaaaataaaatatgttattatttttgtaattttggtttgttatttatttattttttatatatttgaagttttaaaataaggttagtggaaagattttattttatgaagttttgggtggtggttggtgtggtttttagagatgtgatttttttgtgttattttgtgggagtagaaatggaggttagtttaggttttgagagggttggggtggggtgtgggttttggtaggtgtgttagtttgtaggggaatttggggttttatttgggtgtggtgaggaagttatattatgtatgggtagttatgttaggggggtgggtttgtagttgttggggaatgttgagttgggtttattttggtgaaaaggttgtagttggatttggggaggtgttgttaagtttgggattgatgggttaaggtggtgtgttttgggggtggagtttggaggtgattgtgttgttgtaatgtttttattttttgtggttgtagtggtttagtttgagaattttttatttataaaaagaaaagattttgtatggtgtgggtgagttagaatttagtagttgtgtattttgtagagttgttagttttgggtatgttttgagattttggggaatttggtttgagttttgggaatggtggtgggtatggtggttttgtgtagtttttggttgtagtgtaggtagtttagtaggtgagtggggtttgatgttggtggttttatgggaggattgtgtgtgggaggttggggttaatttttgtatgttttgggattggagtggggaattggagttggggttgggttgggggttggggtgaggattttgttttttgttgtttggggttagttgtttttattgtgtagtgggtagtagagatttgtgaatttttttttttttagttgttttttttttttttgttgtttgtgtttgtttttttgtttttgtgtttgttttttttttttttgtttatttttgatttttgtgtttattttgttttagaaggggtgtgggtgtttagggtggttgttttgaaggttaggagggtttttttgttttgggttgaatttttgggatttggagtttgggttggggtgagggtttttatatgggagggaggtgggatttgttgggagagtagttgggttagggtgggagttttggtttggtttgtgattttttgtgtgtttgtttgtttgtttgttttttgtttttttgttgttaagtttttattgttttttggtttggggagtttaggggggtttgggtagtggaatttgttaggtttttggagattggtttttgatttttttgttgaatgtggtgaatagagattttgaggttttgggatgtgtgtggggttaggttgtgggtgatttttgtgattttatttttagtttttaatggtgtttgttgtttgttggggggtatttgggaggttgtaggtgtttattttttgttgaggggttgtgagtatgtgttgataggggagggaaggaggggtgtttgttttgttgagttatggtggttgagttatggtggttgagttatttggggtgtttttttttttttggtttggagtggtttgggtttgggagtgggagatgttgttggtggtgttttggatttggaattggggttattgggatgttgggtttgtagtgtttgggtttgggttattgttgttgggatttgtttgggtttgtgggtgttttttggatgattgggtgtttatatttagggtttagtggtagagttagaatttattttttttagaatattgagttttattttaatttattttttagatagttggttgatagaatgggaatagggatgttgtgttgggtgtttgttatattatttattatattttatggaattgaagattttattgattgaaaaaaaaatttattataattttatgttattaattttttttttttttttttttttttttttttttttttgagatagggtttttttttgttgtttagattatagagtagtggtgtaattatagtttattgtagttttagttttttgggtttaagtaattttattgagattttagttgggaagtgatttggttataggtatgtattattatatttaattaattttttaatttttttgtagaaatgaagttttattgtgttgtttggtgtgattttaaatttttgagtttaagtgatttttttattttagttttttaaagtgttgggtatgagttattatgtttagtttattaaaattttttaaattgttaattaaattatgattttagagttattaaagggtattttttaatattagtgaaattttgtaatttttatttgtaataatattaaaaatgaggaaattgaggtatatggaggttaaataatttgtttatggttatatagttagtaagtagttgagagttgagattagaattgggatagtttgttatgttaggtggttaaagtttgttattttaatattttgggaggttgaggtgggtggattgttttagtttaggaatttgagattattttgggtaatttagtgagattttgtttttataaaaaaatttaaaaaaaattagttaggttgtgtgtggtgttttatgtttataattttagtattgtgggaggttaaggtgggtggattattagaggttaggagtttaagattagtttggttaatatagtgaaattttgtttttattaaaaatataaaaattagttgggtatagttgtgggtgtttgtagttttagttatttgggaggttgaggtaggagaattgtttgaatttaggaggtggaggttgtagtgaggtgagattgggttattgtattttaatttgggtgataaagtaagattgtgttttaaaaaaaaaaaaaaaaaaaaaatggaaaagaaaaaaaaaattagttaaatgtggtggtgtatgttggtagttttagttatttgggaggttgaggtgggaggattgtttgagtttgtaggttattgtattttaatttgggtgaaagagtgagattttgttttaagaaaaaaaaaaaaaaaagtaatggaatggtttgaatttagagtagtgatttttttttgttttagtttttttgtattgggtatttgttatttattagattgttgtatatatttttttatttgatttttatagtttttttttgagttgggagttgtaattattttttttgtgtaaataggtgtaggagtgggtaagagtttagttgttgggtttattggttttgtgtttgtggataattgtttttttgtttgaaaatgaagatattaggttgggtgttgtggtttatgtttgtaattttagtattttgggaggttgaggtgggtggattatttgaggttgggagttggagattagtttggtaaatatggtgaaattttgtttttattataaatataaaaattagttgggtatggtggtgtatgtttataattttagttatttaggaggttggggtaggaggattatttgaatttgggaggtgtaggttgtagtgagttgagattgtgttattatattttagtttgggtaatagagtgagattttatttgaaaaaaaaaaaagaaaaaaaagaaagaaaagaaaatgaagatattattgtgttaatgatatgagttagtatttgtaaagtggttagaatagtttttggtagtttgtgttttataaatgttagttttaatggggaaatgggggtatagagaggttatgtgatttgttttaaagttatatagtttatgagtagggatttgttattaggttagtttttgattgttaagttgtgttttttttgtttttagagttagtttgtatattgaaggtagatagtagtgtagtttttgtttagtggaagttttttaatttatatggattttatttgtggttttttattttttattttttagaagttttatttggtgttaagtattaatattatgagtggtagttaggagttgtagtggatggtatagttttattttttggggtttagtagttattttaggtttttgatttatttttagtatagttttttataattttggttaggagttatttgggttttggggttgtttttaggggtatgttgaaggttttgtgaataggtaaggtatagaggtattgtagtggttttgattttgtttaggagtgttagggtgtagagaagtttttgttagaaaggagagtataggtttaggagggggtaaggtaggttataggtgattattgtttaaggttgaaagtgataggagttttatgggaggtttagagggtataatagttatttttagattagggaaagttttttggaaaaggtggtatattagtttagaaggatgggtaggattggtagaggtagagaggaaggaaaggatattttaggtagtgggggtggtaggagtaaggatggaggtggaggtaagaatatgtaaggtgtgtatatggaatggtgagggggtttttatttgttgatatgtatagagggggtgtttatgttgtttgggagagaataggaataagagggttttttttagttatttttttagttttagtttttttgttttatttaatttttataaaatttttttggggaatgtattttggttttttttattttttatt

SEQ ID NO: 654 - DNA, 6167 bp, Artificial Sequence
  chemically treated genomic DNA (Homo sapiens)
attttttggagataaggtagggtgttgaggggtgggtaagatgttattgagggagaggggagggttttttaagtgtgtggaaggtggttattttgttttagtttgatggaattttttgtttatatatttgttagtttttttttttttggttagttttaggttagttaggagtttttttttgtggtttttgagtatttttttgatatttgaggagattttgtttaatttttttttttgtttttaggatttttggggattagttattgtttttagaagttaggttggatagtggttttttttatttttttttgatttttttaagggggtttagtggttagtgttttttaggaggttttatttttaatttaatttaagtaatagggatagatgaaaaataaaatttaattagggtgataaatggtggggggtaggatgtggtggtttttaggttggttttgtgtgtttttgtttttgttattgtttttttgttatatggggggggggtttaatttggtttttgagtgtataaagttaaggaggggtaaaaaaaaaataaaaaaaaaaaaaaaaggaaaaatgttttaagaaataaagagggggaatagattaattgatatgaaatttgggggtttttaatttttttatgtaattttgtaagtttgttgttaatttttttgatttttttatttaaaattttttgggattattttttattttagaattttttttgtttagtttttattgttttttatttatttttttaattgttagattttttatattttttgtattagtgtatggtttttgaggattttatattttttggggggtttttaggagatgggtaaagatgatttttaggtgtgttttggtgggggggtttttaagattttttttttaggagtatattagggagttaggttatttgtgggggtatgtttgtttagttattgttatttttaatgtggttaaattttttttttattttggttgggttaatatatagtaagtaaggtgtattgggaatgggtggggtatggggagtattgtggtttatgttgtgggggttgtggggataggtgttaaggaggttagttttataagggtatttttgttatggtggaaagatggaattaggtttgggatatattttgtttattttatgggtgtattttaaatgttgttggttgtatatttaggttgtattatttgagtttttttttttgagaggtagggtatagatagggttgaggggtagtggagatgggaataggagtggggtttagattatgaaaatattggagaattttagtgggattttggtttgatttatatagatattgtagttgtttagatatgtttattgtttttatttaattttgtgggggtgtgtgtgtgtgtgtgtatgtgtgtgtgtaggtgggtgtttgtgtgtgtaatgtgtgtgttgtgtgtttgtgtgttgtgagttgtgtttatgtatgtgttgtgtatgagtgtgtgtgttgtgtgtgtatgtgtgtgttgtgtgtttgtgtgtgtgttgtgtttatgtgtgttgtgtatgtgtgtgtgttgtgtgtgtatgtgtgtgttgtgtgttgtgtttatgtgtgtgttgtgtgtgtgtgtgttgtgtgtatgtgtgtgttgtgtttgtgtgtgtgttgtgtgtgttgtgtttgtgtgtgttgtgtttgtgtgtgtgtgttgtgtgtgtatgtgtgtgttgtgtttttgtgtgtgtgttgtgtgttagtgtgtgtgttgtgtgtgtatgtgtgtgtgtgtgttgtgtgtttgtgtgttgtgtgtttgtgtgtgtgttgtgtgtgtgtgtgtgttgtgtgtttgtgtgtgttgtgtgtttgtgtgtgtgttgtgtgtgtatgtgtgtgtgtgtgtgtgttgtgtgtttgtgtgttgtgtgtgtatgtgtgtgtgtgtgtgtgttgtgtgtttgtgtgtgtgttgtgtgtttatttgtgtgttgtgtgtgttgtgtgtttgtgtgtgtgttgtgtttgtgtgtgtgttgtgtttatgtgtgtgttgtgtgttgtgtgtgtgtagttgtggggatgtataaagtatgagtgttttttaggatgggaattgagatgtaagatttgggggtgagggttgtgttaattatattttatttgtatggattttggtttttatgttttgttttttttttttttggttttattgggtttttttgattgttttgtgatttttagtgatggaaaagggagtgaggagttagtttgggttgttgttatttttggatggttagtttattttgaaaatttttgtgagaagggagatggtggtagtagtgatgtgtttatttgtgatttttggggttttttttttttttttgttggtttagggatttaagtttaggttaatttgatttaaagtttaagggagaagagaaagaggggggtggggagtgttaaatttttttattttgttaattgttttttagttaatttgtttttaatattttttttttttagttaattgattttttttggtggttgttttttttaaagttaatttttgagtttttgtggggtgtttttaaaaagttaattagttttaagagggttgttgtgggggggggggaagggggttagtttaatgttttgattttttatgtgtggggataattggggataatttggggggagggtatgtgaagggtgtttaaagttaattgattttgtatatgtttgaagatgttgttgtgtttttttagtttgatggagggggttgaggagagtagtttgttttggggaggtggggtatggggattgggttaggagaagttttagggggatgtggaattgagagatttttgggatggaatttgatggaaatgtttgtggttaggaggaggttgtaggatggtggtgttgggttgtagatttgtggtagttttgtttatttttgattgttggttatttttgggggggtgtttttgtgggtggggttttgggtgggtagagtaattaggggatggtgatgtttggtttttttgaatgttttgagttttttggtgagtatgtgattttggtgggtatgtaggagggtaggtaggtttttgtgtaggtgttgggtggattgtttttaggtgttatattggaagaatttgtttatggggtatttggggaagttgttttgggaggggaaggggttggttagtaggtgtttgttttttatgtttttttgtttgagttgtttgtttgatttgataggttatttttgtgattgattagtgatttgagttaatgtttatgggtagagggatagaaggagttagtgtttgagttgtttttgggttatatagtaagtaaggaagttatgggtttttgtttttggttaagaggttttagaggttataggaaatgttgggtgtttgaagttttatttttttgtttttagagagtgggaaaggggtttaggatttttattggaagtatggttggaggggttgatatgttttttttggatttggtgggggtagtatagtatgtttttaggagggttaggttatagttgtggaaatagtattttttaatgatgttatggttgtgatggtttatatggtttgtgggtttgtttggaagttttatagtatagagagagttgtgttagtattgtattgattttagtttttggaggttgaagggggagtaaattatttttgtttttaggttaggttttggaaggatgtagttattttgtgggttaggggagggaagtgagagttggtaggtagaggtgttttaggaagaagagaggtgagaggggaggtgagtgggatttagattagtttgtggtttttgttgtttttttttttagatgaaaaatgggtataagtttttggttttataattagagggatattattaggattaaaggtttataatgggagtggtttggaaaatgtgtgggatgtgagtttagtttaggggtttttataggagggattgttgtttttgagtttggattttggtttggtattatttaggaggttggaggggtttatattatttttggagttgttgagatagggagataagggtaggagaggagaagatgggaggagaggagtgaggaggtgtgatggaattatttttttttttttttttgtttttttttttttttttatagtaatgtttagttggaaggggaaggttgttgggggttttattttggggtgttaaagggtaggtgttattagttggaggagggagtaggagttttattatgggggttttttaagtgggggtttggtttttttttttttttaggaaagtttggtgtagggaagtttttttttgggtaaggattggttggtattaggttttgtagtgttattttttatttttaaatggggtaggtaagagagagggtataggagaggttagggtgggtaggggtttttagagttaagtagtaggaattttttagagagaagttttgaagtgtatttgtattttgtgagtttattttatagtgtgagtaagtagtggtggtaaagatgttatgtggtgagtgttaggtggaataagttgtgtggtttttgttagtaaggagtggttttttttttgttttattaggtatgtttaggtattatgtttgtttttgtatttatttagtttttttatttgggggtggggttttaaggataatgggttatgtatttatttgttagtttttaggttggagaattaagagagaaatatgaggaaaggttgaagtgtttttgaggttagtaggtgggtattttttatggtagttttggggtttaaggaggtgtatgtattgtttatttttgttatttattaattgtatttgttttattgattttaattatataaattattttattgattttaattttgattatttattgaatgtatgttttttgttagaatgtttaaaaggtgtaggaagaaaggtaggttttttttttagagtttgaagttttgtattaggtgtgtggtgttttaggagtaggagttttatggtttttaatagaaattttgatgtttagggagatttttgtgagtgtttttgatgtttagggggtatttttggtttattttttgaaggaggtgtgtgatgggaaaggtagttggtgtggatgttttgggatattgtatgtgtttagaaatgtggtgggaaggttaaagttttagagtaagtggttgggttgttgatttaggagtgtgtttttttggtttgaggttgggtgtttttattggttattttaggggtttgattaggtttgaggaagttttttttagttatttattgaagtagaagttgtggtttttatagatgaattggagggtgtttattagttttttgttgtatagggttttattggggtggtaagtagtaatgtagtatgaggtgaaggttaagaaggtgagaagtattagtattgatttttttattgggatttttattggtgtttgggggtgggagagaagtggtgtgagtggggtagttaggttaagttttaggttagaggtgttttttttaaattaaatttgttaatttataaatttagttgaaaattgaaagtatggtttttttataaatattatttttattataaaagtaatatataggttataatgttgaggtgagggtgtagggttatgtgtagaatgaagtgtttagaagtatatagaaaaggtttagttttttttatttgtaagaagtattagtaattttatatgaggggtgattatttttatggttattattgtaggagtttagtggtatttatagttgtaggggtttaggttggatatttgatttggtttttgttttatgatattatgggggtagggttagtttagtgttatattgttattttttaggtttttagtgttagttaagatggtagatagttttatttttatagagtatgtgtatttaggaggattagtttttttttttttataatttttagttgagtagggggggtttaggaggattattgtttttaaagtagtaggttagttttgttgggttagttttgtttttttttttggtttttttatttttttagtttgtagttgagttaggtttgggttaaggattttaatggttaatataattatgttatttatgtttta

SEQ ID NO: 655 - DNA, 6167 bp, Artificial Sequence
  chemically treated genomic DNA (Homo sapiens)
tagagtatgggtggtgtggttgtgttaattattggagtttttgatttaggtttggtttagttgtagattggaaaggtggaaaagttagggggaggggtggggttggtttagtaggattggtttgttgttttgagggtgatggtttttttggattttttttgtttagttgggggttgtggggaggaagggattggtttttttggatgtatatgttttgtaggggtggggttgtttgttattttggttggtgttggaggtttgagaagtggtgatgtgatgttgggttggttttgtttttatggtgttataggatggaggttaggttgggtgtttagtttgggtttttgtagttgtggatgttgttgagtttttgtaataatgattgtggagatggttattttttgtgtaaaattattagtgttttttgtaaatggaaggaattgggttttttttgtgtgtttttggatgttttattttgtatatggttttgtgtttttattttggtattatgatttgtgtgttatttttgtaataaaaataatgtttataggaaagttgtgtttttaatttttaattgaatttgtaggttggtaaatttggtttgggaggggtatttttggtttggggtttggtttggttgttttgtttatgttattttttttttgtttttagatattaatgggaattttaatggggaagttgatgttggtgttttttatttttttggtttttgttttgtgttgtattgttgtttattgttttagtgagattttgtgtggtggggagttggtggatattttttagtttgtttgtggggattgtggtttttattttagtaagtagttgggaggggtttttttagatttggttaggtttttagagtgattggtgaggatgtttaattttaagttaggggagtatatttttaggttagtagtttagttgtttgttttgagattttgatttttttgttgtgtttttgagtatgtgtggtgttttagggtatttatattagttgttttttttattatatgttttttttgaagggtgggttagaggtgttttttagatgttaggggtatttataggggtttttttgggtattagaatttttgttgggggttgtgaggtttttgtttttgaggtattgtatgtttagtgtagggttttaggttttggaggaagagtttgtttttttttttgtattttttggatattttgataagggatgtgtgtttggtgaatgattagaattaaaattaataaagtgatttatataattaaaattaataagataagtgtagttggtgggtggtaggggtgagtggtgtatgtgtttttttgggttttaaggttgttgtggggggtgtttatttgttgattttaaggatgttttagtttttttttatgttttttttttggttttttagtttgggggttggtaggtgggtgtatggtttattgtttttgagattttatttttagataggggggttgggtggatgtagaggtaggtatggtgtttgggtatgtttgatggggtaggggaggggttgttttttattggtagaggttgtatggtttattttatttgatatttattatgtgatatttttattattattgtttatttatgttgtgaaatgggtttataggatgtaaatgtattttaaagtttttttttgaaaagtttttgttgtttgattttggaagtttttgtttgttttggttttttttgtgtttttttttttgtttgttttatttgggggtaggaagtggtattgtagggtttggtgttagttagtttttgtttagggagaagtttttttgtattaggtttttttgagaggaggggagggttaagtttttatttgggggatttttgtgatggggtttttgtttttttttttggttgatggtatttgttttttggtattttaaggtggagtttttagtgattttttttttttagttgagtattgttgtgggggagagggggaagatgggaggaaagaagggagtggttttattatgtttttttatttttttttttttgttttttttttttttgtttttgtttttttgttttagtagttttaggggtggtgtgggtttttttagttttttaggtggtgttaggttagagtttaagtttagggatagtagttttttttgtgggggtttttgaattgggtttatattttatatattttttaaattatttttattgtgagtttttggttttggtggtgtttttttggttgtgggattaagagtttgtgtttattttttatttgaggaaggaggtagtagaggttatgggttggtttgggttttatttatttttttttttattttttttttttttgggatgtttttgtttgttagtttttattttttttttttgatttgtagggtggttgtgtttttttagggtttggtttgagggtaggggtggtttgttttttttttagtttttgggggttggggttagtgtggtgttaatatggttttttttgtgttgtgggatttttaggtaggtttgtaagttgtgtgagttgttgtagttgtggtattgttgaggagtgttgtttttgtagttgtgatttggtttttttggagatgtattgtgttatttttgttaagtttgagagggatgtgttgatttttttgattgtgtttttggtgagggttttgggttttttttttattttttagagatagagaaatagggttttgggtgtttagtgttttttgtggtttttgggattttttggttagggataaggatttgtgatttttttgtttgttgtgtggtttgggagtagtttagatgttggttttttttgtttttttgtttgtggatattagtttaagttattgattagttataggggtggtttgttaggttaggtgggtggtttaggtggaagagtgtggagagtaggtatttgttgattagttttttttttttttaggataatttttttagatattttgtgggtaagtttttttaatatgatatttggaagtagtttatttagtgtttgtgtaggggtttgtttgtttttttgtgtgtttgttggggttatgtgtttgttaaggagtttgaggtgtttagggaggttaaatgttattgttttttgattgttttatttatttaagattttgtttatgggggtgtttttttagagatggttagtaattggaagtgagtaaaattgttgtaagtttgtagtttggtgttattattttgtagtttttttttgattatggatgtttttattaggttttattttgaaaattttttggttttatgtttttttggggttttttttgatttagtttttgtgttttgtttttttgaaataggttattttttttggttttttttattgggttgaggaagtatagtagtatttttaaatatgtataaaattgattggttttaaatattttttatatattttttttttaaattatttttaattatttttatatataaaaaattaaaatattaaattaattttttttttttttttttataataatttttttaaaattaattggttttttagaaatattttataaaagtttagaaattggttttaaaaaaaataattattaaaaaaaattaattggttaaaaaaaaaaagtattaaaaatgaattggttgagaaataattggtaaaataaaggaatttggtattttttatttttttttttttttttttttttggattttgagttaaattggtttggatttgagtttttgaattagtaaagagaaaagaaggattttagaaattataggtgggtatgttgttgttattgttatttttttttttatgggaatttttagggtaaattggttatttgaaaatagtaataatttagattggttttttatttttttttttattattaaaaattatagagtagttagagggatttagtaagattaaaggaggggaggatagagtatgaaaattaaaatttatgtaaatgaaatgtaattggtatgatttttatttttaaattttatattttaatttttattttaaaaagtatttatattttatgtatttttgtagttatatatatataatatatagtatatgtatgaatatagtatatatatgagtatagtatatatataaatgtatagtatatatagtatatagatgagtatatagtatatatataaatgtatagtatatatatgtatatatatgtatatatagtatataaatgtatggtatatatatgtatatatatgtatatatagtatatatataaatgtatagtatatataaatgtatagtatatatgtatatatagtatatatatgagtatatagtatataaatgtatagtatatgtatatatatgtatatatagtatatatattagtatatagtatatatataaagatatagtatatatatgtatatatagtatatatatgtgaatatagtatatatgaatatagtatatatagtatatatataaatatagtatatatatgtatatagtatatgtatatatagtatatatatgaatatagtatatagtatatatatgtatatatagtatatatgtatgtatagtatatatgaatatagtatatatataaatatatagtatatatatgtatatatagtatatatatttatgtgtagtatatatatgaatatagtttatagtatataaatatgtagtatatatgttgtatatgtaagtatttatttgtatatatatatgtgtatatatatgtatatttttataaaattggatgaaaataataagtatatttaagtaattatgatatttgtatggattaggttaaagttttgttaagattttttaatgtttttatggtttgagttttgtttttgtttttatttttattgttttttggttttgtttgtgttttgttttttagaggagggggtttagatggtgtggtttgagtgtgtggttggtggtatttgggatatatttgtagggtgggtggggtgtgttttaggtttaattttatttttttattatgatagagatgtttttgtgaggttggtttttttggtgtttgtttttatggtttttgtagtgtgagttatgatgttttttatattttatttatttttgatatattttatttattgtgtgttggtttagttagagtgaggaaggagtttggttatattggagatggtggtagttgagtagatatgtttttatgagtagtttgattttttggtgtgtttttggaaggaagattttggggatttttttattggagtatatttagggattatttttgtttgttttttggggattttttaagaaatgtggagtttttgggggttgtgtattgatgtggggagtgtgggaagtttggtggttggaggggtgggtggggggtagtgggggttgggtggggggagttttggggtaggaagtggttttgggagattttggatggaaaagttaggaggattgatagtagatttgtagaattatatagagaaattaggaatttttaaattttatgttaattgatttattttttttttttgttttttggggtatttttttttttttttttttttttgttttttttttatttttttttagttttatgtgtttagaaattaaattaaattttttttttatgtaataggggggtagtgataaaagtaagaatgtatgaagttagtttggagattattatgttttgttttttgttatttattgttttgattggattttgttttttatttgtttttgttgtttgggttgagttgagggtggagttttttggggggtattggttattgagtttttttggagaagttagaggggagtggagaaggttattgtttggtttggtttttggggatagtggttggtttttagaagttttgagggtggaggggggggttgggtagggtttttttaggtgttaggagggtgtttggaggttataggagggggtttttggttggtttgaggttggttggaggggaaggggttagtaggtgtgtaaatagagggttttattaggttggggtagggtggttgttttttgtatatttgaggaattttttttttttttttggtgatattttgtttgttttttagtattttgttttgtttttaggaggt

SEQ ID NO: 656 - DNA, 6235 bp, Artificial Sequence
  chemically treated genomic DNA (Homo sapiens)
tttaaggagtattatagaagtaatttatagtttttattgtagtttgtaatttttttttttttttttttttaatattgaatgagattgaatgttaggtttatgtagtttttggttaatgttaatgaaaagtttaatgttttgtttgtgtggggatagtttgtttgtaaagtggggtagtttgtaggtggttgttttttggttttatgttaagggagggtgtgttaagttttttttatttgtgtatattgggggtgttgttaggatgtaatttagtttaatttggatatttttggttttagtttttggatattttttttttttttttgttgtaatttgttaagtttttaagtttgtttttttgtgttattttttttttttgttgttttttagtttttgatggtttttttttaaaatgtttgtaattgttgtgttagtatgagttggtatttattgttaatgtggtttatgattttttgtttaagttgtgttatttgttttttgagtatgttggttgtggatgttagttttgagttttgagtttttaaggtttttatttttttttttagttgggtgattttttttagtttttttttttggtatttggaggtagtgatgtggttttttatgtgttttttttttgttttgatttgtttttgggattttatgttgatgggggataggggtggtgttttgttgggtattttgggtattgtttgaggttttttttttagggtttgtagttgtgggtgttgtatgggtatttgttggggtaggtggtgtggtggttgttgttgttgttggggttgtgtgggaaaggttaggttggttgtgttgtaggagggtgttttgttgttgttgtttagtgtgtttgggttgaagttgttgaggtttgtgtagattggtggtttgttgtgtaggttggtgttgaagttgttgttgttgttgttttttgttattgaggttattgtgggagttattatgtttgttttgttgattggttgtgttgttgatgtgatgttgggtagtgtgttttggttgtgtagtttggttagggtgtgtatgaagtttttggtgaagtttttttgtttatttgttatgtttttggggtataggaattgggtgggggttggtgtggtggtgatgtgtttgttgttggattggattattaggtgttttagtttgggtgatgttagtttgagtagttttatgttgggtgaggtgaggaggtttgagtttttggtgtggaggtgtggttttaggttttttattgggttggttaggtttagggttatgttttgttttaggattttggggttattgtagttataaggtttgtttttggatgggaggaatgaggtgttgagggtattgttatagaaggttgtttttatttttgtagttatagaatagtttgttattttatgtgaggttagtttgggttgtgtgtataagttttggggttgtaatagggttgtggtaagtgggggatatttgtgttttttggagtttttgatagggaaagtttttttaagagtgtatgtatttgttggttgttgtttttgttgtgttttttttattagtttgttttagggagtgtagggttaattaagatgttttttgtatttttatttgttgatttgtgtgtgttatttggttttgaaaagttgtggttatttattgagtgttttttgtgtgtagtggttttttggagtttgtaggtgaatttattttttagagtagtggttttttttgtggagtggattagtgtggattttgtagtggttggttggtggtgggttttggttgtttggattttgatgatttgtttttttttttgttgttagggggagggggtgtttggtagttgtggtttgtgtttgtttaagtttaataattggtgtgagtgaagttgagtgtatgtttttttttttttgtgtggttttttgttgttttttggtttttattgttgtggagaagtttaagatgtaggaaaggtttgtaaaagttggttttgggattttgttatttgtttttggtttttttagttgggaaagttttttgttgttgtagttgtttgttgattttttttggtgggtgtgtgggtattgttgttttttgttgttgttaatagtgtttgggtagtagggttttttttttgggggtggttggagattaggttttttggatatttttgaaatattagtttgggagttataggtgttagttttgggtagttagagagaaggtgaaaagaaaataagatttgtagtttggattatattgttgatttggttggttggttgtgtttgtttgtttgtttgattttgtgtatttttatttttgttttgttgttttagttatatttagtgtaattttgagtttttatttagtttgagtttaatatttatttgttattagttaatttttaaaaatagtttatgatgttattttaaggtttttttattggtttgtgttgtttttaggggggtgggtttgtttgttattatggagattttattttagaagatttttttttgggtttgtggaggtttatgggatgaggtaatgttttgttgtttttttatagttgggttttttttttttttatttttttttttgttgtatgttttttggtttttttttttttggttttttttttgggttgttttttttggtttgtttggtgtattgtgggttgatgttttggggtttgattgtttagtgatggtggttgttgtgagtgggtggatgtttgtaatttttgatggaggggggtttaagtttatggttgtggatggggatgtgggggatgtagggatttgggaggttagggaatttggttagttgttttgggttaggggtgtgggtgaggggtggttgttgtttttttatttgtggggtttgaagttatttattggtggttgttattgtgtggggttggaggttgagaatttaagtatgttgttatttttttgtatttttgggggggtgggaatattgtttttaaggtggttttgtgaagttttaggtgggggtgagtttaaggggatttaagtttaggggtggttttttgagagttggttttttatgttgagaatattttgaagtttgtattttggttaagtttaggagtgatggtttgtggggttgtttggttgtttgtagaagttgagagatttgtattgtttgaaattggatgtttagttgagtttttgttgtattttattttattttttgggattgtgggggaaagggtgtgggggtttatagttttgttttggaggggtagtttttatagtgggtgtaattggtgggtaatagggtttagatgggaataagtgtgtaggtgatttgaaatttggggaattttggtgttagtttatttttttttttgtttttggataatatgtatatgtttaatataatatgtataatataatgtgtgtgtgtgtgtatatatatattttatttgtgttgagttgtttttgggaaaataagtttagaaggtggtggatatttgtataaagttatgtagtagtatttggagtttggggtagaatttggattttaaatttttgtatttttggttgggtggtgggtgtatattttgggtagtttttaggaagtgttagatatatgtaagtggttttttttttgtggttattttattttttttttgttttttattttttagggatgaaagtgtgtggtggaaagaattttgaagttgggaattttggtttttttgtggttaggttattatagtgtgaagtaagtaaattatggaatttttttgagttttattttttttatttgtaggtggggttggtgttgtttattttattgggttgttaggagttagtgtgatagggttgtttgtagtattagggaggtggtggttaaatagtttgttttttttttttgttttgtagtttttatttttgtagagtttggataggatgttaggatataagagtgtgatttggtaggattaggtgtatttttttgtgagaagtattgaggggaggaggggagggggaattgggttagaagttagattttttttaagtttttgtttaaaattggggtttgaagttggatttgtagtagtttaagtttttaggttttaaatttagattttgttgtttttgaatttggaatttagttttgggtttattgtttttagttttaaggtatttgtggttttgagtgtttagaaattaatagtagttggtattagtgggaaatttgttaatttttttttattttgggtatttatttagtttttattgatttgtagagggtaattgaaagtttattgtgagttaggtattgagttggggagggggtggggtaggtaggtatatagtgatgataagatttagttgtttttttaaggagagaatatttttttttgtttgttgttttgaattattttttgttgtatttagggagttggtgttttaaatattttttaataatagtaataaaaattagttttatgtattaaatatttattatttgttaggtatttttttaagtaatttaaatatgttgttttttttttataattgttttgagagatatatattattatttagatttaatatgtgaggaaataggtttagagaggttaagtatttttgttgaggttatataggtagttggaaattgattttaggtttgtgttatatttttttgtattttttttattttggtaaatttttttgtggagtattagttatttgtagaggaaatagtgtttgtggtatagaagaaatttttttgtttgattttttgattgtaattttgtttagagtttttgtatttagaaattttaagatttaggattttgtataaatatatattttttgtttaaggttttgtgtgtttttttttgttttatgtggtttagtaggttgattttttttttatgttgagaaatagtatattttatttaaaaaaataataaatttgtttatgttaatgtttttgtttggaagtttttattggtttttttttataattaggagagttttgatttttatgttttggagaaggggttttttataatttaattttttttttttttagttttattttttatttttagttttgttaggaaaggtagtgttatgttgttttaataaataattttaatatattagtggtttattttagtgaaagttggttatttttgttatatgattgttgtaggttggtagggtagttttgtttattgtagttattaaagggtttaggttgaaggaggttttgtgttgatatttttttttatagttattttgattgtggggaaggaatttggaatattatggttgttagagtatttatttatggtatatattatttttgtttatatattattggttaaagtagttatatggttatgtttttttagattattataattttattaggtgttttaaagggttttttaggaatatttggggaataatattaaagattttgtttttttttttgtttattaaatgtttggtttatttttttttttttggtggaatttttttattttttatttaagggaaataattttaaagatttatttagttatagtattaagttgttttgtttattgttttttatgatttttggatttgtttttggagagttttttttttttatagttaaagtaggtattggaaaatatgtttttaaataagtttttaaaagttggggagatgtagagtgatattaagttttgaatatgtgtaggtaggttttttatttatttgatatgaggtgttttatgtgataatagttataaagtttttttttagatatatttttttggtttgttatatttttttgtttttttgtttttttgtttgttgatttttttgttttttttttgttgttttatttttttgttttttatttgattttgagtattttgggtttattgggttttgatgggagagttagatttttttttttttttttagagttattttgtttagttgaaagtatatattgggtaagattttaattgatttttttttttttttttttgagatggagttttatttttgttgttttggttggagtgtaatggtatagttttggtttattgtaatttttattttttgggtttaagtgatttttttgttttagttttttgagtagttgggattataggtatgtgttattatgtttggttaattttgtatttttaggagtgataggatttttttat

SEQ ID NO: 657 - DNA, 6235 bp, Artificial Sequence
  chemically treated genomic DNA (Homo sapiens)
atggagaaattttgttgtttttaaaaatataaaattagttgggtgtggtggtgtatgtttgtaattttagttatttaggaggttgaggtaggagaattgtttgaatttgggaggtagaggttgtagtgagttgagattgtgttattgtattttaattagggtaataagagtgaaattttgttttagaaaaaaaaaaaaaaggattaattaagattttatttagtatatatttttaattggataaaatggttttgggaaaaggaagaaaggtttaatttttttattaaaatttaataagtttaaagtgtttaaaattaagtgaagagtaagagagtgagatggtaaaagagagatagaggagttaataggtaggagagtaggaaagtaaagagatatggtaaattaaagaagtatgtttggaaaagaattttgtggttattgttatatggaatattttatattagatagataagaagtttatttatatatatttaagatttaatgttattttgtatttttttaatttttaaaagtttatttaaaagtatattttttaatgtttgttttagttgtggaaaaggaagattttttgagggtaaatttaggagttatggaaaataatgggtagggtagtttggtgttgtgattggatgggtttttaaggttgttttttttgaataaagaatgagggaattttattaggggaaggagagtagattaaatatttggtgaatagaaagggagatagagtttttagtgttattttttaaatatttttggagagttttttgagatatttggtaggattatagtgatttaaagaggtatggttatgtgattgttttggttaatgatgtatgggtagaagtgatgtgtgttataagtggatgttttgatagttatgatgttttgagttttttttttatagttaggatagttgtgaaaaggggtattaatatgaggttttttttagtttgagttttttagtgattataatgagtagagttattttgttaatttataatggttatgtagtagaaatgattaatttttattggaataagttattgatatgttagggttgtttgttagggtagtataatattgttttttttgatagaattgggagtgagagataaggttggagagagaaggagttggattgtgaaaagttttttttttaaggtataggaattggaatttttttgattgtaaggaaaagttaatgaaggtttttaagtaggggtgttaatatgaatagatttgttatttttttggatgaaatatgttattttttaatataaggagaagattagtttattaaattatatgaggtagagaggaatatatagaattttaggtaaaagatatatatttatgtaaagttttaagttttgaaatttttaaatataagagttttgaatggagttatagttagaggattaggtaagaaaattttttttatgttataagtgttattttttttgtagataattaatattttataagaaagtttgttagagtagagaaaatataaaggaatgtaatatagatttgaggttaatttttagttgtttgtgtgattttaataaagatatttaatttttttgggtttatttttttatatgttaaatttggataataatatatgttttttaagatagttgtggggagaaaatagtgtatttaaattgtttaggagaatgtttggtagataataagtgtttaatatatgaaattgatttttattattgttattaaaaaatatttagaatattaattttttgaatataatagaaaatgatttagggtaatagatagaggagaatgttttttttttgaggaagtaattggattttgttattattgtatatttatttattttattttttttttagtttagtgtttggtttatagtaggtttttagttattttttgtagattagtgaaagttaggtgagtgtttggagtgaagaaaagttggtaggttttttattgatattagttgttgttggtttttgaatatttaaagttgtaaatattttagggttgggggtaatgaatttaaggttgaattttaagtttagaagtagtgaagtttgaatttagaatttaggaatttaaattgttgtaggtttaattttaagttttagttttagatagaggtttgggaaagatttgatttttaatttggttttttttttttttttttttttgatgttttttataggaaagtatatttggttttgttaaattgtatttttatattttggtattttatttaggttttgtgaggatggaaattgtgaggtaggggagggaagtgggttgtttggttattatttttttagtgttgtaggtgattttgttatattaatttttggtagtttagtgaggtggatggtattggttttatttgtagatgagggaaatgaagtttggaggagttttgtgatttgtttgttttatattgtggtagtttggttatgaaagaattaggatttttgattttgggattttttttattatatatttttgtttttaaggggtggggggtggggggagaataaaataattgtggaaaaggaattatttatatgtgtttagtgttttttagaggttatttaggatatgtgtttattatttggttgggagtgtagagatttgaagtttaggttttattttgggttttgagtattattgtgtgattttatgtgagtgtttgttgttttttgggtttgtttttttggaagtaatttggtgtggatggagtgtgtgtgtgtgtgtgtgtgtgtgttatgttgtgtgtgttgtgttaagtgtgtgtgtgttgtttgggggtgggagggggagtagattaatattggggttttttgagttttggattgtttatatgtttgtttttatttggattttgttatttattaattgtgtttattataaaaattgtttttttgaggtaaagttgtgaatttttgtgtttttttttttatggttttggaggatgaagtggggtgtaatggagatttagttgagtgtttagttttgggtaatataaattttttggtttttatgagtagttagatgattttgtggattgttgtttttgaatttgattgagatgtaaattttggagtgtttttaatgtggggggttgatttttgggagattgtttttaaatttaagtttttttaggtttgtttttatttgggattttatagagttattttaagggtggtatttttgtttttttggaagtgtgggggggtggtagtgtatttggatttttagtttttagttttgtgtggtggtggttgttggtggatgattttgggttttataagtggggaaataataattattttttgtttgtatttttggtttaaaataattggttaggttttttggttttttgggtttttgtattttttgtatttttgtttgtagttgtgaatttgagtttttttttattagaggttgtgagtgtttgtttgtttgtggtagttattgttattagatagttaaattttaagatgttagtttataatgtattgggtgggttgggaaaaatggtttggggaggggattggggaagagagggttgagaggtgtgtggtaggggggagggtaggagaaagaagggtttgattgtaggagggtagtggagtattattttattttgtgagtttttgtgggtttagagaagaattttttagggtggagtttttatggtgatgggtgggtttgtttttttgagagtgatgtgagttaatgggaaggttttggggtgatattatgggttatttttaggggttgattggtagtagataagtgttgagtttgggttggataagggtttagagttgtattgagtgtggttgaagtagtgaggtgggagtggaggtgtgtggagttaggtagatagatagatatagttagttagttaggttggtagtatagtttgaattgtaaattttattttttttttattttttttttaattgtttagagttagtgtttgtggtttttgggttggtgttttgggagtgtttagagagtttggtttttagttgtttttgggaggagagttttgttgtttaggtgttgttgatagtggtggaaagtagtggtatttatgtgtttgttgggggaagttggtgagtggttgtagtagtaaagaatttttttggttgggaggattggagataagtggtagagttttggagttaatttttgtaagttttttttgtgttttaggtttttttatggtggtaaagattagaaggtggtggagagttatgtaagagaagaaggatgtgtgtttagttttgtttgtattggttgttgaatttgggtgagtgtgagttgtggttgttgggtgttttttttttttagtagtggaggaggggataagttgttggagtttgggtggttaagatttgttgttggttggttattgtagggtttgtattgatttgttttgtggggagagttgttgttttgggaagtgagtttgtttgtggattttgaggaattgttgtgtatgaagagtgtttagtgagtgattgtgattttttaaagttgggtagtgtgtgtgagttgataagtaagagtgtgggaggtattttaattaattttgtgttttttggagtgagttggtgaggagggtgtagtggggatgatagttagtgggtgtgtgtgtttttagagaaattttttttgttaaaggttttggggggtgtgggtgttttttgtttgttatagttttgttgtggttttgaaatttgtgtgtgtagtttaaattaattttatgtgaagtgatggattgttttatgattgtaaagatggaaatgattttttatgatgatgtttttaatgttttgttttttttgtttgagagtggattttatggttatagtaattttaagattttgaaatagagtatgattttgaatttggttgatttagtggggagtttgaagttgtatttttgtgttaagaatttggatttttttattttgtttgatgtggggttgtttaagttggtgttgtttgagttggagtgtttgataatttagtttagtaatgggtatattattattatgttgatttttatttagtttttgtgttttaagaatgtgatagatgagtaggagggttttgttgagggttttgtgtgtgttttggttgaattgtatagttagaatatgttgtttagtgttatgttggtggtgtagttggttaatggggtaggtatggtggtttttgtggtagttttggtggtagggggtagtggtagtggtggttttagtgttagtttgtatagtgagttgttggtttatgtaaattttagtaattttaatttaggtgtgttgagtagtggtggtggggtgtttttttatggtgtggttggtttggttttttttgtgtaattttagtagtagtagtagttgttgtattatttgttttagtagatgtttgtgtagtatttgtggttgtaggttttgaaggaggagttttagatagtgtttgagatgtttggtgagatattgtttttgttttttattgatatggagttttaggagtggattaaggtggagaggaagtgtatgaggaattgtattgttgtttttaagtgttgaaaaaggaagttggagagaattgtttggttggaggaaaaagtgaaaattttgaaagtttagaatttggagttggtgtttatggttaatatgtttagggaataggtggtatagtttaaatagaaagttatgaattatgttaatagtgggtgttaatttatgttaatgtagtagttgtaaatattttgaagagagattgttgggggttgaggggtaatgaagaaaaaaaataatatagagagatagatttgagaatttgataagttgtgatggagagaaaaaagaagtgtttgagaattaaagttaagggtatttaagttggattgggttgtgttttgatggtgtttttagtgtgtatgagtgggaaggatttggtgtgtttttttttggtgtggagttagggagtggttgtttgtgggttgttttgttttgtggatgggttgtttttgtgtgaatggaatgttggattttttgttaatattgattaagaattgtatggatttaatatttgattttatttagtattaaaggggggagggggagggggttataaattgtaatagagattgtagattgtttttgtagtattttttaag

SEQ ID NO: 658 - DNA, 6140 bp, Artificial Sequence
  chemically treated genomic DNA (Homo sapiens)
atttgtttgagattttataaatgttaattggaatttaagttgggttttggttttttaattagtgatattttgtttgagatgtggtttttggttttttgtgtgttaagatatttttgtttttttattttagttttagttttttttagtaggtttttttaggttttgttgaaatgtttgtatgattttttataaggtaatgtgatagttaaaaattaaattttggttggatgtgggggtttatgtttgtaattttagtattttgggaggttgaggtgggtggattatttgaggttaggagttttagattagtttgattaatatggtgaaattttgtttttattataaatataaaaaagtagttgagtatggtgggtatttgtaatttgagttatttggaggttgaggtaggagaattatttgagtttggggaggtagaggttgtagtgagtttagatggtgttattgtattttagtttgggtgatagagtgagattttgttttaaataaatgaattttaatatagttgttggtggtaaggtttttttttatgattaagggatggtggttattttttttaagtttttttatttgtaaaatgggtataatttagtggttttttttaatagggttggttaggtatatatggttattagttttatttgttgtgtgattttggttattaatgtttatattttttagggtttttaatgagttggaagtttaaagtgtagggttttaatagtaaagggtagagtaggtaggagaagtaggaagttttgggttaaagttttgaaagtgagggagtttaaggttagattatttttgtatagtttttttaaaaggttgtgtgatgttaagttagttgtttaatttttttgaattttagatttttttaaagtagggagtaggatgttgggaggaggaggagaagtgaattttagggagatatttggaaaattttagttttggaggtagattttttgggttagattttatttgtgttaatttttttttggtattgggtttattagtttgttttgggttttagtattttttgatttattaaaagagaaaagtttatattgtaagttaagtattgttttgtaaatataaatttttttaattgttataattttatggggtaagttttttgattgttttttttattttatatggataggtaaattaaggattaaaaggttaaaaagtttattaagtttttgtttttttttttttgttttgggttggggttgtgttttttttattttgaaattttttttttttaaaaggtaagggggtattagttagttttaaatgtagattaaagattttaagatttttttttaatttggatattagttggttttgtgttaaggtgtgtttagggggtgtttgttgtgtgttagatgtgtgggttgtttttagatatttgttttttgttttttttaataaggggaggagttagggatagagggaggagagaaaggtgggggtgtaggggggaagtgaattaggttttgtttagtttgttaggttttggtgggggaagaaggaggtggagagttgagttggtgtaatgagattttattgaaaatagaaaattgggtgaattaaggattataaataggaatgtggatttgtagtaaaataaaataaaatagaataaaaaagggaggggggattggttgaaagaattgaaggggggagtgagattgaggaaaggggtggagaattttttttttttttttttatttttttaaaaaattaatataagaaaatatatatatatataattaatgtttgtttttgagtagaaatataaatagggtagaattgaatattttgttttttttttttttaaagaaaaaaaaaaaaaagtaaaagtaaaggaaaggtagggtttgaggttgtgtttttttggagtttttttttgtggtgtggtgtataaaggggtagttgagatgtgtgggtttgtgtaatatggggtggttgtgtgggggaaagaggtagtgtgagggtgggggggttatgtgtttgtttttttgggagtagggggtttagtttgttgagttttgggtatttttggggggggggaatttttgggggttgtgttttttttgagtttttgggtatatttggggagggggggtttttagggttgtattttttttaagtttggggtgtttatgatatttttttgtgagtttgttttttggggagggtggttgtgtatgtgttttgtgtgtggatttagtatgtgggtatttggtgttggggtagtagttggtagttgttgttgatgtggttgaggattttttgtttgagttgtgttatttgtttgtgtagtaggtttgttgtggatgttagttttgtgttttgatttttgagggtttttatttttttttttaggtgtgagatgtgttttagtttgtgtttgtggtatttggaggtggtgatgtggttgtgtagttgtttgtgttttgttttgatgtgtttttgtgtgtttatgttgatgggtgataatggtgggtttttgttgaagtttggtatgttgggtattgtttgtggtttgtttttgagtgtagttaggtgtggtggttttaatgtgtttgggggtggtggtggtgggaagggtataggtttggtagtgaaggtgattgttgtggtgttttttgtgtttttggtgttgtttgtgtagttgtttaggtttgtgtagataggtgttttgggtgtggttgttgttggggttagtttgttggggggtgtggagtttgtggttgtgtttgagggttttttggtggtggtggtggtggtggtagtggttgtgtttgtgttgagttggttttgtttgtgtaaattttttagggttttgatgaagtttttggtgaatttttgttttttgttggttgttattttggggtagaggaattgtgagtttgttggtgtggtggtgattagtttgttggattggatgatgaggtgtttgagtttgggggaggttagttttagtagttttaggttgggagaggtgagtaggttgttggggggtgttgtgttgggggtgttgttggtgtgtaggggggtaggaggtggtgtggttgtaggtttgagtgttgttgttatttgtttatttaggtttagtgttagtgtgtttttttttattatgttgttggttgtggttgttgggggtgttttggggaataagtggtttggggatgtgaagttgttgttgttgttattggtgttgttgtttaggttgtttagtgttttattgttgtagaagggtgtttttattttttgttttttttgttgtgttggtttgggggggagtggttgtggttttttggggggtttgtgtttttttgtttgtttggttttgtgtttgttttggttgtggttgtagtgtttggttttttattggtggtggtttttgtgttgtgttatttgtgtgtttttttatagttttggtttggtgtgatgagtttattgtttttgtttgttattgggtgtgggtgatgttgtttatttgtatggaggggtggggttaagttgttgatgtttgtttggttgttgttgttttggtgatgtgtggtaaatgttataatagtgtgttgttttgtgggttgatgttatgggggtggttgtgtgtttgggttgggttattttgttttgggattgttgtgtatgattgatttttttggtgttgtttttgttaaggtatgttttgggtggtgtgatgggtttgggttattaggtgtttgtttgttttgaggttttgttttgtgtttgtgtgtggggttttggttgggtgggggtgggggtgggggtggtgttggtttttggggattggagggggatggggttttgtatggttaaataattttttggtgttttttgttttgttgtgttgttagggttttttttagtgtgttttttggagaggttttgtgtggatatggggttggaggtttggtggggttgtgtttgggggtttgttgggggtgtggggaggtttgtgttttttattttttttttttttttttttttttttttttattttgtgtgtgattgtttaggaagagatgggaggggagaggagggttgttagaagttgttgaaagtgtttggattttgattatttttattgagtgtgttttagaattaggagttttattttttgtttttatagatgggaaattgggtttagagaggtggagtgattattttttgagagttagttaggagttatagtagggtttgggttgtgattaggtttgagtttttgtttatttttagaattttagaatttgggagtttaggtttttgtgtagttttttttttttgttgtttatgttttaattttaggtttgttagggttgtgatgttttgggtgagggtgtttaattttaggggttgggttgatgaggtaggaatgttgggtataattattatatgtttgttattattattatggttgttagggtttaatgagttattattaagattggttgggaagggggtgtgagggaggagagatggatttattttattaatatttataagggatttttaggatatttggatttgatttatagtttttgtatgtatttttttagttttttatttttgtttgaatggagtttatatttttttttttttgatttttttttttttattttttttgatttttggttttttagttgtaggattaattgtatttttgggtttttgtatgtgttatgttttttgtttggtattttttttttttagtgtaaagatgtgtttttaggaagtgttttatttttagattttatttttttattgtagtttttgaatttgttagaatgatggagtggattatagtttttgaaggttagggatattgtttatgttgagtttgttgatagggttttgtatagaatggatgtttagtattaaaggtgaatgtggggttgggtgtggtggtttatgtttgtaattttagtattttgggaggttgaggtaggtagattatttgaggttagtagtttaagattagattggttgaaatataaaaatataaaaaaaaaaaaaaatatgaaaattaattgggtgtggtggtgtgtatttgtaattttagttatttaggaggttgagatatgagaattgtttgaatttgggaggtagaggttgtagtgagttgagattgtgttattgtattttagtttgggagatagagtgagattttagttttaaaaaaaaataaaaaataaaggtgaatgtaataaaaggttgtttgtgtgggtggtttttagttttagtttgtttgtttggttagtgggtatgtgttattttttttttattttttttatttatttggttttgtttttaattggggtatgaaggttataagggaggttgtttttattattaagagaggtggtttgttggttatatgtggtgatttttgtttgtaattttagtattttggaagtttgaggtaggtatttgaggttaggagtttgagattagtttgattattatggtgaaattttatttttattgaaaataaaaattaggttgggtgtagaggtttatgtttgttattttagtattttaggaggttaaggtaggttgattatgaggttaggagattaagattattttggttaatatggtgaaattttgtttttattgaaaaataaaaaaaaaaattagttgggtatggtggtgggtgtttgtagtttttagttatttgggaggttgaggtaggagaatggtatgaatttgggaggtagagtttgtagtgagttgagattatattattatattttagtttgggtaatagagtgagattttgttttaaaaaaaaaaaagaaaaaagaaaagaaaaaaaaattagttaggtgtggtggtaggtgtttgtaattttagttagttgggaggttgaggtaggagaattgtttgaatttgggaggtggaggttgtagtgagttgagattgtgttattgtattttagtttgggttatagagtgagatattgttttaaaaaaaaaaaagaagaaaaaaaaaataggttgggtgaggtggtttatatttgtaataagtattttgggaggttgaggtgggtaagttatttgaggttaggagtttgagattag

SEQ ID NO: 659 - DNA, 6140 bp, Artificial Sequence
  chemically treated genomic DNA (Homo sapiens)
ttggttttgaatttttgattttagatgatttgtttgttttagttttttaaagtgtttattataggtgtgagttattttgtttagtttattttttttttttttttttttttttttgagatagtgttttattttgtagtttaggttggagtgtaatggtgtaattttggtttattgtaatttttattttttgggtttaagtgatttttttgttttagttttttgattagttgggattataggtatttgttattatatttggttaattttttttttttttttttttttttttttttttttgagatggagttttgttttgttgtttaggttggagtgtagtggtgtgattttggtttattgtaagttttgttttttgggtttatgttatttttttgttttagttttttgagtagttggggattataggtgtttgttattatgtttggttaatttttttttttattttttagtagagatagggttttattgtgttaattaggatggttttgattttttgattttgtgattagtttgttttggttttttaaagtgttgggatgataggtgtgagtttttgtgtttagtttaatttttatttttaatagagatggggttttattatgatggttaggttggttttaaatttttgattttaaatgtttgttttagatttttaaagtgttgggattataggtaggagttattgtgtgtggttgataggttattttttttggtgatgaggatagttttttttatggtttttatgttttagttgggggtagagttaggtgagtaaggaggatagaaaaggagtaatgtatgtttattggttaggtagataaattgaggttagagattatttatataagtaattttttgttgtatttatttttattttttatttttttttgagattggagttttattttgttttttaggttggagtgtagtggtataattttagtttattgtaatttttgttttttgggtttaagtgatttttatgttttagttttttgagtagttgggattataggtgtatattattatatttggttaatttttgtatttttttttttttttgtatttttgtattttggttagtttggttttgaattgttgattttaagtgatttgtttgttttggttttttaaagtgttgggattataggtatgagttattatatttagttttgtatttatttttaatattgagtatttattttatgtgaggttttgttagtaggtttagtataggtaatgtttttgatttttagggattatggtttattttattattttggtagatttagaggttataataaaggagtaaagtttgagggtggggtattttttgaagatatatttttgtattgggggaagggagtattaagtagagagtatagtatgtgtaaaggtttagaggtatgattagttttgtaattgggaggttaaggattagagagagtgaggggaaggaggttagggaaaggagggtgtgggttttatttagatagaggtggggagttggaggggtgtatgtagaggttgtaggttagatttagatgttttaaggattttttgtgagtattggtggggtgggtttatttttttttttttatattttttttttagttagttttaatagtggtttattaagttttaatagttatgatagtggtaataagtatgtaataattatatttggtatttttgttttattagtttagtttttggagttgggtatttttgtttaggatattatagttttggtagatttggggttaaaatgtgggtggtggaaggaaggggttgtgtaggggtttggatttttaggttttagggttttaagggtggataagagtttaggtttagttatagtttgggttttgttgtgatttttagttaatttttgggggatggttattttatttttttgagtttagttttttatttgtaaaggtaggaagtaggatttttggttttagaatgtatttagtgaaaatgattaggatttaagtgtttttagtaatttttggtgatttttttttttttttttgtttttttttgagtaattatatgtggggtggagggagggagggaaggaaggagggagggtgaggaatgtagatttttttatatttttggtgagtttttggatatagttttattaggtttttagttttgtatttgtataaagtttttttagaaggtgtgttaggggaggttttggtggtatagtagagtaggaggtgttaaggagttatttagttatgtgggattttatttttttttagtttttggaggttggtattgtttttgtttttgtttttgtttggttggggttttatgtgtggatatggggtggggttttggggtgggtgggtgtttggtggtttgggtttattatgttatttgggatgtgttttggtggaggtggtgttggggagattggttgtatatagtggttttggggtggggtgatttggtttgggtgtgtggttgtttttatgatgttaatttataaggtagtgtgttgttgtggtgtttattgtgtgttgttggggtaatggtggttgggtgggtgttggtggtttggttttgtttttttatgtaaatgagtgatgttatttgtatttaatggtgaatgggggtggtgagtttattgtgttgagttgaggttataagagggtgtataagtggtgtggtgtaggagttgttgttagtggagggttgggtgttgtggttgtggttggggtgggtgtagggttgagtggatgggggggtgtgggttttttgggaggttgtggttatttttttttgggttggtgtggtgggggaggtggaggatggaaatatttttttatggtgatgaggtgttgagtggtttgggtggtggtgttagtggtagtggtggtagttttgtgtttttgggttgtttgttttttggggtgtttttgatggttgtggttggtagtatgatgaagaaggatgtgttgatgttgagtttgagtgagtaggtggtggtagtgtttaagtttgtggttgtgttgttttttatttttttgtgtgttgatggtgtttttagtgtggtattttttgatggtttgtttgttttttttgatttggggttgttgaagttggttttttttgagtttgagtgttttattatttagtttaatgggttggttattattatgttgatgagtttatagtttttttattttaaggtggtggttagtgaggagtaggagtttgttgagggttttgttaaggttttggaggatttatataagtagaattagtttggtgtgggtgtggttgttgttgttgttgttgttgttgttggggggtttttgggtatggttatgggttttgtgttttttggtgagttggttttggtggtggttgtgtttgaagtgtttgtttatgtgaatttgagtagttatgtgggtggtgttgggggtgtggggggtgttgtgatggttgtttttgttgttgaatttgtgttttttttgttgttgttatttttaggtgtgttggggttgttgtgtttggttgtgtttaaggatgagttatagatggtgtttgatgtgttgagttttggtgagagtttgttgttgttgtttattgatatggatatgtaggagtgtattaaggtggagtgtaagtggttgtgtaattgtattgttgtttttaagtgttgtaagtgtaagttggagtgtattttgtgtttggaagagaaagtgaagatttttaagagttagaatatggagttggtgtttatggtgagtttgttgtgtgagtaggtggtgtagtttaagtagaaagtttttagttatgttaatagtggttgttagttgttgttttagtattaggtgtttgtgtattgagtttgtgtgtggggtgtatgtgtggttattttttttaaggggtgggtttgtgggggggtgttgtgggtgttttggatttggagagggtgtggttttggggattttttttttttgagtgtgtttaggaatttagagagggtgtggtttttggggattttttttttttgagggtgtttaggatttgataagttggattttttgtttttgggggggtgagtgtatgatttttttgtttttgtgttgttttttttttttgtgtggttgttttgtgttgtataaatttgtgtgttttggttgtttttttgtatattgtgttgtggaagggggttttgagggggtgtagttttaaattttgttttttttttatttttatttttttttttttttttttggaagagagaagaatagagtgtttgattttgttttatttatgtttttatttgggaataaatgttggttgtgtgtgtgtgtgtttttttgtgttggttttttaaagaaatgggaagaagaaaaaaaaattttttgtttttttttttgattttgtttttttttttggtttttttgattggtttttttttttttttttgttttgttttgttttgttttgttatgagtttatatttttgtttgtaatttttggtttgtttggttttttgtttttagtaaagttttgttatgttagtttggttttttgtttttttttttttttgttggggtttggtgggttgggtggggtttggtttgttttttttttatatttttgttttttttttttttttttgtttttagtttttttttttgttggagggagtagagagtgggtgtttgagagtggtttgtatatttggtgtgtagtgagtgttttttagatgtgttttggtgtggggttggttgatgtttaggttggggaggggttttggggtttttgatttgtgtttggaattagttaatgtttttttgttttttgggaaggagagattttgaggtggaaagggtatagttttagtttaaagtaggaaggaagagatagaaatttagtaaattttttaattttttggtttttggtttgtttgtttgtataaaatggggagaatagttgaaaaatttgttttataaagttgtgatgattaagagagtttatgtttatagagtagtgtttggtttatagtgtaagttttttttttttggtggattgggggatgttgaggtttaggataagttgatggatttagtattaggaggaagttggtataggtgggatttaatttaagaggtttgtttttaggattgggattttttaagtatttttttgaagtttgtttttttttttttttttaatattttattttttattttgaggaaatttaaggtttagagaggttgagtaattggtttgatattatatagttttttaaggagattgtgtagagatagtttgattttggatttttttatttttagagttttgatttgaggttttttgttttttttgtttgttttgttttttgttgttaagattttgtgttttgggtttttaatttattggggattttgagggatgtgaatattagtggttgaggttatatagtaagtagggttggtggttatgtgtatttagttagttttgttagggagggttattgaattgtatttattttatagatgaagaaatttggagagaatggttattgttttttggttatggagaaaggttttgttattaatagttatgttggggtttatttgtttgagatagagttttgttttgttatttagattggagtgtagtggtgttatttaggtttattgtaatttttgtttttttgggtttaagtgatttttttgttttagtttttaagtagtttagattataggtgtttattatgtttggttatttttttgtatttgtagtagagatagggttttattatgttggttaagttggtttggaatttttgattttaagtggtttatttgttttggttttttaaagtgttgggattataggtgtgagtttttatgtttggttagggtttggtttttagttgttatgttgttttgtgggaggttatgtagatgttttagtagggtttgaaggaatttgttgaagggaattgaggttgaggtgggagagtaggggtgttttgatatataagagattaagaattatattttgggtagagtgttattggttgggagattgggatttagtttaggttttagttggtatttgtgagattttaggtgagt

SEQ ID NO: 660 - DNA, 6234 bp, Artificial Sequence
  chemically treated genomic DNA (Homo sapiens)
atttaattttggtattgatggtttttatttttttattttaggtttttttttttagagtgtttgaggttttttggttttttggttttttttaggtttaaggtgttgattttagtttttggttttaatatttataggaatattgggattaagaaaattaattgtgttaattagtaaaattttttatttgagatgttattttaaaagtaaattatatgtaaaatatttaatgtggggagttttgtaatatgttttttttgttatatgattattatatatttgtttggagtttggggtttttaaattatataaggttttatgtgattgttataaaatttttttattttttaaaggtagggtagtaaggattaagtttgattattgaaggtagttttgttgtaagtggtttttaatgttataaaagtagtttgggaagataggtttattaaataaattttttgggttgtaaattattagaagtaattgtatgttatgtttatttgtttaatttgaaaggtatttatttggatgtttaaagaaattatgtagattaatattgtttttagtgtttataagaaagttggttgattttaaaggaaatttagggagttttttgaggaagttggattgtagttgagtatatttttttgtggtttttttattttttttgtaaaaagttttttataggaatttgtgtttggaggaaaaggggttgtgatttgttaatttgaagatgggagattttaaaggaattttatttaattagttttgtattgttattttatgaatagagaagttaggtggttgtttagtgaggggtagggttggtattatatttgagtttttttgttttgtgttttttattttttagtggatttggtgattttttggttttggagttattttgtgtttttttaatagtaggatgaatatataggtgatgatgagattgtaatgggataagggggagaggtgtggggagtttttgatgaaaatttgggtttttgaaattattatgatgaagggaggagtttgtattagtaggtgtaaggagtgtgagtttgagttttgtttattagatagtttaagtagttatatttttgaattttggttttttgtaggttagtttttggttaggtggtggtttttttttttttttttttttgtattgagatttttatttggtttttgattttggagtttttgatatagtttttattattgaagtagttgtggttttttatatagttttttttattatgttagtaaggggattgagtttttttagtatagttagggttaggtttatatatttttttgggaagttagtatttttttttgtggattgtttttttatttttatagggtttttttaaagggtttttggatgattatattggttttttttttttagggtggggaattagagatgttaagattggttagttttttttttttaagagtttagggatttgttttaaaatattatttagataaatgtatgagttatgtgttaattgtaaaattatttaatagtatatttgttagaatattagttggtattttgattttattttggtattgttttttttttggttttattaagattttggttttaattgggttttggtagtaataggttgtaagtggttaggtgtatagtattattttttagtagtgtggtgtggtgttggtggtttattttttttatgtatatatgttttaatatggaaggatagtttgtatatatgtagggtatgttattatgagatttttttatagagtatgaaattgaggattagagaagttagatgagttttttgaagttttatagaaggttaatggaaaaaattagagttaagggtaaatatgttttatttgtttttttatattagtttaaatgtgaatggttgtttggaatatagtgttgagaaggattttgaggttgtgtttaggtttagtggggaaaaagtgttttgatttgattattatattgtgtatttagggtttagtttattttttataagtagttatttaaaatatgttttatttaaggtagggttggggtggggaattttagaggattaatgatgtagtttgtattgttattagggtttattttaaagtaaattttgttgaagtttttttttgaataatttttattatttatgttaatatgttggattttgtaagttataaatatgaaggtatgagtattggttgaattttaatagggaaattttattgggaaggtgaagatttttttttattaagataataaatagaatttagaaggtttgtagtatggtggtttagaatatgtgggttttggatgggattttgttaaggggtgtgtgatttttttgaagtttttagggatgatattattttttggggtgtttatgttaattatgttagagataatggtttttgtatttattgtttggggttgttataataaagtgttatatattgagtggtttaaaataatagaaatttattgttttatatttttgggggttagaagtttgaaatttaggtgtgttaggattttgttttttttgaaggttttagggaagagtgttttttgttttttttgaaggttttagggaagggtttgtttttttaggtttttggtggtttgtaggtgtagttttttaatttttttttttaagtggttttttgtttataaggatatgagttatattggatgaggggtttattaattgatggtttttgtaaagtttttatttttaaataaggttatattgtgaggtattgggagttaggattttaatatagtttttttggtggatataatttaatttttaataatgtttatataattttaagtagggtttggtattttgtgtgttttttggagagtggttgagttaggttttggtagtgtttaggttattggtgattgtagtttttggatggtattgtttattataggttttggaggttgtttttatggttttttgatagggtttttgttggtttgggggtttttgattaggggagtggtattaggaggggagagatttgtgttttgggtttagtgtagttgttttgagtaggattgggatttttattaagtgggtgttgttttatgatttttgtgtgtttttaggattatttgggtatgtggtaggttgtttgtatgtttgtggattatttttgtgataggaaaaggtatgggttatttggtaaattaaggtatagagttttaggtggaagttgggaaggtgttgtttggtttgtattggttgaagggttatttgggttaggtgtatagggtagtggtgttgttggaggattagggttggtgtgttggtgtttagtgaggatgtgtagattgttttaggtttggtgttgttgtatagggtatgtgttgatttggttgggtgggaatattttgttttttttgggttttgttttagttttgtttttgtgtgttttggttttgtttttgtgtgtttttttgttttttttaggtttttggttttgttttgttttagattttgttttatgttgttatttttgtgttttttggttttgtttttgtgttttggatatgttgggatagtttgtgtttttagaatgttttgtgttttgatgtttgtaggtttttgtggtgtgtattgtttgtgatttggtgagtgtttgggttgttttgtttttggaagagtgtggagtttttttttgggatggtggtagttttgagtggttttgtaggtgtttttattttgttgttgggtgtggggttgttttgatttttatttattttgggtgagttttaggtgtgttttaagtgttttttaggtgttgtttagtttttttttgggtttggggtttttggattaggttgtgttgtagtgattgtggattggtgtgtggtgggggttgtggtagtttttgttttatttttaggtgttagttttaggtttgggttttgggttttttttatttttttatgttgttagttttttttttgttagttgttttaggaagtttttagaagtttttgtgtgggttttggtttgtagtaattttttagtatatttaggtagagttttatattttttttttgttggaggttaagttttaggggttttttggttattatggttggtgtttgtgtatattatattttaattgtatttattaatatttagagtaagtaaggtttgttggagagttatatatattgggtattgtaatgttggttataatattgtagaggagttttgaattatgtattttgtatttttgggtttattattttttgaaattttagggtggtgtttgtttttagttgttttagttgagtagttggttttttgttttggaaagtagattttgtatatgtgtgtgtaatttatgtttgttgagattattattagatagggaagtggtttggtttagagagttgtttttagtagaatgttaagtatagagagttgagaattagattggttatttatatagatatttaaatagaaatttatagagtatttgttaagttaggtttttttgttattttttttatttttgggtaggtgtttaggagatggttttgttatttttagggtttttttaatggttaaaatattttgggagatgaataagattttaaaaatttaaagtttagtgtatttggtgggtgggggtgtgaaaattttgaaggaaattgtgttaagagtttggttgattgttaatattatgttaatttagagggttaggatatttgtttagatttggagtttgtttgtaagtagtagaggagagttggttttgttttgttgtgtgtttttttttttgggttttttgttttgggttggaatttgaatagtggagtagtgtttgttatagttaggggtttggatgaagtagattattagtatggagttatatttaggtattttttaatgtatatatttttattaaaaaaaaaaaatttgggttaggtatagtgggttatgtttgtaattttagtattttgggaggttgaggtgggtggattatttgaagttaggagtttgagattagtttggttaatatggtgaaatttagtttttattaaaaatataaaaattatttaggtgtggtggtgtatgttggtaattttagttatttgggagattgaggtaggagaattgtttgaatttgggaggtggaggttgtagtgagttgagattgtgttattgtattttaatttgggtgatgagagtgaaattgttttgaaggggaaataaaaaaatttgtattaaaataaggatttaattaatagtattaggtattattttaaaaaggttttgttgttagtaaggttgaaagaaatagagttttaggtatatattgggtagtattttgtttagttgtttagatttttgaattttgttgaggttttattttgatattatttgggttttattttttgttgtttgggttttttttttaggtgttttaattagggttttttttgtttttttgtagggaagaagggggtaggaagggtttgaaaaagaatttgttttttttattgtttttttagagtttgtttttttttagttttttttttatttttttttaggatattaaaattttgatttttttagtattttataataaaataaagttattaaattgtttgttttgttttgtagaggatatatatttaggagttagtgatttagattttttatttttttttttggtgttaatgttttttttagtatattttttttgatagaaaaaaaatggaggtaaaattgaattttttgtattatttttttttttagtattatttttgtttttgtattttattttgatttttttttttagtataaagttttatgtttagatttatttgttttgagatttttgatttttgtttgggattttagtttttttaggggatatattgagttttttagattttgtagggttttgtgtttatttggtttttgggttgttgttatggttttttttgattttttgttttttgggataagtagtttttaatgtagttattttttgaaagagttggggttttattgtagaatattattttattatttttagagataaggttttggttttttgtttaggttggagtgtagtggtgagattatagttttttgtagttttaagtttttgggtttaagtgaattttttgttttgattttttaagtattagggattataggtgtgtgttattatatttggtta

SEQ ID NO: 661 - DNA, 6234 bp, Artificial Sequence
  chemically treated genomic DNA (Homo sapiens)
tagttaggtatggtggtgtatatttgtagtttttggtatttgggaggttaaagtaggaggtttgtttgagtttaggagtttgaggttgtagggagttatgattttattattgtattttagtttgggtgaaagattaagattttgtttttaaaaataataaaataatattttgtggtaagattttagtttttttagaaagtagttgtattaaaaattatttgttttaggaaatagagggttaggaaggattgtagtaatagtttaagagttgaatgagtatagggttttgtagggtttgggaggtttaatgtgttttttggagggattagagttttaaatggaagttaaaaattttagggtaagtggatttggatatggaattttatgttggggaagggggttagaatgaagtgtagaaataagaataatgttaaaggaaaagataatgtagaaaatttagttttgtttttattttttttttattaaagagaatatattgaaaagagtattagtattaaaaagaaaaatggaaggtttgaattattggtttttaaatgtgtgttttttgtaaaatagaatagataatttagtaattttattttattataaaatattgaaagagttagggttttggtgttttaagaaagggtgggaagaggattggagaggaataaattttgagggggtaatggggaaggtaagtttttttttaggttttttttattttttttttttttgtaaaaggatagaggaggttttgattgagatatttggggaggaaatttaaataatgaaaagtaaggtttaggtgatattaaagtaagattttaataaggtttaagaatttgagtagttgaataaggtgttatttaatgtatatttagggttttattttttttaattttattaatagtaaagtttttttaaagtagtgtttaatattattagttaaatttttattttgatatagatttttttgttttttttttaggatagttttatttttgttgtttaggttggagtgtaatggtgtaattttggtttattgtaatttttgttttttaggtttaagtaatttttttgttttagttttttaagtaattgggattattagtatgtattattatgtttggataatttttgtgtttttagtagaaattgggttttattatgttggttaggttggttttaaatttttgattttaggtgatttatttattttggttttttaaagtgttgagattataggtgtgatttattgtgtttggtttagattttttttttttaatgaagatatatatattgaaaagtatttgagtatagttttgtattggtggtttattttatttaggtttttgattgtggtagatattattttattatttaaattttaatttgagatagagggtttaggaagaaagatatgtggtagagtaaggttagtttttttttgttatttgtaggtagattttgggtttgggtaagtattttggttttttgagttaatgtgatattaataattagttaggtttttgatgtggttttttttaaagtttttatatttttatttattaggtgtgttaagttttgggtttttaaaattttgtttattttttagagtgttttagttattgagagggttttgaaaataataaaattattttttagatatttgtttagggatgggggagatgatgggagagtttgatttaatagatattttataggtttttatttggatgtttatgtaaataattagtttaatttttagttttttgtgtttaatattttattgagaatagttttttggattaagttgtttttttgtttgatgatgattttagtaggtataggttgtatatatatgtataaagtttgttttttaggatagaaagttagttatttagttgaagtaattgagagtaaatattattttgagattttaggagatgatgaatttaggagtgtgaaatatatagtttagaatttttttgtggtgttataattgatattatggtgtttagtgtgtgtggttttttagtgagttttgtttattttaagtgttgatgaatatagttagggtatgatgtatataaatattagttatagtaattagaaggtttttagaatttggtttttagtaggaaggaaatatgggattttgtttaagtatgttaaagggttgttgtaagttaaggtttgtgtaggggtttttggaagttttttggagtagttggtggagggaaagttggtagtatggaagggtaggaagaatttggggtttgggtttggggttggtatttagaggtaaggtaggggttgttatgatttttgttatatgttagtttatagttattgtagtgtagtttagtttaggaattttaggtttggggaaaggttgggtaatatttgggaggtatttggggtgtatttggagtttgtttgggatgggtgggggttagggtggttttatatttgatggtgaagtgagggtgtttgtaggattatttgaggttgttattgttttgagggagagttttgtatttttttgggagtgaggtgatttagatatttattaagttgtaaatggtgtgtattgtgaggatttgtgggtgttgggatgtaaagtgttttaggggtgtgggttgttttagtatatttggggtgtgggggtggggttgaggggtatggggatggtggtgtggggtggggtttagagtggggtggagttgaggatttgagaaaagtaagagagtgtgtgggggtggggttggggtgtgtgggggtggagttggggtggagtttgggaggggtggggtgtttttgtttgattgggttggtgtatgttttgtgtggtggtgttgggtttgaggtagtttgtgtatttttgttggatgttggtatgttggttttggttttttggtagtgttgttgttttgtgtgtttgatttggatggttttttggttggtataagttgggtggtgtttttttagtttttgtttgaggttttgtgttttagtttgttaaatggtttgtatttttttttgttatagggatagtttgtgggtgtgtaagtgatttgttatgtgtttgagtggttttgaaagtgtgtgggggttgtaggatggtgtttgtttagtgagaattttggttttgtttggggtggttatgttgagtttggagtgtgagtttttttttttttggtgttgtttttttagttagggatttttagattagtagagattttgttagggggttgtgggggtagtttttagggtttgtggtgggtgatgttgtttaggggttgtagttattgatggtttagatattgttagagtttgatttagttgttttttagagagtatatagggtgttaggttttgtttggggttgtgtggatgttattaggagttgaattgtgtttattagagaagttatgttggagttttaatttttagtattttataatgtgattttatttggagatggggattttatagaagttattaattagtgggttttttatttagtatgatttgtgtttttataggtagaaggttgtttggggaggaggattggagggttgtatttgtaagttattagaagtttaagaggatagatttttttttggagtttttggagggagtagaggatatttttttttggagtttttagagggagtaggattttaatatatttgggttttaaatttttggtttttggaagtgtgagataataggtttttgttgttttaagttatttagtgtgtggtattttattatggtagttttaggtaatgggtatagaaattattgtttttaatgtggttggtataagtattttagggagtagtattatttttggaggttttggagaggttatatattttttggtaggattttatttaaggtttatatgttttaagttattatgttatgggttttttaggttttgtttgttattttaatggaaaggggtttttatttttttggtgaagtttttttgttgggatttggttaatgtttatatttttgtatttgtgatttgtaggatttaatatattagtatgagtgataagggttgtttagaggagaattttagtaggatttgttttgggatgagttttggtgataatataggttgtattattgattttttgaggttttttattttgattttgttttggatgagatatgttttaaatagttgtttgtgggaaataaattaggttttgagtatatgatataatggttaaattaaggtattttttttttattgaatttggatatagttttggaattttttttaatattgtgttttaagtagttatttatatttaaattaatgtggaaggatagatgaaatatgtttgtttttggttttggttttttttattagttttttataagattttgggaaatttgtttgatttttttaatttttagttttatattttgtaaaggagttttatgataatgtattttatgtgtgtataaattatttttttatattagggtatgtgtgtatagggaaaataaattattagtattatattatattattaagaaataatgttatatatttggttatttatagtttgttattattaggatttagttagaattgggattttaatagaattaaaggaaaaataatgttgaaatggaattagagtgttgattgatattttaataagtgtgttgttaagtagttttgtagttaatatatgatttatatgtttatttgaataatattttaagatgaatttttaaatttttaagaaaaagagattggttagttttagtatttttaattttttattttaggaaagaaaggttaatgtggttatttaaaggttttttaggagggttttgtgggaatggggaggtggtttatgagagaaagtgttggttttttagggagatgtgtggatttggttttggttgtattgaaagaatttagtttttttgttggtgtggtgggaagaattatgtgaagggttatagttattttagtggtaaggattgtgttaggggttttaggattaggagttaaataagggttttagtgtagaggggaaagaggaaaaaggttattatttgattaaggattggtttgtaaaagattaggatttaaggatgtgattgtttaggttgtttgatgagtagaatttaaatttatattttttatatttgttggtgtaagtttttttttttattatggtaattttaaaaatttaagtttttattaagagttttttatgttttttttttttgttttattataattttattattgtttgtgtgtttgttttattgttaaaggaatataggatggttttaaagttgggaggttgttgggtttattgaagagtaaggaatataggatagggaggtttggatgtggtgttagttttgttttttattgagtaattatttgatttttttgtttataggatgatagtgtaggattggttgggtgagatttttttgaggttttttatttttagattaataaattataatttttttttttttagatatagatttttatgaagaattttttataaaagaggtgggaaaattataaaagggtatgtttaattgtagtttgatttttttaaggagttttttggattttttttaagattagttagtttttttgtgggtattgggaataatgttaatttgtatagtttttttaaatatttaaatggatattttttgggttaagtaaatgaatatgatatgtgattgtttttaatgatttgtaatttaagaaatttgtttaataagtttgtttttttaagttatttttgtgatattagagattatttataataaagttgtttttagtagttaaatttaatttttattattttatttttgggaaatgaagggattttataatgattatataaaattttatgtggtttgaaagttttaaattttggataaatgtgtgatggttgtgtaataaaagaaatatattatagagttttttatgttaagtgttttatatatagtttgtttttaggatagtattttaagtggagggttttgttgattaatataattgatttttttagttttagtgtttttgtaaatgttggagttaagagttggagttagtgttttggatttgggagaggttaggaggttagggagttttaagtattttggaggaagaagtttgaaatgaaaaggtgggggttattggtattggggttgaat

SEQ ID NO: 662 - DNA, 6205 bp, Artificial Sequence
  chemically treated genomic DNA (Homo sapiens)
tttagttatttgggaggttgaggtaggggaattgtttgaatttgggaggtagaggttgtagtgaattgagattatgttattgtattttagtttgtgagattttgttttaaaaaaaaaaaaaaaaaaagaaaaaaaaaaaaagaattgaagtgtttggagattagtgtattgtaatatttatatagttaagtaggtatttttaattgaattttaaaaaagtattatttttgaaattttttttagtttagatagggttagttatttgggtagaaaggaaaagaaaaataaaaaattggaaaaggatgtattagtattttttttagaaataatttaatattaggaatagaaggaggattttatttattaatttttaataattatttgatgttgttgttgggttggttaaatatttgttaatattgatgatttttttatttattattagagagaagtagagggatttgatgtttagagaagtagtaaaatttattttttattttttttttttagttggatggaagtatttggaggttggttttatattttagtattttagtgttggtgatgtagattatttttgttttagagtaattttgtgttatggaatttaagaggattttgttgtattaggataggaatgtatttttgttttatttgtttttatgaaagtagattttagagatttttagatgttatgagattaattgttatttagggtaggttttaggggagggatagagaagggtagtgttaataatagggattttggagataagattagtaatttaagaaataaatgtgagatattttatttttttttaatttattttttttttaaaagtttatttttattttttttttttttattatgtagtaattgataattaaatatagttttggtttttattatgtaatttagtagaatatttagatattaggaattttttatttttggttatttatataataatgaaatttgtagtttatgttaggttgtgtggatagtatttgtatttttggaaattaattggaggttttttttttatttttttttggttgttttttatttttttttttattgtggtttttgttttttttaagttgattagaattatgtataaaattagtttttaataaatattaatattgaagttttagtaggttgttaatttttgtatagttattttaaatgttgtatataagtgtaaagttttatggagttttagaggtttttaagaatattgtaaatattttaggtttaattagtagttttggagttaggtaatggtttgtggttttttgtgttaggttttttgaggtttttagtttttagaggttgtttgtaattatgatgtgtatatatatagtatttttttttaaatatagtataaattttttttagattttgttaggtatttataattattgaatatatatgtagattgatttttatttttttaaagtttgaaaaataatttagtgttttaatttaggttttgttagatattttttgatttaaattgttgtttgtagttttattttttaagggaaatgaaaaaataataaatttttagattggtgttgatgtttattttttttaagtgggttgattatttgttttgtagatttttgatgggtggggtgtggggtaggagtgtgatttaatttttagtatttttgaattagtttttttatggtgataggttagtttaattggggttgtaaatagatttgataggtttgttttgggttgatggttattgattaggtttttagattagataagttatttggttgagtttatagtaggtggggtgtgtttattagtttaggggtagtgattggatgtttgttgtaatattggagaatgtatgttttgggttgtagtaggagatatttttaagtatagaattaaaagggtttattttaagtggtagggtattagtgatggagaggtttgagagttttagtgtttagtttttttttttatgtttgggaaggtgtagaataggttgatgtagagtaaggagtgagttttaggttttagttttttggtttgtttttagggtagtaggtgaggagtggtattagtttggggattttttttttgtgttttgtaagaattggtggtagttagtaggtggggaggtgggggtatgtgtttggatgtgggtgtttgtgtaattagttttttaagtgttagttttgatagtgtttttttgggaggttggtttgagtttttgtttttgttgtggtgtaggaagggttggggttttgttgtttgtattaggtaagagtattttgagtaaaggaagaagatgatttgtttttggagttattattggggagtgggaatttggaaagttttttaattagggatatatgtgattttttttggaaagtagttttgattgtggtttgtgtatttttttatttttttttgaatttttttaggtttttttgttttgtttatttgttgggttgtagttttttattgttttgtattttttatttaatttggtaattttaaatgtgtatggtttggttggggtgtgtggagtttggttttgggtgatttattttgttgggtttttatggtggttaagggggggtggggttaggtggtttttgagaattgagtttgattttgatgttgtgaattgatttggagtttgaggggaaagatgtttgatttttttgggggtattggagtgggtgtaggagaggtttgtggggtgtgttttatttatagggatttttttttagtttatttagataggtgttttttgggtttttgaaatttaatggttatgtgtttatgtttagtatgtttggttgagagtttttatttttagggtaaatgagttgagttattggggaagtgagaggtggggtgttgtaagggagttggatgaggtgatatatgttggtgatataatagtaggttgttttttgtgttaagattgatattatgaggatatagatttgggggaagggggaatttttaggtaaaggttgttatagttaaatttttgtgaatgattgtgatttgatagtggtgtaaaaggaaagagtgaatgtagtttatgttgtggaaatttaggggtagaggtaaggggggagggtattttttttgtagggattgtttttgtatttttttttatattgagtagtgtggttatttggttttttttatttgtgtataggtaattttagatttgagttagtgatattgtttaatgtatttattttagtttttattattagttttttatttttgttttataatagtttattttgtttttggttgggtttttgggtagaggttgaggtttagtttgttatttttgttttgtgttgttgtaaaagttgtagtaagtgtagttgtaggttggtggttgggaattggtttgagtaagttttaggtagttatattgggtatgtttagtagagtttgtggtttggggattttgtgtttgtatttagagttattgttttgtttttttttattgttttttgttttgttttgttttttttttgtttggtgtggttttgtttgttttttgtttgttttttgtttttttttggttttttgaggtgtttgggtttttggtgtggtggtggagggggtgggtaggttggtgggtggtgatgtggtgggattttttatgtgttgtggtaggatatgtgtttggtgttgggatgtgattgtgtttagttttttttttttggaagttgtagttatgatggaagtttgagagttgagttgttgtgaggtgaggttgggtttaggtgagggagatgagagatggtggtggttgtggtttggagttttttttagtgtttgtgagtagttgtgggggtagtgtttttggggagttggttggtttgtggtggtggtagtggtggtgttttttgttttttttttgttttttttaattgtgtagttttttttttggttttttttgaaagggaaggtggaagttgtgggtttgggtgggagttggttgaggtgtggtggtggtggtggtattttttgtttttggagtgggggggagaagtggtggtggtggtggttgtggtggttgtagttttagggagggggtttgagttgtttgttattatttttagggttgggaatgttggagagttggtttttttttttttattgtttttaatatggtggtggtggtggttggtatatttagggatttgggttggttttaaattttttgtgtgttgttgttgtattttttgtggtttgggttttggaggttgttggtggaggtagttgtttggaggattatttgttttttttttattttgttgttgttgttgttaggtttttggttgttgaggagaagtaggtttagttgttgtaattatttagtagttgttgtagtagttattatttggttgtggtttagagttaagtggtggtagagtgaggggtattagttattgttaagtttagagttatttttattttgtagaagaagttttgttattagtagtttttgttatttttttttttttttttttttagttataggtttttagatatgatagttattattaaagagattgttagtagaaataaaaggagatattaagaggatggatttgatttagatttgatttgtatttatttttgtggttgtttttttttatttttttgttatttttttagaatgtgggagtagatggatgtgaaaatgtttgtagtttgggtgattataatatttaattttggttaggttgttaggttatatattttgtgttttttttttgtgtatttaatttagggtgtgtttggttagatggaatttttgtttggttgtaagtgttaagttattgattgtttttttaggttatttatatggtttttttttgagggttattgtttgttaatatagaatatagtatattgttagtggattagtgagtttggtaatttggttttttaaatgaataaaaaagtagatgttttttgaggttgagtatattttgattaaattttggtttaggttttagattaagggtttagattagaataaaatgaaaattagtgttgtatgtatgtatattgtattagaattttgtagtgattgttttagttttttgagttgtattgatagatttttttaaaatatgattgatttgtataattttagaagtagaattatttttagtatatatggtgtatattgagggtaaaaagtagttttgttaatgtttaaatttaagttatttataattttgaattgtatgtagaagttttgtagtttgaagttaatagtgttataatatattttataaggtgtttttattagatttttgttatatttatttttttttttttttatggggtgatgtaggatagtgtttgaaatttgtattttagtagtatttaatgtttagtgtttttgttataaatatagaatggatattgagtagtttttgattttagatggtaatgtgtaggtttaagggtattgtgtgtagtaagtgaagattgtagaaataaaattttagtttatgtttgaaatttaagtattgttgtgatgttagaattgttgtttattgtttttaggttttaggttttttgatattttttggtattgttaattttattgatttgtgtagaatgttagttgtattttattagttaatatttagaaatgttggtaagaggggtttattttagttttagattgtaggtatgttagttttttttatatagtgtattaaatttattgagttagtttgttgaataagatagaagtttaagaattttaatagtgtgtagttttagttgtttaaaagttaggtttttgggttttaaaagttagtggttattgaaaagtattaatttttgtagttttaggtataatatattggttttgattagggatggggatggggttttttttttgtagaatggggaaagtattgataggaattgagagttattggtaggttagtgtataaggtatgtgaaaatagaattaagttattggtttgaagtgattgaagtatttaggttttattaaggtttaaaatttggtaatatgagtttggtaatgtgaattgtggtagtggataatatttagttaaaattatgtaattgtataagtattagtatagtatttttaataaaagttattttttagtaaatgttagttgtattttgtttaaaggtaga

SEQ ID NO: 663 - DNA, 6205 bp, Artificial Sequence
  chemically treated genomic DNA (Homo sapiens)
tttatttttagataaaatgtaattgatatttgttaagaaataatttttattaaaaatattgtgttagtatttatgtaattatataattttaattaaatattgtttattgttataatttgtattattaaatttatattattaaattttaggttttgatagagtttaaatgttttagttattttagattaataatttaattttgtttttatatattttatatattggtttattaatagtttttaatttttgttaatattttttttattttgtaaaaagagggttttatttttatttttaattaaaattaatgtgttgtatttgaaattgtaaagattaatgttttttgatgattattaatttttgaagtttgaaggtttaatttttagataattaaagttatatattgttaaaatttttgggtttttgttttatttagtaagttgatttagtaaatttaatatattgtatgaaaaaagttaatatatttataatttaaagttggagtaaattttttttgttagtatttttagatattagttggtaaaatataattgatattttatataaattagtaaaattaatgatattaaaaggtgttagaggatttgaaatttaaaaatggtgagtagtaattttggtattataataatatttaaattttaagtatgaattgaagttttatttttgtaatttttatttgttatatataatatttttgaatttatatattattatttgggattagaaattatttaatatttattttatgtttatgataagagtattgaatattaaatgttattgaagtgtaaattttaagtattattttatattattttatagggagagaaaaaggtaaatataataaagatttagtaagaatgttttataaggtatattatggtattattgattttaaattataaaatttttatatatagtttaaagttgtaggtaatttaagtttaaatattaataaaattattttttgtttttaatgtgtattatatatattgaaaatgattttgtttttaaagttatgtaaattagttatattttaaaagaatttattaatgtaatttaggaaattaaaataattattgtaagattttgatgtaatatgtgtatgtgtaatattaatttttattttattttgatttaaatttttgatttagggtttaagttaagatttaattgaaatatgtttaattttaaaaagtgtttatttttttgtttatttaggagattggattattgagtttgttaatttattaatagtgtattgtattttgtattaatggataatagtttttaggaagagattatatagatagtttaagaaagtaattggtggtttgatatttgtaattaggtaagagttttgtttagttaaatatattttaggttgaatatatagaaaggaaatataaaatatatgatttagtaatttgattagggttaaatgttatagttatttaaattatggatatttttgtatttgtttatttttatgttttaagagagtgatagaaaggtaaagaggagtagttgtagaaatggatataggttaagtttaagttgaatttatttttttgatatttttttttgtttttgttaatgatttttttgatgatggttgttatgtttgggagtttgtggttgaagaaaaaggaggagagagatggtagaagttgttggtggtggggttttttttgtaggatggaaatggttttggatttggtggtagttgatgttttttgttttgttgttgtttggttttggattgtagttgggtaatggttgttgtggtggttgttggatggttgtagtgattgggtttgtttttttttagtagttagaggtttggtagtggtggtagtggaatggggagaagatgaataattttttgaatggttgtttttgttggtggtttttggagtttgggttatggggggtgtggtggtggtgtatgggaggtttaaaattggtttgggtttttggatgtgttagttgttgttgttgttgtgttggaggtagtagaaggggagagattaattttttggtgtttttagttttggaaatggtgataggtgatttagattttttttttggagttgtagttgttgtggttgttgttgttgttgttttttttttttgttttaggagtgggaggtgttgttgttgttgttgtgttttagttggtttttgtttgagtttatggtttttatttttttttttaggagaagttgaggaagaggttgtatggttagaaaagatgaagaggaggtgagaaatgttgttgttgttgttgttgtaggttggttggttttttgagggtgttgtttttgtggttgtttataggtgttgagaggggttttgggttgtggttgttgttgttttttattttttttgtttgagtttggttttgttttatagtggtttaatttttaaatttttattatggttgtagtttttgagaggagagaattgagtgtagttgtgttttagtgttgagtgtgtattttgttgtagtgtataaagagttttgttatattattgtttgttggtttgtttgttttttttgttgttgtgttgggagtttgggtgttttggaagattgaggggaggtgggaggtgagtgagaggtggatgggattgtgttgggtgaggggagggtagggtagggtagggggtggtaggagggggtagagtggtagttttgggtgtgagtgtagagtttttaagttgtaggttttattgagtatgtttagtgtagttgtttggggtttgtttgggttggtttttagttgttagtttgtagttgtatttgttgtggtttttgtagtaatgtgaggtgaggataatgagttaagttttggtttttgtttagaaatttagttggaggtagggtaggttgttgtggggtgggggtggaggattgatgatgaaagttgagatgggtgtgttgagtagtgttattgatttgagtttgaggttatttgtgtataggtgaaaaggattaggtgattatgttgtttagtgtagagggaaatgtagggatggtttttgtaaggggaatattttttttttttgtttttatttttagatttttgtggtgtggattgtatttgttttttttttttgtattgttgttggattataattgtttgtagagatttgattgtaatagtttttgtttagagattttttttttttttaaatttgtgtttttatggtgttagttttagtataaagagtaatttgttattgtgttgttagtgtgtattattttatttggtttttttgtagtgttttattttttgtttttttggtaatttggtttgtttgttttaaaaatgaaagtttttagttgagtgtgttgaatgtgaatatatagttgttgaattttaagggtttaaagggtatttatttaaatgaattgaaagaggatttttgtgagtgggatgtattttgtaggttttttttgtgtttgttttggtgtttttaagagagttgagtatttttttttttgggttttaggttggtttgtggtgttggagttaagtttggtttttagagattatttagttttgtttttttttggttgttgtgaaaatttggtaggatggattgtttggggttaggttttgtgtgttttggttggattgtgtatgtttggggttattgggttgagtggaaagtatggaatggtaggaagttgtagtttagtgagtgggtggggtgaggagatttaggagggtttaaaaggaggtggaaggatatatgggttatagttggaattattttttgaaggaggttatgtgtgtttttagttggggaattttttaaatttttattttttagtgatagttttggaggtaagttgttttttttttttgtttggggtgtttttgtttggtgtaggtagtggaattttaattttttttgtgttgtggtggaaataggggtttggattagttttttgaaggagtgttgttggggttggtgtttggggaattggttatataagtatttatatttaaatatgtgtttttgtttttttgtttgttggttgttgttgatttttatagaatgtggggagagagtttttaaattggtgttattttttgtttgttattttaagagtaagttaaaggattgagatttgagatttattttttgttttatattgatttattttgtgtttttttaaatgtgggaaaaggagttgggtgttagggtttttgggtttttttattgttgatgttttgttgtttagggtgaatttttttggttttgtgtttgagggtattttttgttgtagtttagagtgtgtattttttgatgttgtaataaatgtttagttattatttttgagttggtgagtgtgttttatttattgtggatttagttaagtgatttatttggtttgagaatttagttaatggttgttagtttagaataaatttgttaagtttgtttatagttttgattgggttgatttgttattgtgagagagttgatttggaaatgttgagagttggattgtatttttattttgtattttatttgttaaggatttataaagtaagtagttgatttgtttaaagagaatgagtattaatattagtttgggaatttattgtttttttattttttttaggaagtagaattatagatgataatttgagttaaaaaatatttaatgagatttaggttgaagtattgagttgttttttaaattttgagagaatgagaattaatttgtatgtgtgtttaataattgtaagtgtttagtaaagtttaaagagggtttatgttgtatttgagaaagagtattgtatatgtgtatattatagttgtaggtaatttttgaagattagaaattttaagagatttagtgtagaaagttataggttattatttaattttgggattattaattaaatttgggatatttatagtgtttttagagatttttgaggttttataaaattttgtatttatatatagtatttaagatagttgtgtaggagttaataatttgttgaagttttagtgttgatatttattgaagattggttttgtgtatagttttggttagtttgggaaaggtaaggattatagtggaaaaggaaatggaaagtaattggaaaagagtaagagaaaggtttttagttgatttttagagatgtagatattgtttatatagtttagtgtgaattatagattttattattgtataaataattaaagataaggagtttttgatgtttaggtgttttattagattgtatggtaaaaattagagttgtgtttaattattaattattgtgtggtagaaaaagggaaaatgaagatgaatttttaaaaggggagtagattagggaggggtaaaatgttttatatttgttttttagattgttgattttgtttttagagtttttgttattagtattgtttttttttgttttttttttggagtttattttaagtgataattagttttatagtatttgagaatttttgaaatttgtttttatggaagtaaatgaaataagggtgtatttttgttttggtgtgatagaatttttttggattttatggtatagagttattttggagtagagataatttgtattattagtattaaagtgttagaatatgagattagtttttaagtatttttatttggttgaagaaagaaaatgggaaatgggttttattgtttttttaaatattaggtttttttatttttttttagtggtgaatgaaaggattattaatgttggtagatatttggttagtttaatagtaatattaggtggttattaggagttggtgaataaaattttttttttgtttttagtgttaagttgtttttgaaagaaatattgatgtatttttttttaattttttgtttttttttttttttttatttaaatggttggttttatttaaattaaagaaagttttaaaaatagtatttttttaaagtttagttgaaaatatttgtttggttgtatagatattataatatattggtttttaagtattttagttttttttttttttttttttttttttttttttttttgagatggagttttataggttggagtgtagtggtatgattttggtttattgtaatttttgttttttaggtttaagtaatttttttgttttagttttttgagtagttggg

SEQ ID NO: 664 - DNA, 6176 bp, Artificial Sequence
  chemically treated genomic DNA (Homo sapiens)
tatttaaaatttaggttaggtatagtggtttatgtttgtaattttagtgaggttgtgggaggttgaggtgggtagattttttgtggttaggagtttgagattagtttggttaatatgataaaattttatttttattaaaaatataaaaattagttgggtgtggtggagtgtgtttatttagttatttaggagggtgaggtaggagaattgtttgaattaaggaggtagaggttgtagtgagttgagattgtattattgtatgttagtttgggtaatagagtgagattttgttgtaaaaaaataaaaaataatagaataataaaataaaaattagtaggagagtgttttatatttataaagttaatatttttgtgagtaagtataattttaagagaattttttgtaagaatttttaggaatatatgagtttaatttatttattattgtgtaagttaaaatatttgatataaaatatttattaaaaatgttttgttagttaggtatagtggattatatttgtaattttagtattttaagaggttgaagttggaggattatttgagtttaagagtttaagattagtttggttaatatagtgtgattttttttttattatttaaaaaaaaaaaaagttttgtttggttagtggtttatttttgtaattttagtaagtatgttgggagggagaggtggaagtaggaggattgtttgagtttaggagtttgagattagtttaggtaatattgttagattttatttttattattttttttttaattagttatgtgtggtggtatttgtttgtagttttagttatttaggaggtaaaggtaggagaattgtttaagtttaggagttagaggttgtaattgagttatgattatgttattgtattttagtttgggtgatagagtgagattttgtttttttaaaaaaaaaaaaaaaaaaaaaaaaaaaaaaaaaagtttgtattgttttgaaaaaataaaaaaaaatttaaaagttattaattaagttaaattaaatatgtttaattattattagttttaatattaataaagggagaaaattattagtaagaatgaagatttggtaatttatgtataataatttaaatttaattagtttattatttataataaagatagtttttttataattttagtaatttttattttatttttattttttattattttttttttgtattttaggtaatttgttgttttttaaatttattttaatttttatatggttttaagtttttgtattagttgttttttgagtttttttttatttgatgagtatttatttataggtgttttaaaatttgatttagaagtttttttgagtgtagaagtttttttaatttttttttaagtaaaattaattgttttaaatttttataatatttgataagttaatttttattatattgtattgtttttatgttttaggagtgtagggagggtagagtttttttatttagtttatagaggattaggtaagtagaaatgtttaatgaatgtgttttgaatttattttttatttagattaagtgattttttagaatttgtttatattttaaggatatattaagttttattttttttttttattatagaatgaatattaggggtatatttagagttttagaatgagaataatgaatgaatatggttgttttgttttttatgatgtttaaattttttttttttgggtattgatttgtttgtagagttttagtagttgtagagttgaagtgttttggtggtttttgtgttatataaaagatagttttggttttttattttaaagtgttttgaggttaattttttataagtattttaaattttttattaataatttagagttttgatatttaaggttagttttgatatttaagaagaggtttttgtgtttttgtggtagggtattggttagttttttttttttttatttgattttttatgttgtttttaaaagggtgttatttgattgaagtattttgagaaagggtgtaagtttgggttttatatttggtggtttaagagaaaaggaattggtttatttaagtgataatagatatggggtagttttgggtggatttttttattgttaaatatgaggaatgtgtatggtataagggtggtgttggtatgtttttgttaaatataaggaaatttgagtgggatgtgggaatttggtttgttggttatgatattggattttggggtttttgtttaatgttattttagggtgataatggtttggtttaagttttttgtttggtagttgtggggttgttttattagtgttatttaggtttggttgttttggaagttgattttttagttttgttgtttggtttttttggtatttatgatttggttttgttatttatttgagggagttaggttgttttaatgttttgttgtttggtggtagttttttgtttgttttttttttttgtggtgggtgagggagtgggaggtggttatatttggtgtgtttttagtttaggggatggagttttgagtagtttttgtattgtagtaaatgtgttttgtgttttagggtatgtgttttaaagtttggttagttgattttttttggggtttaaaaaaggtagtagaaagttgtttttgttttataattgttttttttttatttttgttatttaagatggtggtttaagtgtttgtgattaagatttttgggtggtttagatgagtgagtttttgatttggtgtttgtttttttgatttgtgatgttattggttttttgattttgtgtgagttttattggtagttgatttttaatttggtttgggtatttattgttttggtttgaatttaggttttgtttttggggtgtggtttagtgatttggtggttgttattttgaagttgaagaggttaggtgatgttgatttgtttttaggagaggtatttggtaattgagaagaattggtttttggttagttaggagtggttagaggtttagaaggggagaggaaggtttgtttgtttagtattgtaaggtttagtgattattagatgtgttttaggatatagggtatagtgtttaattttgatgtgttttttttgggtattttaatattaaattatggttttgttatttgatagttatgtggatagtttttgaattttaaatggttttttttttgtgtgtaaattttgagtttattttttttttattatattagtaataagttaaaaaaattgataatatttggtttggtttaaggtatattgaaatttgttgtgtgtttttgtagtgttattatagtggaatttggatatgttaaaagtatatatttttttttttggtagttttatttttagatattaattttagagaaataagtatatatatatataaaaagttatgtgtgaagatatttaatgttatattatttgtattttggagaaatattggggatgaaatgaagattaataggaaattggttaagagaatgttgttatatatttaatttgggttgttatttatttaagaatgaattagatagttattgaatttaaaaaataataaaaaaagggtttggtgttttttttgggattatttttgtaattttagtattttggaaggttgaggtaggtggattatttgaggttgggagtttgagattagtttgattaatatggagaaattttgtttttattaaaaatataaaaattagttgggtgtggtggtgggtgtttgtaattttagttatttaggaggttgagataggagaattgtttgaatttgggaggtagaggttgtagtgagtttagattgtattattatattttagtttgggtgatagagtgagattttgttttgaaaaaataaataaatataaaaaaataaaaatattaaattagttgggtatggtggtgtatgtttgttattttatttatttgggaggttaaggtaggagaattgtttgtatttaggaggtggagattgtggtgagttgaaattgtgttattgtattttagtttgggtaataagagtgaaatttttgttttaaaaaaaaaaaaaaaaaagatatggttgggtgtggtggtttatgtttgtaattttagtattttgggaggttgaggtgggtagattatttgaggttatgagtttgagattagtttggttaatatggtgaaatttgtttttgttaaaaaatataaaataaataggttgggtgtggtggtttatatatgtaattttagtattttgggaggttgaggtgggtagattatgaagttaggagattgagattattttggttaatatagtaaaattttgtttttattaaaaatataaaagattagttgggtgtggtggtgggtttttgtagttttagttatttaggaggttgaggtaggagaatggtatgaatttgggaggtggagtttgtagtgagttgagattgtgttattgtattttagtttggataatagagtgagattttgtttaaaaaaaaaaaaaaaaaaattggttaggtgtggtggtgtgtgtttgtaattttagttatttaggaggttgaggtaggagaattatttgaatttagtaggtagaggttgtagtgagttgagatagtgttattgtattttagtttaggtgatagagttagattttgttgtaaaaaaaggaaaaaaaaagttattaagttaaaaaagtagaatataatgtatgattttatttatgtaaatataggaatataagatatttatttaatattatagaatgttatgtgtattattattttttgatattgagagtttattaggtattatatattattttggatattggaaaattaatagtaattaaaatttttgttatttagtaatgggagattaaaagaaaatataaataataaaatttaggttggatgtggtggttaaagtttttaattttagtattttgagaggttaaggaaggggggttattttagtttagatgttgaagattagtttgagtaatatgagattttatttttattaaaaaaaaaaaagaaaagaaaattagtgtgtatggtgatatgtttttgtaatttagttagggaggaggttgaggttggaggattatttggagttggggatggtataagttatgattgttttattgtattttagtttggataatatagtaagtttttgttttttaaaaaagaagaagaaaggaaaagtgaagtaaagtgagaatgataggagtatgtggattaatgtaaaaataaatgtaggagaaagattggttaggtgtggttgtttatgtttgtaattttagttttttgggaggttgaggtaggtagattataaggttaagaaatagagatttttttggttaatatggtgaaatttggtttttattaaaaataaaaaaaataaaaaaatttttaaaaaagttgggtgtggtggtttatgtttgtaattttagtattttgggaggttaaggtaggtggattatgaggttaggagattgagattattttggttaatatggtgaaattttatttttattaaaaatataaaaaattagttgggtgtggtggtgggtgtttgtagttttggttatttggaaggttgaggtaggagaatggtgtgaatttaggaggtagagtttatagtgagttaagatggtgttattgtattttgtttgtttgggtgatagagtgaaattttgttttaaaaaaaaaaaaaaaaaaaagaaagattagaaggtgtggaatgtggatagtatgagggggatttttaaaatgggaataataggttaggtatggtggtttatgtttgtaattttagtattttgggaagttgaggtaggtagattatttgaggttgggagtttgagattagtttgattaatatggagaaattttatgtttattaaaaatataaaattagttgggtatggtggtttgtaattttagttatttgggaggttgaggtaggagaattgtttgaatttgggaggtagaagttgtagtgagtggagattgtgttattgtattttggtttgggtaataagggtgaaattttgttttaataaataaataaataaataataaataaaataaaatgggaataataatattttttttgtaggattaaatgagataaaatttggagagtatttagtgtagagtttg

SEQ ID NO: 665 - DNA, 6176 bp, Artificial Sequence
  chemically treated genomic DNA (Homo sapiens)
taggttttgtattaagtgttttttaggttttattttatttaattttgtaaggaaagtgttattatttttattttattttatttattatttatttatttatttattgagatggagttttatttttgttgtttaagttaaagtgtaatggtataatttttgtttgttgtaatttttgttttttaggtttaagtagtttttttgttttagttttttgagtagttgagattataggttattatgtttggttaattttgtatttttagtagatatggggtttttttatgttggttaggttggttttgaatttttaattttaggtgatttgtttgttttagttttttaaagtgttgggattataggtatgagttattgtgtttggtttattatttttattttaaaaattttttttatgttatttatattttatattttttagttttttttttttttttttttttttttgagatggagttttgttttgttgtttaggtagatggagtgtagtggtgttattttggtttattgtaagttttgttttttgggtttatgttatttttttgttttagttttttgagtagttgggattataggtatttgttattatatttggttaattttttgtatttttagtagagatgggattttattgtgttagttaggatggttttgattttttgattttgtgatttgtttgttttggttttttaaagtgttgggattataggtgtgagttattgtgtttggtttttttaaaaatttttttattttttttatttttagtagagattgggttttattgtgttagttaggagggtttttattttttgattttgtgatttgtttgttttggttttttaaagggttgggattataagtgtgagtgattgtgtttggttagttttttttttatatttatttttatgttggtttatatatttttgttatttttattttgttttatttttttttttttttttttttttaagagatgggggtttgttatgttgtttaggttggagtgtagtgaggtaattatagtttatgttatttttaattttaagtgattttttagttttagttttttttttagttggattataggagtatgttattatgtatattaattttttttttttttttttttttggtagagatggggttttatgttgtttaggttggtttttaatatttgggttgaagtgattttttttttttggttttttaaagtgttgggattagaggttttggttattatatttaatttgaattttattatttatatttttttttaattttttattattagatggtagggattttgattattgttaattttttaatatttaaaataatgtgtggtatttaataggtttttaatattgaaaagtaatagtgtatatggtattttgtagtattaggtaggtattttgtgtttttgtgtttgtgtaaataagattatatattatgttttgtttttttaatttaatggtttttttttttttttttttgtgatagagtttggttttgttatttaggttggagtgtagtggtgttattttggtttattgtaatttttgtttattgggtttaagtgatttttttgttttagttttttgagtagttgggattatagatgtgtattattatatttggttaatttttttttttttttttttaggtggagttttattttgttgtttaggttggagtgtagtggtgtgattttagtttattgtaagttttgttttttgggtttatgttatttttttgttttagttttttgagtagttgggattataggggtttgttattatatttggttaattttttgtatttttagtagagatggggttttattgtgttagttaggatggttttgattttttgattttgtgatttgtttgttttggttttttaaagtgttgggattatatgtgtgagttattgtatttggtttatttgttttgtattttttagtagagataggttttattatgttggttaggttggttttaaatttatgattttaagtgatttgtttgttttggttttttaaagtgttgggattataggtgtgagttattatgtttagttatgttttttttttttttttttttgagataagagttttgtttttgttgtttaggttggagtgtaatgatgtgattttggtttattgtaatttttgttttttgggtataagtaatttttttgttttagttttttgagtagatgggatgataggtatgtattattatgtttagttaatttggtatttttatttttttatatttatttatttttttgagatggagttttgttttgttgtttaggttggagtgtaatggtgtgatttgggtttattgtaatttttgttttttgggtttaagtgatttttttgttttagttttttgagtagttgggattataggtgtttgttattatgtttggttaatttttgtatttttagtagagatggggtttttttatgttggttaggttggttttgaatttttgattttaggtgatttgtttgttttggttttttaaagtgttgggattataggagtaattttaaaaaaagtgttgggttttttttttgttgttttttaaatttagtaattatttagtttatttttggatggatgataatttagattggatgtgtagtagtgtttttttaattagttttttattaatttttattttatttttagtgtttttttagaatgtaaataatatggtattaaatatttttatatatagttttttgtgtatgtgtatatttatttttttagaattagtgtttagaagtgaaattgttgggaggaaggatatatatttttaatatgtttaagttttattgtgatagtgttgtgagggtatataataggttttaatatattttggattaaattggatattattagtttttttaatttgttgttaatgtgatgggggaaaaatgaatttggaatttatatataaggaaaagattgtttaaggtttagggattgtttatatagttgttaagtggtggagttgtgatttggtattaaagtgtttggagaggatgtgttaaagttggatattgtgttttgtgttttgaggtatgtttggtgattgttgggttttgtaatgttgggtaggtaggtttttttttttttttttaggtttttggttatttttggttggttgaaagttggttttttttgattattgagtgttttttttgaaagtaagttagtgttgtttaatttttttagttttgaaatggtggttattagattgttaggttatgttttgggggtggggtttgagtttaggttagagtgatggatgtttgagttaagttagaagttgattgttagtagggtttgtgtagaattggagagttggtggtgttgtaggttgggaggatgagtattgagttgagggtttgtttgtttgggttgtttgagagttttaattgtgggtgtttgggttgttattttagatggtgggagtaagaggaaaatgattgtgaggtgggaatggttttttgttgttttttttgggttttgaaaagggttagttggttgggttttggggtgtgtgttttgaggtgtggagtgtgtttgttatgatgtgggggttgtttggggttttgttttttgggttggggatgtgttgaatgtgattgttttttgtttttttatttgttgtggggaggaggagtgggtgagaagttgttgttgaatgataggatgttggggtggtttggtttttttaggtaggtggtaggattgggttgtggatgttgggggagttgggtggtggggttgagggattggtttttagggtgattgggtttgggtggtgttgatggagtggttttgtggttgttgggtagagggtttgggttaggttgttgttattttggggtagtgttgggtgggggttttggagtttggtgttatggttggtgagttgagtttttatattttatttaaatttttttgtgtttggtggaaatgtgttaatgttatttttatgttatgtgtattttttatatttggtagtgggaaaatttgtttagagttgttttatatttgttgttatttggatgggttaatttttttttttttgggttgttgaatgtgggatttgggtttgtatttttttttagggtattttagttaagtgatatttttttagagatgatgtgaggaattgggtaagagaggaggaaattggttagtgttttattataaaggtataggggtttttttttgggtattaggattagttttgggtattaggattttgggttattaatgaaaggtttgggatatttatagaggattggttttaggatgttttggaatgaagagttagggttgttttttgtgtgatgtgagagttgttgggatgttttagttttgtagttgttgaggttttgtgagtgagttgatgtttaagagagaggggtttggatgttgtgagaggtgaggtggttgtgtttatttattgtttttgttttagggttttgggtgtgtttttggtatttattttgtggtgggaagaaggaatggaatttagtgtatttttgagatgtgaatgggttttagggggttatttaatttaagtggaaaatgaatttaaggtatgtttattgagtgtttttgtttgtttggttttttgtgggttgagtggagagattttgttttttttgtgtttttaaggtgtgaaaataatgtagtgtgataagaattggtttattaagtgttatggggatttagaatagttagttttgtttggggaggagttgaggaagtttttatatttgaggagatttttgagttgagttttgaaatatttgtgagtaagtgtttattgggtgaggaggagtttagggaatagttggtataaaggtttagagttatgtgggagttgggatgagtttggggagtagtaaattgtttggggtgtaggaaggaaatggtgagagatgagagtaaaataaaagttgttagaattgtgagggggttgtttttgttgtagatagtgaattagttgaatttggattattgtatatgggttgttgagtttttatttttgttgataattttttttttttgttgatgttgaagttgatagtgattgaatatatttagtttaatttagttaatgatttttaaatttttttttatttttttagaataatgtaaatttttttttttttttttttttttttttttttttttaaaggaataggattttattttgttgtttaggttagagtgtagtggtatgattatagtttggttgtagtttttaatttttgggtttaagtagtttttttgtttttgttttttgagtagttgggattatagataggtgttattatatatggttaattaaaaaaaaaatagtagagatggagtttggtagtgttgtttaggttggttttaaatttttgggtttaggtgatttttttgtttttattttttttttttaatgtgtttgttgggattataggggtgagttattggttaggtagaattttttttttttttaaataatagagagggggttatattatgttggttaggttggttttgaatttttgggtttaagtgattttttagttttagttttttaaagtgttgaaattataggtgtgatttattgtgtttggttagtagaatatttttgataagtgttttatattaaatgttttgatttatatagtggtgaatgaattgaatttatatatttttggggatttttgtaaaaaatttttttaaagttatatttgtttataaaaatgttaattttataaatgtagaatatttttttattaatttttattttattattttattgttttttatttttttgtgatggagttttattttgttgtttaggttggtgtgtaatgatgtgattttggtttattgtaatttttgtttttttggtttaagtagtttttttgttttatttttttgagtagttgggtaggtatattttattatgtttggttgatttttgtatttttagtagagatggggttttgttgtgttggttaggttggttttgaatttttgattgtaagagatttgtttattttggttttttatggttttgttgggattataggtatgagttattgtgtttggtttaaattttaaata

SEQ ID NO: 666 - DNA, 6246 bp, Artificial Sequence
  chemically treated genomic DNA (Homo sapiens)
tgtagttattatgttattgttttaatttttttttttttatagtttttttttataattaaaggataagtttttgagagtaaggattataattttttatgtttgtttttaataggggttttttagaatgttagtattttaataaatgtttaaagattttttttttttttaaatgtttttaaagttaaagttgttaaaaatatataattaatattaaattttaatttttaaaattttaaattgatttatatggtaattggaattaaatatttttatttatatattttataagagttattttatttttagttagtatttgtattattaagaatttaagagttatttttaaagaaaattttgaaaagaaaatgaaaagttttaaaatgtagtattataatttagtattatagatttttgaaataaagttaataaattaattagttgaaatagattgattgatttttaaattatattattaagatgtaaaatatataaatattttagtattataagaggtttttaagtagttattataagatttgtattattatagttgaaaattattttggaattttaaaatattttttaaattattttatgaagtgtttagaaagtatgatttttttttgaaagatgtataattagtttttttttttatttatttgggtattttttatttgtaagttataagaaaaaaaaaaaattaatttttaaaaattattttttatttagttattatttagattattttgttttaggttagtttttaaagttaatatgaattgaaattttgagtttaattaaaagtgattattttatgttgtttaagaatataattaattttatataatattatgttttgtgtgtgtgtgggtttttaaaattttagttttttagtttttttagtttttttaggtaataaattaatttgtttttgtttttatgatgttttttttttttataataaggaaataatatagatatttttgttaaattttgtaagtatgtttaaataagttattattaaatattatatgaatttttttataaatagagatatattggaatattagatatttagtatatattaaatattttaagagtatattttttagtataaatttaggataagagtagtttatttataattttgaatatagtttaaatatttttattatttttaggattatagttatttgtaaaagttaaaatggaaaggattaaatttatatttttttaattaaatttatagttatttaaatatgatggaaattaatgttagagtgttttaaattgttttttttaaggaatttgttagaatatttaataggtaatgaatgtagtagtattttaaaattgaatttaaatgtaatgagttagtgataatatttaatttagtatttggtattatgataaaataaattttaattaaaatttggatttattaatatttttaagttaatttttgattaaatataaattatatggtggtaggttggtaatgttaaaataggaaggttaagagataatatattaaattatttatttaattgaatataaatgtatatagagatgttattgttgttaggtatttattggtttttattagttttttttaaagagagaaattaatggtagtttttaaatgtgaatggttattgaggaagtttatttatagattaagaataaatattatgtgtagttatataaataagaaaaaaatgttgggagggtgggatatttaatgtttttattaagtatattaaattatgataatttttgagatttaaaatatttttttattttaaattttaaaaattttgtaaatgtgtataatggtttagtaattaaattttgtttttttttttattttaaaggatgggtaagtaaatattgttattattattttaatgtggaaatatttgagtatttgatgaaattgattattaatagtaagaaaagtataagaaagtagtttgaaattgaattatttaaataaatattatattattttaatttaaggttaatgagattgggggagggggtatgggaggagtaaaaagggagttgttttatttttgattgaagataggttttgtttttttttattgtttgtttattaggaggtttaataattttagattttggtattttgaggttttttattttaagggtgaggtggaaaaggggtgtaaaataaaattaatatttattgttaatttttatgttgttaaaagttgaaggttgttgtattggtttgtagttttttgtaaaggaggtggttttgggttgttttgatatgattattttttttgtgaattattttttttttttttttttttttttttttttttgtttttatgttggggtgttaggttaatgataaatgtagtattaagtttttttatagaagaaaaagaaaaagattttgtttttttggttttttattttttttgtatattataaaaaataaaataagtgatatattttttttttaagatagattggtatggatatttaatatatagatgatttaggatttgggaaaaaatataattttttttttttttttttttgggaggagagaaaagagagggtaaattttaaaaaaatatgtattatgtgaaatgggggtaaatatttgattgaaaatgagtattttgaatattatattttttttggggattttttttttgagttaatgaagaagggaagtggtggaaggattatgagttttatgtttgaagagaaagggggatgggtaggagggagggagagggagggagggggtggtttggagatgtgatgggaaatgttgtagttttggtaagttgtgggatttggtgggttgatggtaggggtttggtgaattagagggtggtggagttgtgagttagttagaggtgggtggtggtggtggtggtggtttttttttttattgtgttaggagtagttgtaggtggtggttggatttagtggttatggtggtggtggaggtagttttttttagattttaggtagtggttttttgattgttttttatttgttggggatatgggaatttggtaattgtttttgttttttggggtttttttttttgtttgtggtaatagtttggttgtttttttgttttttggttttgtttggtgtttgtttaggaagtgtttgtgttttgttttagtttagagttttgttagtggttgtggggttggtttttttttgttttttttttttttttgttatttggtttgggtggtggtggtggtggtggtggtataagtttgtatttgtttgggttaggagttgttttgtgtgaggagtgttgtttgtgtagttgttttgtatttttttattttttttttttttttttatttgttttttatttttttttttttttatttagttttatattgtttagtgttttgttgtttgtgtaataggtgtttgggaattgttggttgagttttatgtttgtttgttttggttgggagttgaagtttgaatggagttaattatggatgttgtttgtttgtggttttttttggaaaaagttgattagtttgagaaattaattagaaagtgatgttgggaagttatgtttaaagagtggaaaatgttgaaggtagttgaatggaaagggtgaatttgttttgtttggtggttggttggaggagatatttgataatggtaatagtggttaattagagttgttggtttttatgaagaggtttgaagagttgaggatggtgaaatttagagatgttggtgaaattgtatggttgggtgttgttgttgttttgtgattggttggaaaattttgttgggagtgtattttttttggtgattggtgaagagaagggggtttttgaggatagtttggttagttaggattttttttttttttttaaggtggggagaagaaagtgaagggagggtgtttataaagtgttgttttattggtttgaagtttaggtgttggagttggggtaaaagggagagggagggagtttgaaatttgtggtggtggttaattggtttttattgttgtttaattgtaagatttagttgtagtgtgattggtttttggttttggttttaggagtggggagatgtttgatttgggttgtggttgatgatttgatggtttgtttgtggttgtttttaataatggtggaaattgtatatagggattgtgggtttttggtgtagtaaattggaaagtgttgtggttggtggttttgggttttgagtgtttaagtgagtagaggggtggaggggttttttttatttataggaggtttttggtggggtgtagttaattttgtgtgtttaaggtttttttttgttgtggattgtgtgtgttgagtgttggttttttttttgaaagggttagatggattaagggggtttttttagttggttgtaagtttttagatgttaaaatgggaataaagtttttagaaaggtagtgtttttgggtggttgtgttttgtttagttgtgggggttattgatatagaggtttgttgtgtttggtgtgtgtggtttggttgggtttttggaaatgtttatgagaaatgagtttatgttggatgtgtgtgttttttgggtgtaattgtttagtgtaaaatgggttttgaaagtaggtgaggggaaatgttgttaggttggatattttgaagtttttgaggaaatgggggggttagaggagtttgtggtagttttggattttttggaattagggtgatttataaaagtgtagtttgagaagattttatatataagattagtgtttattgttttattatagaattagtttttttggtttgttttagaatagtgaggtatggttatgttaagataatagagaaagtagaatagatagttgttattttgattgtaatttagtggtgtttgtaatttttatttgtagagttatttttttttgttaagatgttgtttttagaaagtatatgttaaaggatttatatttgattagattatttggtttttgttttgaaatattgatgaaggatttgggatagaataaagtaagttttgatggaagataggaaaggtttagatagtgtttgtagatttaaatggttatagaggttagataagtaaagtaaatgagtgagattggttttgtgtaagataatggggaatgatagggaaaatggtaaattggaatatttatgttataattaaaaggaatagttgtttaattttagtagattgttgtttttaggaatgtgggtttagtgtttttagatgtttaatttttttttttttaaaagaaattttaaaattggatttttgtgtgaaatttttgtatttttaaatgttggtaattaaatttttaaattttgtaggttaatttaaaaatattttttggttaatgaggtattggaaaaagtgttaataattgttaggggtttgatagtagtaggagggtgaaaataaaatggtttgggattttaaataattgaaatgtatttttatttatttatttatttttgagatggagttttatttttgttgtttaggttggagtgtagtggtgtgattttggtttattgtaatttttgtttttttgatttaagtgatttttttgttttagttttttaagtagttgggattataggtatgtgttattatgttagttatttttgtatttttagtagagatggggtttttttatgttggttaggttggttttgaatttttgattttaggtgatttgtttgttttagttttatagagtgttaggattataggtgtaagttattatattgggttggttgaaatttatttttaaaatagtgtatttttaattttttttttatttttgtgtgtattttataatgtgtatattatgttagtttaagattaagagtttatggataagttaggagtggtggtttatgattgtaattttagtaatttgggaggttgaggtaggtggattgtttgaggttaggagtttaagattagtttggttattatggtgaaattttgtttttattaaaattttaaaatttagttgggtgtggtggtgggtgtttataatattagttatttgggaggttgaggtaggataattgtttgaatttaggaggtggaggttgtagtgagttgagattgtattattgtattttagttaaggtaataagagtaaaattttgttttaaaaaaaaaaaaaaaaaaaaagtttatgaattattagtttagataaagaatagttgta

SEQ ID NO: 667 - DNA, 6246 bp, Artificial Sequence
  chemically treated genomic DNA (Homo sapiens)
tataattattttttgtttaaattagtggtttataaattttttttttttttttttttttgagatggagttttgtttttgttgttttggttggagtgtaatggtgtgattttagtttattgtaatttttattttttgggtttaagtaattattttgttttagttttttaagtaattggtattatagatgtttgttattatgtttagttaagttttaaagttttagtagagatggggttttattatgatgattaggttagttttgaatttttaattttaggtgatttatttgttttggttttttaaattgttgggattatagttataagttattatttttggtttgtttataaatttttgattttgagttaatatgatatgtatattataagatatatatagaaataaaaaaaggattaaaggtgtattattttaaagataaattttaattggtttggtgtggtggtttatgtttgtaattttgatattttgtgaggttgaggtaggtagattatttgaggttgggagtttgagattagtttgattaatatgaagaaattttgtttttattaaaaatataaaagtagttggtatggtggtatatgtttgtgattttaattatttgggaggttgaggtaggagaattatttgaattggggaggtggaggttgtggtgagttgagattgtgttattgtattttagtttgggtaataagagtgaaattttgttttaaaaataaataaataaataaagatatattttaattatttaaggttttaaattattttgtttttatttttttattgttattgggtttttaataattattaatattttttttaatgttttattggttaagggatgtttttaggttggtttgtagggtttgaaaatttggttattaatatttaaaaatgtagagattttatataaaaatttaattttggggttttttttgggaggaaaaaaattgaatatttgagaatattggatttatatttttgagggtaataatttgttagagttgagtagttgttttttttagttatggtatggatattttaatttgttattttttttattattttttattgttttatataaggttagttttatttatttgttttatttgtttggtttttgtagttatttgaatttgtaaatattatttagattttttttgttttttattaaagtttattttgttttgttttaagttttttattagtgttttaaagtaagagttaggtaatttgattaaatataggttttttaatatgtgttttttggagatagtattttaatagaaagagatgattttgtaggtagaaattataggtattattggattataattaggatggtaattgtttgttttattttttttgttattttgatgtagttatattttattgttttaaagtagattaaaggaattggttttatggtagaataatggatgttggttttatgtatgaaatttttttaagttgtatttttatagattattttagttttaaaagatttaaagttattatgggtttttttgatttttttatttttttggaggttttaggatatttggtttgatggtatttttttttatttgtttttggggtttgttttgtgttgggtagttgtgtttaaggagtgtgtgtatttagtatgagtttattttttatgggtgtttttagaggtttggttgggttgtgtatattaagtgtagtaagtttttgtattaatggtttttgtggttgggtggggtgtggttgtttaaaggtgttgtttttttggaagttttgtttttattttagtgtttgagagtttgtagttggttgggaaggtttttttggtttgtttggtttttttggggaagaggttaatatttggtatatgtgatttatggtagaggggagttttgggtgtgtagaattggttgtgttttgttgagagttttttgtgggtggggagagtttttttatttttttgtttgtttgagtgtttagagtttagggttgttgattgtagtattttttgatttgttgtattgagggtttgtggtttttgtgtgtggtttttattgttgttggaggtggttgtaggtgaattgttgggttgttagttatgatttgagttaggtatttttttgtttttgggattggggttgaaggttaattatattgtagttaggttttgtgattggatggtagtgagagttgattggttgttgttgtgagttttgggtttttttttttttttttttgttttaattttagtgtttaagttttaggttaatgagatagtgttttatagatgttttttttttgtttttttttttttattttggagagggaggggaagttttgattggttagattgtttttggaagtttttttttttttattaattattgaaggaggtatgtttttagtggagttttttagttaattataaagtggtggtggtgtttagttgtgtagttttattagtgtttttgggttttattgtttttaattttttaagtttttttgtaagggttggtgattttgattggttattgttgttattgttgaatgttttttttagttagttattgaataaggtgaatttattttttttgtttggttatttttggtattttttgttttttgggtgtggttttttagtgttattttttaattggttttttaggttgattggttttttttgggaggagttgtaaataaatgatgtttgtgattggttttgtttgggttttggtttttagttgaagtgggtgagtgtggggtttggttggtgatttttagatgtttgttatgtgggtggtggggtgttgggtggtgtaaggttgggtgggggaggaaggaggtggaggatgagtaggaggggggaggaggagtggggaagtgtaaggtggttgtgtagatagtgttttttatatagagtagtttttgatttgggtgaatgtgggtttgtgttgttgttgttgttgttgttgtttgggttaagtgataaaggaaggaaggaagtgaggaggagttggttttgtagttgttgatagggttttgggttggggtaaagtgtggatattttttgagtgggtattgagtagagttgaggggtgggagggtggttgagttgttgttgtggatgggggagggggttttgagggatggaagtggttgttgggtttttatgtttttggtgaatggggaatagttgaggagttgttgtttggggtttgaagggagttgtttttgttattgttatggttgttggatttagttgttgtttgtagttgtttttggtgtaatgaggagaggagttgttgttattgttattgtttgtttttgattgatttgtgattttgttgttttttagtttgttgggtttttgttgttagtttgttggattttgtggtttgttggagttgtagtgttttttgttgtatttttgagttatttttttttttttttttttttttttttatttatttttttttttttttaagtgtgagatttgtgatttttttgttgttttttttttttattgatttggaaaaaaaatttttgaggaaaatataatatttgaagtatttatttttaattaagtatttgtttttgttttatgtgatatatatttttttaggatttgtttttttttttttttttttttaggaaagggaggggaaagaattgtatttttttttaagttttaaattatttatatgttaaatatttgtgttgatttgttttgaaggagaaatatattgtttgttttgttttttatagtatataaaaggagtgaaaagttaagaggatgaagttttttttttttttttttgtgggagaatttaatgttgtatttattgttaatttaatattttaatataaagataaaaggaagaaaaggaggaaggaaggaaaaggtgatttgtgaagagagtgattatgttagggtggtttagaattattttttttgtggagagttgtaagttggtgtagtagtttttagtttttggtagtatgaaagttagtagtgagtattggttttattttatattttttttttattttgtttttaaaataagaaattttgaaatattaggatttgaaattattagattttttgataaataggtaatggaaaagggtaaaatttatttttagttaaggatgaagtagttttttttttattttttttatatttttttttttggttttattaattttgaattgagataatatgatatttatttggatgatttgattttaaattgtttttttgtattttttttgttgttggtagttagttttattaagtgtttgagtgtttttatgttaaagtagtgatgatagtgtttatttgtttattttttagaataaagagaaggataagatttgattattaaattattatgtatatttgtagaatttttggaatttggaatgagagaatattttaggttttaggggttattatagtttgatatatttaatagagatgttaaatgttttatttttttaatattttttttttgtttgtatgattatatataatatttgtttttaatttgtggatgaatttttttagtaattatttatatttggaggttgttattgatttttttttttagaagggattagtgggagttaataaatatttagtagtagtaatatttttgtatgtatttgtgtttaattggataagtggtttgatgtgttattttttaatttttttgttttgatattattaatttgttattgtataatttatgtttaattaaaagttaatttggaagtattaataggtttaagttttgattgagatttgttttgttatagtgttaaatattaagttaaatgttgttattggtttattatatttaagtttaattttggagtgttattgtatttattatttgttaaatgttttggtgggttttttaaaaaggatgatttaaaatattttagtgttagtttttattatatttagataattgtggatttagttagaagaatgtggatttagttttttttattttggtttttgtagatggttatggttttagaaataatagggatatttgggttgtgtttagggttgtggatagattatttttgttttgggtttgtgttgaaaagtatgtttttgaagtgtttaatatatattaagtatttaatgttttagtgtatttttatttatggagaagtttatgtggtatttaatgatagtttgtttaaatatatttgtagaatttaataaaaatatttatattgtttttttattgtgggaaagaggggtattatgagggtaaagataaattaatttgttgtttagaagaattgagagaattaaagaattgagattttaagaatttatatatatgtaaaatatgatgttatgtgaaattgattatatttttaggtaatataaaatgattatttttagttgaatttaagattttaatttatgttggttttgggaattagtttgaaatagggtagtttaggtaatagttgaatgggagataatttttgaaagttaatttttttttttttttgtggtttgtaagtagagaatgtttgggtaggtaaagaggaaagttgattatgtattttttagggaagggttgtgttttttaagtattttatggagtgatttgaaaaatattttaaaattttggggtaatttttagttatgatgatataaattttataatagttatttaagagttttttgtggtattggagtgtttgtatgttttatattttggtaatatagtttgaaaattagttagtttattttagttaattgatttattagttttattttagagatttgtaatgttagattataatgttatattttgggattttttattttttttttaggattttttttgaaaatgatttttgaatttttggtaatatagatattaattaaggatggagtaatttttgtaaaatatatagatgaaaatgtttaattttgattattatataggttaatttagaattttaaaagttggagtttagtgttaattatgtgtttttgatagttttgattttaaaagtatttaaaagaaaggggagtttttaagtatttgttaggatgttagtattttaaggaatttttgttgaaaatagatataagaaattgtagtttttgtttttaaaagtttattttttagttgtagagggaggttatggggaaaaaaaaattaaaataatagtgtgatgattgta

SEQ ID NO: 668 - DNA, 6216 bp, Artificial Sequence
  chemically treated genomic DNA (Homo sapiens)
atttttagatttatatggggttaggatattggtattggattaaagaggtttttttttttgttttttttttgtttttttaatgttttgttgtaaagatttaggtggggagagagagagagagagagagatagagattgatttatagttagggttagggaattgaggggaattaatttaatttttttttttttaatttattaggtttgtattttgttttttttgtagattagtgttttgttagttatttgggggttaggggatggagtgaaggataagatttttttttattgtagtgaagttatttggagaaatgtgtggaaaatagtaagatttagtgattttttttttattttttttttaattttaggagagattttgtttttttatttattggtttttagattaattatttatatttatataggtgagagtttttttgaatattggaggtgataggatattaggataaagtataattattgtgttttggtttaattattattttttttgtttggggttgttgttggtttttggttgttttttgtatttttttttatttttattttttttttttttttttttttatttggaatatttttttttttttttttggttttttttgaattgtttttagagttatagattgtggggagtggttattgtgtttttaaggtgaggttttttaagtggggttgagtttgttttttaattgggagttagtatgatttttgtgtgggttgttttttgttttattgtttttttttttaatttgttaggtgattttgggtttttttgtgttttttttgggtttttggaggattttttggggagatagtttgttttgatgtttttttttttgtagtaagtagtttggggagggaggtgaggataagtgaagttaagttgtttagggggttaagtttatggaagggaagatgttatagagatatatgtggttttgtgattgttgttttgtgttttttttttttttttgaaagtttaggtgattaggtgatttgagtttttaatttggtgataatgtgggtattggttgagtttttaagagtatattgttgtaaatgttggtgataatatattggggtatgggatttagagttaatttttttaggttatagttaggttatatttttataatgaaggggggaggtgggttatatttttttgttttaatgaaggtagtttaaaaatttttaggttaggttgtaattttagttttatataaaaggaattttgtgtttttatttttttggatttttgggtaaagttttagagggaaatataaataggttgttgtaatatattttgttgggtattattatggaggatagttggtttatgggggtggggggtgtttggggttatggagtgattggtgatggttatttttttttggaatttttttagtttttttttagttttagatttgtttatttgttttttattaagatttgtttttttaggtttgttggtttttttaggggttgaagaaggttgagttgagaagggatgtaagggagggggttagaatgagtttttagggtttagagtttttattttgttttaagatgtttatagtttgtgtttttggggtgttagaggtgtataaggaggaaagttagtggttttttttttatattttgtttattagtttagagtatggagtttaggtgaggaggtttgtttgggagggggttttgagttaggaaataaatatttattaattgtataaagattttgtttttgttgttggggagtttgttaagtggtggagataggattagtgtatgaatgatggaaagggagggttggggtgggtgggagttagtttttttttttataagggttttaggatattatattgatggaattgggggtattggggaggtaatttagtatttttattaaattatagtaatatgtgttgaggatggggttgattaggtaagttttttggagtgttttggttaaattgagggaaattgttgtatttttatttttagtttatgtttttatagaggttatgttagttgtaggttagattttggtaagatttgggtggataattagattgattggttttattttttttataggttttagagttttaattttgttttttggggtagtttggaaatagttaggttagaaattagttaggaatttttttaagttgttttttatatgtaagaatgggatggggtttttgggagtatttagggaagatgtggagagttggaggaaaagggggtttggaggtaagggaggggattgggggaaggataggggagaagttgtgagtttggagaagtagttaagggattttgagggaatgggggagttgagatgaaatttttatttttatttagaagatgagttatgagtttgggtttgggttgatagaagttttggtttttggtttggtgggagttttgggtagttggtttatagatgttttttagtgttggtgggtaggtttgaattattatgtaggttttggtttttatttgtttttattagttttttggttttagttttttggtaatatttggggttgggggggtagtaggaataagggtttttgtttgtttagttgtttttttttttgggttttgttagattttatagtgtatatgtgggttttaataggttttttttttttttagttattgattaattttggaattatatagttttttgtttttagttttataaatttggtgttaaattttttttttttgggaagtatttttggatattttttaaaggattttagttattttagtttgttggttgttgtttattttgatgtttgtaggttagatgagggttttagatggtatattgttagagggatatattgtggtttttgtgtttagttttgggttttttgtatatgaagtaattttagttttaaatatgtagttgtttgggaggttagaaatagggggtttaggagtaaattttttttattttttttttaaagtttattttttttttagttagagttggggtgtgtagatggtagttattagggggtgtttggttattatagggaagttgggtgaatggagtgagtagtgtttttgagagtgaggatgtgtgtgtttgtgtgggtgagtgagtgtgtgtgtgtggggttgagggtgttggagtggggagaaggttaggggttattttaggattttaatagatttgtgtgtttttttttttatttgtttttgtttggttttttgtttttttttgttttttttaatatttttagtaaagagggaatggtttttaggttttgtttgtatgtaattttatttttttgttttttttttgttaatgttttgtgggtgtgtgtttttggatagagtttttgggggtggatgggtaatttttaggttgtgaattttggtgggggttgagttttttttttattgtggtgggttgtgggttaggttttattgagtgtttgtagagtttgggtttgagttgtgtgtggaagggttgaggtttgtttgtttttgttttttggggtgggttgggggtggggttttggtggggtggagttatgtgttttttttttttttttttaaaagttggttggtagtggggaggattgtggaggtttggggtagttgggtagtttggaggttgtggtgttgggggttagtattagtgttttgttgggaggtgtagtggttaggtggattggttagtggatttattggttagggtgtttggtgttggaatttgatatttattgatttgggttttattttttttttttttttttaaatatttttttttaaaattgtattgttttttgttttaatttatttttgtttgttattttttatttgaattgggttgatggtttggggagattgttttatttttttaaattattgtggattttggaaattagtagaaagaggaaagaggtagtaagagttttagagagaagttgaggaagagagagatggggttagagagagtgtgtgggtgtgtgagtagtgaaagtgataggggtaaagtgagtgatttgtttttgggggtgattgttggagtgtggtgtgagtttttttttttgggattttgtagttgattagttgtgttgatggatagatagatagatattgtttttagttttagttattattttttttttggttggtggtggatagtggatgtggtggtgagttgtgggtaggggttggagtttgtgtttggaggtggggtggagggggttggggtttgtggtgttgtattgaaattttttgtttaatttttgggttgtttttgttttggaggagttgtggtttgtgtgggggaagttgagttgagtggagttgtgagaagtgttagtttgggttgggaggagttgtagttggaggagggggaggaggaagaagagaaggaagaggagagggggttgtagtggtgatttggtgtttggaagttgggtttatggatgggtgaggtggtggtgtgtgtagatagtgttttagttgtgtgtgttttttaggttttggtttgggttttgggttggggaggaagagtagtttgttgaggtgttgaggagagtgggttgttttatagtttgagttggagagggagtgtgagttgtgttggttttggttgggtttttgaaattatgaattttttgttgttttgggtgtattggagttttgttttgttgttttatttttattatgttaaggtaagtggttgtgttttgttggtgttgtgggttgttgtgagtgttttttttggttggggatgtgtgtgtgagtgtgtgtgtgggggttttgtgttttatgtgggtttatgggtattaggtgtgtggtgtttttttttgttgttttaggtgtagggggagggggtgtgtgtgttaggtgggagggtatttggagagaggtttattgtttatgtgggttttgtttatttattggagttattgtatgtatgatttgggttgattagttgagggtgggagttggaggaggaggttgagggggttgggtttgtgttgttgttgttggttgaagtttgtttttggttgttggttttggatgaattggaagtttgagtagtgggggtgggagttagagattagtgggtagggggtgtttggattttggattgtgggagggtagagagtgtggagggggtagggtgtaggagggagagggggtttgttgttattgttatttggtttttttagtttttgttgtgagtttgggaaaagttttggggtggattgttgtggggattttttttttttgttgggttatttgtgttgtgttaattttgtttgtttttgtttgtgttttgtttggtgtttgtttttttttgtttggttgggtgtgtgtggtgtggagttgattatattagtttgggtttggttggttgtgtgtttttggagttttggttgtttgaatggggagtttagagtggtgagtggtatttttttttttgttagttttttgtgggaaggtgattttttgaggtagttttagtttggggatttagagaattatttttatttttttttattgtttttagattttatttttgtttagtgttaggaggaattttttgatgttttttttttttatttattttttttttagtttggagagaagtttttgttattttgtttatttttatttttttttgtggagaagatttatttaatttttttttggttttagagtttagggaaaggatgattattgttagaagttgtggtgtgggagtttattgggtgttttgttatattttattgaaagttttgatttggtgatagtgtgtttttttttttttgttaatagttttgagtgagttgtgttttagtttttgtgggggtgggttaagggaggatttgaagagttattgttttattttatttttttggagaaatggtttgaaatttgttgtgatatgggtagtatgggaatagttttttttgaattttggaaaggagtttttgttagttttgtatatattttgttttggtgaaaggtagttttggagtaggtgtttttttggaattttaaatttgtttatttaatttgtttttgaaagggattttaaagggtttttttttgtttttttttgatgtttttttttagttagaatttttttggagaggaggtaagaggaaagttatggataggggttgttgttaatattgtaagtttttta

SEQ ID NO: 669 - DNA, 6216 bp, Artificial Sequence
  chemically treated genomic DNA (Homo sapiens)
tgaggaatttgtggtgttagtagtgatttttgtttatggttttttttttgttttttttttaagggaattttggttgagggaaggtgttagagaggagtggaaagggattttttagagttttttttagaagtaagttgggtgggtaggtttggagttttaaaaaaatatttgttttagggttgttttttattaggataaagtgtgtgtaaggttggtaggagtttttttttagggtttaggaaggattatttttatgttgtttgtgttatagtaaattttaagttatttttttaaaagggtaaagtggggtaatgattttttaaatttttttttgatttatttttatgagagttaaagtatagtttatttggaattgttggtgagggaagggaagtatattgttattaagttgggatttttggtggaatgtgataaagtgtttagtgggtttttgtgttatgatttttgatagtgattattttttttttggattttggggttagaaaggggttagatggattttttttgtagagagaaatgaaaataagtggggtgataggggtttttttttaggttaaaaaggaaatgggtgaagagaaggggtgttaggaaattttttttagtattgggtagaggtagggtttggagatagtaggaaggggtagggatggttttttggatttttgggttggggttattttgagaggttatttttttgtggagggttggtggggggaggggtgttgtttgttattttgggttttttatttgggtagttgaggttttgggaatatgtggttggttaggtttgggttgatgtaattggttttgtgttgtgtgtatttggttgggtgggggagggtgggtattgagtgggatgtgagtggggatgggtggggttggtgtggtgtaggtggtttagtagggagggggggtttttgtagtaatttattttaaaattttttttaaatttgtggtgagggttgaagagattgagtggtagtgatagtaagtttttttttttttttgtgttttgttttttttatgttttttgtttttttgtggtttaaggtttgagtattttttgtttattggtttttggtttttgtttttgttgtttagatttttagtttgtttgggattagtggttgggagtaaattttagttggtagtggtaatgtaagtttagtttttttggtttttttttttggtttttgtttttggttggttggtttagattgtatgtgtggtgattttggtgggtgggtagggtttgtgtgggtggtgagtttttttttgggtatttttttatttagtgtgtgtgttttttttttttgtatttaagatgatagagggggatgttgtatgtttggtgtttatggatttgtgtggggtatggagtttttatgtgtgtgtttgtatgtatgtttttagttgggagaggtgtttgtagtggtttgtggtgttagtagggtatgattgtttattttggtatggtggaggtagagtagtaaggtaaggttttaatgtatttaagatagtagaaagtttatggttttggaggtttgattggggttggtgtggtttgtgttttttttttggtttgggttgtggggtggtttgttttttttggtgttttggtgagttattttttttttttggtttgaggtttgggttagggtttggggagtgtgtgtggttggagtattgtttgtgtatattgttgttttatttgtttatgagtttggtttttgagtgttgagttgttattgtggtttttttttttttttttttttttttttttttttttttttttttggttgtggttttttttggtttgagttagtattttttgtggttttgtttggtttggttttttttgtgtggattatggtttttttgaagtgagaatagtttagaagttggatgaaaagttttagtgtgatgttgtgagttttgattttttttattttgtttttgggtgtgggttttggtttttgtttgtggtttgttgttgtgtttattgtttgttgttggttggggaggaggtggtagttggggttgggggtggtgtttgtttgtttgtttgttagtgtgattggttagttgtgggattttaagggggagggtttatgttgtgttttggtggttatttttaaaagtaggttatttattttgtttttgttgtttttgttgtttgtatgtttgtgtgttttttttgattttgttttttttttttttgatttttttttggagtttttgttattttttttttttttttgttggtttttaaaatttatagtgatttggggaagtagagtaatttttttaagttgttggtttgatttaagtggggaatggtaagtaaaaataaattaaaatgagaaataatatagttttaaaaaaaaatgtttaagaaaaaagaagagggataaaatttggattaatgaatattaaattttagtattgagtgttttggttggtgagtttgttgattggtttatttaattgttgtgttttttgatagagtgttggtgttagtttttagtgttatgatttttgagttatttggttgttttaagtttttgtgattttttttgttattagttgatttttaaaaaaaaaaggggggggtgtatggttttgttttgttgggattttgtttttggtttgttttggggggtggggataggtgagttttagtttttttatatgtggtttgggtttgggttttgtggatgtttagtgaagtttggtttgtagtttgttgtaatgaaggggaagtttgatttttattaaggtttatagtttgaaaattatttatttgtttttggaaattttgtttagagatatgtgtttgtggggtattggtgaggagggagtaggaaagtgaggttatgtgtggatagggtttgagagttgttttttttttgttaggaatattgaagggggtaggggaaggtggagagttggatagggatgggtggggagagggatatatagatttattggaattttggagtgatttttggttttttttttgttttaatgtttttaattttatatgtatatatttatttatttatatagatatatatgtttttatttttgaagatgttgtttgttttatttatttagtttttttgtggtggttgagtgttttttagtgattgttgtttgtatattttggttttggttaaagagggaatgggttttggaaagggggtggggggagtttgtttttggattttttatttttgattttttaaatagttatatatttgggattggagttgttttatgtatagagagtttagggttgggtataggggttatagtgtgtttttttgataatgtgttatttggagtttttatttggtttgtagatattaaagtgagtggtagttaataggttggagtgattggggttttttgggaagtgtttagggatgttttttaggggagaagaatttggtattaagtttgtggagttgagaatgggaagttgtgtggttttggggttagttagtgattgggagggaagaggatttgttggagtttatgtatgtattgtggagtttggtaaaatttaaagggggaggtagttgggtagatagaggtttttgtttttgttgtttttttaattttagatgttgttagggaattgaggttagggggttggtgggggtgggtggaggttagggtttgtgtgatgatttaaatttatttgttagtattaaggaatgtttgtaggttagttgtttagagtttttattaggttaggggttaaggtttttattagtttaagtttagatttatagtttattttttgaatagaaatgggggttttgttttagtttttttatttttttaggattttttggttatttttttaggtttatagttttttttttattttttttttagtttttttttttatttttaagttttttttttttttaattttttatattttttttaagtgtttttaaaggttttattttatttttgtatataggaagtagtttggaaaaatttttagttggtttttgatttggttatttttaggttgttttagggaataaagttggggttttgaggtttgtgggaagagtgggattagttagtttgattatttatttagattttgttagggtttggtttatagttggtatagtttttgtggaggtatggattgagaatgggaatgtagtaattttttttaatttaattaaaatgttttagggagtttatttagttagttttatttttagtatatgttgttgtggtttggtggaggtgttaggttatttttttagtatttttagttttattggtatggtgttttaaggtttttatgaggaaaagggttggtttttatttattttaattttttttttttattatttgtgtattagttttgtttttattatttggtaggttttttagtagtagggataaggtttttgtatagttagtaaatgtttattttttggtttagggtttttttttaggtaggtttttttatttgggttttatgttttaggttgatgaatgggatatggaagggaagttattaatttttttttttgtgtgtttttagtattttaggagtataagttgtagatattttggggtaggatggaggttttgagttttaagggtttattttggtttttttttttgtatttttttttaatttggttttttttagtttttaaaagagttaatagatttgaaagagtaggttttagtaaaaaataaataaataaatttgaagttaagaggaggttggaggggttttaaggagggatagttattattagttattttgtggttttaggtattttttatttttataagttaattgttttttatggtggtatttagtaaggtgtgttataataatttgtttgtgtttttttttggggttttgtttagggatttaggggagtgagggtatagaattttttttatataaggttaggattataatttggtttaggggtttttgagttatttttattagggtgagaaagtatggtttattttttttttttattgtggagatataatttggttgtgatttggaggggttaattttggattttatgttttagtgtgttgttattggtatttataataatgtatttttaaggatttagttagtgtttatattgttattaaattaaaagtttaagttatttagttatttgagtttttaaaaaaggggaaaaagtataaaataataattataagattatatgtatttttgtggtatttttttttttatgggtttagttttttgaataatttgattttatttatttttatttttttttttaggttgtttgttgtaggggaaggggtgttagagtagattgtttttttaaagaattttttgaaggtttagagagggtataaaggggtttagggttatttagtagattgggggaaggggtagtgaagtagagagtagtttatatagaggttatgttggtttttagttgaggggtaaatttggttttgtttggagggttttattttgggagtgtagtggttattttttatagtttgtggttttgaaggtagtttagaaggagttaaggaggaaggggaaggtgttttaggtgagggggaaggggagaaaggggtgggggtggagaaaagtgtgaaaggtagttaggagttagtggtggttttagataaagaaagtagtgattgggttaaggtataatagttgtattttgttttgatgttttgttatttttaatatttagggaaatttttgtttgtgtgggtgtgggtggttaatttagaagttggtggatgaagggataaaattttttttgagattggaaagaaggtgaggagagagttattgggttttgttgttttttatatatttttttaagtggttttattgtaatggaaggaggttttgttttttattttattttttgatttttaggtgattagtaggatattgatttgtaggaagggtaggatataaatttggtgaattgaaggagagagaattgggttggttttttttaattttttgattttgattgtgggttaatttttgtttttttttttttttttttttttttgtttaggtttttgtaataaagtattaaaaagataaagagaaagtaaaggaaagggtttttttggtttagtgttaatgttttagttttatgtggatttggaggt

SEQ ID NO: 670 - DNA, 6188 bp, Artificial Sequence
  chemically treated genomic DNA (Homo sapiens)
aataaaataaaataaatagaaaaaaagaaagtaagttatggggtttaatttgagagaattgagtgtgggtgtttatttgtaagagagtgaggggaaagaggttttttaagtttttttaattttgaaaatggggaggaggttttttaagttgtagtgttagagtgatatgatttagttttttatttttagagatggggtttggttatgttgtttaggttggttttgaatttttgggtttaagttagttttttgagttgttgggattatagatatgtgttattttatttagtttgatttggtttttgtgtttagaagatatttgttgttgttttaggtgttaaggttagtgttgggtataggggtgttagagtttattgagaaatggatatagaattttagtgtttatttttttattttggagtttgtgttttttattttatatagttttgttgtttgggaggattgtttgttttttgaggttatttgtttttggttattgtgttaggatagttttgttgtgggtatgagttatagggtaagaaagaatatatttgggagttggaaggtttaattttagggaaagtatgtagtttggggtagggtattaaggaggtttttagtttttatattttaaggaaagaaatattaggaaggtgtggttttaggtaggtttttttttttttttggattattgtttgtttgttattgatttttgttttaattttatattaatagttgttatatatatatatatgtattttaagagttggagtttttttaagttatttaggttggttttgaatttttgggtttaagtgatttttttgttttggttttttaaagtgttgagattataggtgtgagttattatgtttggtagtaattattttttagttttaatgtgtattagttttgtaattaagtgtattttatatgtttttgttaattaatttaatagttttataatggtggttattaattgttgttttatgaaagaggaaattggggttttgagagtttggggattgatttaaagtatttagtgtttgtggatgtaattgggatgtagggagttagtgggttgggggtgaggtgttttggtaggtggaggtggtggggtatttatttttatgatggttgttgttggttggttgtttttgttggtgattggtgttttataggaggtttggggtttggtgatgatgtttgttggagtttgagggtttgttttttgtggggttggggtttaggtttttttttgtagagttggagtttttttgtttatttggtttaaattttgggatttggaatatgttttgggttgtgaggataagatgttatgtagttaaggtatagttggggttaatggtggttttggaaggtagaggtaggtatttttggtttttttttttattgtagtgtttttaggtttgttaggttttttgggtttttatttgtttgttgggtttggtttggtagggagttgaggttgttggtttaggattttagtttttttttagaattttggtggatttaggttttgttttgtttgtggtgatggtgtataggttttattttaagtttgattttgaggtttttgatttgggtttgttgtttttttttagtattttgggttttgggttttagttgtttgggtaatgggaattgttagtgatttggtttaattattttttggaatgttatttgggtaggtttagaggtggggttaatttggtttggttttgtttttttgttggatttaaggttttttgtttgtattttttttttttttttttttggttttggggtttatatttttgttgttttatattttgggtgtgtgtgggagtaggagagggattttttggggtttttatttggaatttggagatttatttttgttaataagttttttagtttttttgggttttagtttttttttagtgaagtggggatagtgatagtttttttgggagttagtgaaaattttgtgaagggagtgattattgtgggtgaaggtgtttggtatagttataattgaagtttagttgttggatgtgattattgttgttattgttattgttttgtttggattgggtgtttggttggaaagttttgttttttgtttttttttttaggtgtggaagttttgtgttgtttgttttgggggatattttttgtgttattttgggggtattggagataaggaaaggaattttttttttggttgggatggttgtttgggtgtgggaggagggttggggatttggtgagggaggattgtagggtttgtgggggttttatgtttggtaggtggttggttaggtgagtagggttgtgggtgtgttggggtgaggggtgggtttgtgtgggggatttggggttttgtgggtttaggtttgggggtggggtttgggggttattttggttatgggtggaagttttttttagagattgagggatgggaatttgttgttgtttttggttgggtggtatgattttgatttgggtataggagagaggagtgtgggaattggtggatttttatataagtaaaggtgggtggtatggggtatggtttatttggggattttttggatgtggtatggtttttgtaatttggttgtttttttgttgttttttgtaattttgggtgtttgttagtggtgtagtttgtgttaatttttgtatggttttatgttgggtgtggtgttggattgtggagttagttgggttgttgtgtaatttgtgtagtgaatggtgtttgtgtaggtgtggagggggaggggggtggagtagtgggagttggggagttggagttttgggtttttatgatttgagttggtttttttattagtggtttgaggatttggtgtttgttttttttttttttttgaggttggagtgtggatgtggtgggggagggtggggtgggggtagtttttgagaattatgaggataggaggtagaggttttttttatttgtattattggaggagagagagttttttttagtttggggagggggagagtggggtattgggtgttttttgtagtggttgttgttttgatttgatgggtattagttggttttttttttttatttaggatgatatgaatgattgaggttagggagttttttttttgggtttttgtatttttttatttttggttttggggtaggtttagggaggagatatttttaatttttatttggtttgttttggagaaaagagattgtttttttatgtttttgagtgaggggtttggggtttaggttgtttgtgttttttaagggtaagggtttttttgttgaggaggaggggtttgttagttataatttttttttttttgagtgttttatttttttttttgtattttgtaatttttatttttttgtatttatttttttggttttgttgatagtttttttttgtttgtttttgggatttaggtttttttttttgatatggagagtaatttgtttggtttggtgtttgttgttgggttggtgtttgtgttgttatttgttgtgattttggggttgatagttgtttatattattttgtatgttttgttttttttttttgtttatgtttagttttggttggtgtttttgtatgggtataagtgttttagttattagatggtgtttttggttttttgtttgttttgggttgttttgtgtattatttttttttttttttatttttgagatattttttgtgttaattgtttggggtttttgtttttttggtttttttattgttgttttgtttgtttgtagttttttattttgatgtttatgaatttttattttgtttaggtaattaattgtggttttgggtggggggtgggaggtggtaagttttaaggatttataggagtgaagggtatttttgtttttaggtggtgtttaaggttaaggtgaagtgttggttggagatgagttgaggtttgtaagtatttgggatattggtgggtttagtttttaggttaggggtaggtgatagttttatgtagatttttttttattttttagggttgagataaaggtaatttagggaatgtttgtggaagattttggaaaagttaaagtatttggtgtagatggtttagtagaggttttgtagatttgtaaggtataggaataggaatgtttgtggtagtgtgagggagagggttttagtgttatttattatggagggtgagttggaggttttagtttatggaagtattaaagttatatgtatttttgggtgatttggggttgtaatgtttttgttatttgtatagtgttttatggtttataaagagtttttttagttattttttatttgtataatttttttgagaggttattatttttttttgagagatgaagaaattgaggtttagttaggtaagatagtaggattaaggttgtagagttggggtttagatagagatttttgattttagttggtgtattttttgaagtattatggttgttagttattttttgatttttttgggttttagtttttttatttgtaagagtggaggaatagggtttagattggatgttttgagttttgttgatattggggttttttgtaggaggtggggtaggtggtgagtgttgagggttgttgagggtttgtgttgattgtgttgtggttgtaggtttgttgtttgaggggtttttgtgggggttttgttgttttttttgttggtgaatgtgttgtgtgttgtgtttttttattggtgttgggtatagttttgggttttgttgtttgtttgtgttttggtgagtgattttttgtttgttatttgtgtgttgttttttgttgtttgtttttgttttgttgttaggtgggtgttttttattagtatttatttggaggttaaggtagggttgtagtattgatgtttaggtgttttttgggttttttggtagtggtttttagggtgtagaggaagttgggagttttttttttttgagggttttttgttgttatttgtgttaggggattagtgtgtgttaggtggttgtgatgggtggtgttatggttttgttttatgttagttgggtttgttataatttgatagtattggttttggttttttagagttggttggatatttttgattatgattggtataatgtgtttgattaggtgggtatatgtatgtttgttatttttttagtagttgtggtattttggttttagttggtttgggttttgttttattatttttttggtgtgattgtagattggtattagtttttgtttttttataggtggatttggtgaatgatttggggaataaaggttatttggtatttggttttattttttttgtgtgggagttattgtttattattttgttggtgggttttttttgggtgtattggtttttataggatttggtaagggtttgtttttttttttgtggggttagtggagggggtggatgttgtaaattttgggttggagtttggggttgggtttgggaggttagtgtaggataggagtaagtattgatgatggtttttttttttagagtattagttatatttttaatgggtaggtttttgttttttggttttatttttttgattgggttgggtattgtgaagatgagggttgtttttgggagtatagttggggtgagagtattaggtaggagttgtggtattgttttagtatttttgttttatttgtttattttgttggttttattaagttatgggggattgagatagttgggttttgttttttatttttgttatggtttttgtttttttatttgtattaggtgaggttttttgggtttttattgttaaagtttttattttttgtttagagatgtattttgttttgggttttgaaggtttaggttataggggttttgttttaagtttgttttttttttgtagtttttgtgattgtggttttggttattgttttgagattgattttgtttttttgttgtagtatgttgggtagtttaggttttgggagttggtatggtgttattgggtgtgagttgggttggtatgggggtagttagatgaagattatttttttgttttttttttaggtgttaggattaggtggttattattatagtttttattttattttatagatgtgattttttttttttttttatagaatatttaggttttagttttttttatt

SEQ ID NO: 671 - DNA, 6188 bp, Artificial Sequence
  chemically treated genomic DNA (Homo sapiens)
ggtgagggggattggggtttgggtattttgtgggggagggagggggattatgtttgtggggtggagtagagattgtggtggtggttgtttggttttggtatttgggagaagagtagaggagtggtttttgtttggttgtttttatattagtttggtttatgtttgatggtattatattagtttttagagtttagattgtttgatatattgtagtagagaaatagggttagttttaggatagtgattagggttatagttataagagttgtaggaggaagataggtttagaatagaatttttgtgatttagatttttggggtttaggataaagtatatttttaggtaagaggtggaggttttagtaataggaatttaggggattttatttagtatagatggggaagtaaaggttatggtaggggtggaaggtaagatttggttattttggttttttatagtttgatggagttagtggggtgggtgggtagggtaggggtattgaggtagtgttatggtttttatttggtgtttttattttggttgtgtttttaggagtagtttttatttttatagtgtttagtttggttaaagaagtaggattgagaggtaaagatttgtttattgaggatgtggttggtgttttgggggaggaagttattattgatatttatttttgttttgtattggttttttaggtttaattttagattttaatttaggatttgtaatatttgttttttttattggttttatagaagagggagtagatttttattaggttttgtgggggttggtgtatttggaagaagtttattagtagggtggtgggtagtagtttttatatgaagaggatgaggttaaatattaggtagtttttgttttttaggttatttattaggtttgtttgtgggaaggtaggggttggtgttagtttgtagttatgttaaaggggtagtgggatagggtttaggttagttggggttaaggtgttatggttattaaggaggtggtagatatgtgtatgtttatttggttagatatattgtattagttgtaattgaaggtgtttagttggttttggggggttaaggttagtgttgttaggttgtagtaggtttggttggtatagagtaggattatggtgttatttattgtggttgtttggtatatattggttttttggtataggtaataatagaggatttttagggagagaaggtttttagttttttttatattttgagaattgttgttgagagatttaaaagatatttgggtattagtgttgtagttttattttggtttttaggtagatgttagtggagggtgtttgtttggtgatgaggtagaggtaggtagtaagagatagtgtgtagatgatgaatagggagttgtttattaggatgtggataagtagtagggtttagggttgtgtttggtgttgatgggagagtatagtatatagtatgtttattagtagaaagagtagtgaggtttttataaaggttttttggatagtgagtttgtagttatagtatagttagtgtgggtttttaatagtttttagtatttattatttgttttattttttgtaggaaattttaatgttgataaaatttagggtatttagtttgagttttgtttttttatttttatagatggagaaattgaggtttaaaaaggttagaaggtgattgatagttatggtattttggaaggtgtattaattggagttagaagtttttgtttgagttttagttttgtgattttgattttgttgttttatttggttgggttttagtttttttattttttaagggaggatagtagttttttagggaaattgtataaataaaagatggttgggaaagttttttataaattgtaagatattgtataaatgatgagggtattgtggttttaggttatttaggagtgtatatggttttggtgtttttatgggttggagtttttagtttgttttttatggtggatgatattggggtttttttttttatattattataagtatttttatttttgtgttttgtagatttgtaaggtttttgttgagttatttgtgttaggtgttttaatttttttaagattttttatagatattttttgggttgtttttgttttagttttgagaggtgggaagggatttatatgggattgttatttgtttttgatttggaggttgagtttattagtgttttgagtatttataagttttggtttatttttggttgatgttttattttggttttgaatattatttaggagtagagatgttttttatttttgtgggtttttgaggtttgttattttttgttttttatttgggattatagttggttatttgggtaaagtagaggtttataagtgttaaggtgaagaattgtaggtagatggggtagtagtagagaagttagaagggtaagggttttaggtggttggtgtggggagtattttggaagtagaaggagaagagggtggtatgtaaggtggtttagagtagatagagggttaggaatattgtttgatagttgagatgtttgtgtttatatagaagtattagttagagttgggtatagatggagaagaagagtagggtatatagggtggtgtaggtagttgttagttttagggttatagtaggtggtagtgtaggtattagtttggtagtaggtattaggttagataggttattttttatgttagggagggaggtttgaattttggagatagataaggagggattgttggtgggattagggaaataaatatggaggggtgggaattgtagggtgtagagagggagatggggtgtttaggaggaaagaagttgtggttgataggttttttttttttaatagagagatttttgtttttggggaatataggtagtttgggttttaggttttttatttaggggtatggaagggtagttttttttttttaggatagattggataggggttgggggtgttttttttttgggtttattttagagttaaggatggggggatgtagaggtttaaggagaggattttttggttttggttgtttatgttgttttgggtggagggggagagttggttgatatttgttgggttagggtagtggttgttgtgaggggtgtttaatgttttgttttttttttttttaagttgggggaggtttttttttttttaataatgtggatggggagggtttttgttttttgtttttgtaatttttgaaagttgtttttgttttatttttttttattgtgtttatgttttagttttaaggggagggaggaggtggatgttaggtttttaggttgttgatgggagagttggtttaggttgtggggatttggggttttggttttttggtttttgttgttttgtttttttttttttttgtgtttgtgtgggtgttgtttgttatgtaaattgtgtagtggtttggttggttttgtagtttagtgttgtatttggtgtgaaattgtatgagaattggtgtgagttgtgttgttggtgggtgtttggggttatgggaggtggtaggagggtggttgagttgtgggggttgtgttgtatttagggggtttttgggtgggttgtgttttgtgttgtttgtttttatttgtatgggggtttgttagtttttatgttttttttttttatatttaaattggggttgtgttgtttggttgggggtggtaatggatttttgttttttggtttttgaagaaaatttttgtttatagttaagatggtttttgggttttgtttttgggtttgaatttgtggagttttgaattttttgtgtgggtttgttttttgttttggtgtgtttgtggttttgtttatttggttggttgtttgttaggtgtgaagtttttatgggttttatggtttttttttattgggtttttggttttttttttgtgtttgggtagttattttagttagggaggaggtttttttttttatttttagtgtttttgagatggtgtgggaggtgttttttgaggtgggtggtgtgaagtttttgtgtttgggaggaggagtggggagtgggattttttgattgggtatttagtttaggtggagtggtaataatagtaataataattatatttgatggttgagttttagttgtggttgtgttaagtgtttttgtttgtagtaattattttttttataaagtttttattggtttttgggggagttgttattatttttattttattggggggaaattaaggtttagaggggttgaaggatttgttggtagaagtgggtttttaggttttaaatggggattttagagaattttttttttgtttttatatatgtttaaggtgtgaggtagtgaggatgtgagttttggggttgaaggagggaggaaaaaggatgtggatgaggagttttggatttggtgggggggtggggttgggttgggttgattttgtttttggatttatttgagtgatgttttgagaggtgattgggttaggttgttgatagtttttgttgtttaagtaattagggtttggagtttggggtgttggagggaggtggtaggtttgggttaggggttttgagattgggtttggggtgagatttgtgtgttgttattatgggtggggtggggtttgggtttattggggttttgaggggagattgaggttttgagttgatagttttagttttttgttaggttagatttggtagatagatgagggtttaggaggtttggtgggtttgggggtgttatggtgggagaggaagttaggggtatttgtttttgttttttagggttattgttggttttagttgtgttttgattatgtaatattttgtttttatagtttagagtatgttttagattttagagtttgagttgagtgagtaggaagattttagttttgtagagaggggtttgggttttagttttgtaggggatgggtttttaggttttggtaagtattattgttaggttttaggttttttgtgggatgttagttattagtaggagtagttaattagtagtagttattatggaggtaagtattttattatttttatttgttgggatattttatttttagtttattggttttttgtattttagttgtatttataggtattgaatgttttgggttggtttttaaatttttagagttttagtttttttttttgtaaaatagtaattaataattattattgtaggattgttgagttaattagtaggaatatataggatgtatttgattatagagttggtgtatattaaagttaaaaaatggttgttgttgggtgtggtggtttatatttgtaattttagtattttgggaggttaaggtaggaggattgtttgagtttagaagtttaaggttagtttgagtgatttagggagattttagtttttaaaatatatatatatatatatagtagttattagtgtggggttaggatagaaattagtgataggtaggtagtgatttgaaaaggaaaaggggtttgtttaaggttatatttttttggtgtttttttttttagaatgtgggggttggaagtttttttggtgttttgttttaggttatatgttttttttgggattaggttttttagtttttagatgtgtttttttttgttttgtggtttgtatttatagtaggattgttttggtatagtggttaggggtagatgattttaaggggtagatagtttttttagatagtagggttgtgtggggtgagaagtataggttttaagatggaaggatggatattggggttttatgtttattttttagtaggttttagtatttttgtgtttagtattggttttggtatttggaataataatagatattttttgaatataaaaattaggttaagttgggtggggtggtatatgtttgtagttttagtaatttaggaggttggtttgagtttaggaatttaagattagtttgggtaatatagttagattttatttttaaaaatagaaaattaggttatgttattttggtattgtagtttaaaagattttttttttatttttaggattaagaaggtttaagaggtttttttttttttgtttttttatggataaatatttatatttgatttttttagattggattttatagtttgttttttttttttttgtttgttttgttttgtt

SEQ ID NO: 672 - DNA, 6161 bp, Artificial Sequence
  chemically treated genomic DNA (Homo sapiens)
ttttataaaaaatgaatttaattaagtatggtgtagtatatttttagttttagttattagggaggttgaagtgggaagattgtttgagtttagatggtggaagttgaagtgaattgtgtttgtattattgtattttagtttaggttatggagtgagaattttgtattataaataaataaataaattaggagtgtaaatgaagatttggattaggttattttttaaagaagagggtaattttgttggtggtagttagaatgattaggttaagagtaaaaatgaaatgaggatggttgaaaggatatagttataaaggagtgtaataggttgtgtgtttagaatagaggagagaattgagtatggatttgtaaatggtgtggatttagattatgagaattatattgattatgtgaaggtaagaggtgattttgaagtgatagtgttaaagttatagtatgagatggttgtgttagttttttatatattagtttatggttttgggaaaattatttaatttttttaaattttaatttttttatttatagaatgaggataaaatagtataaggattggtgagaggaaaaaatatatatgtaaaaaaagtatagtatttaataattttttaaaatatgttagtttttatttttttttttttttgagatagagttttgttttattatttagtttggagtgtagtggtatgattttagttttttgggtttaagtgatttttatgttttagttttttgagtagttgggattataggttggttaatttttgtattttatgtttggttaatttttgtatttttagtagagatggggttttgttatgttggttaggttggttttgaatttttggttttaagtgatttatttgttttggttttttaaagtgttgggattataggtatgagttattgaatttagttagttgttattgttattgttgtagaaaagattttgtttttttagtgattataagggaagatggtaatatagaggtttggattggaggtagaagtaaagggagttagtagaataggagaattaggttgtttttttttggtttttggttggggtattttttaaaaaagtgttagatttaagagtttagggggttggttgtgagtgtttttatgtggattagttatggttagattgttttatgtttgtgatttgttttgtataaatatattgttatgtataaataatggttttatatatatgtaatttggaaggataaatattaagtttaatattggtaatttgtagggagggaagtggaattgggtgtgtatgtgtgtgtgtgtttgagaatttgtattttattattttgtatgtttttattgtttgattttttttataatgagaatgagtttgtgtgttgggtaaaaaaaagaaaaagaaaaaaattttattaaaattaatttaattataaaagaagatgaattaaagaaaagtattgagagaaattgtttgtgatttaagttttggttttttaatgtttggttgaagtttagtttataaagagaatattgggttaaaggttttggagaaaagatgggaaaggtttggtgtttatgtggtgtttgttagttttataagggtaaggtatttggtagatggtttttagtttaatgggaattgtttttgttttttaggtatatagtttagggttggaaaagtttaataagtgtatggaatattggaaattttttgaaaatgttaaatttgttttgagatgttttgaagtttggtatatttttttgggtagtttagaggtttaggagtttagtttagtttagtttattgtgtttttttagttagtttttttttgtttttagtagttttttttttttttgagtagtggttttttgtaggtttgtgttttagttttgtttttttttttggatgtatttttgggttttattattatttggtgttgggttttttttttgtttttttttttttttttttttttttttttttttttttttttttttttttttttttttttagtttttgtattaggaaatggtttggattttggtagtggtttgatttgtgagatttttaatttggtaggtgggtggggttggagattggttgaggtgggggtaagggaggagttgggtttttgggttgtattagggggaattgggaatagagatggtgttggtaggaagtttttggttttgggttttttgggaggatagttattaaatatggatttggttatatagttggtagagtgttgggggtaggggtttaggtttagagttgtaattttagttttttttaggttagaatttgatttttggttttttttttttggttttgattttttttttttttttttagggttttatgttggttaggaggatgaaaggttttagttgggggttttttgttattagtgttgtgttttaagagttgttattttggttgggtgagtgttttttttttttttttgtttggagtaatttattgtgttttttatttttttttttagtttatttgtttttttttattttgtgtttttgttaatatttttatattttgtatttggggaggttttaagattttttttttagttaagaaggtgtggattaaggagatttgggggtgggggtgttgtaggggtgttattgagttgatgttgttttattgtgaaaagaatttaaagtattttaaatagaaaatttatttgttttatatttaatttggtatattaggaatgtaatggttagttatttatagtttagttttatattatgatttaatttttttgtttttgtttttttttgtttagtgagttttgagtatttttttttttttttttattttattgggttggttaaattagaagtgttttttttgattttttttttatatatttatgttagttttttatttttgttttttatagttgtttggatggtgattttagttttggttttagatatatgggttttggtggtagattttgtaggttataagttgaggtagaagggttatgtttgtggagttggttttggggagggtttagtagttgatttgttgtattaagttatgtgggtagttggagatgagtttgagatttgtttttggtgtattttttttgatttggtggtttagttgtatgtgattttaggtttagtttaataatgttttatttaggtttttgatgaatttttttaagggggttttaattggggttgttttgtagttttttttgtttttggggttgtattgtgtgttgagagtgttaataaggagatggaattattggtgggataagtgtaggagtggatggtggtttatttggagatgtagttggttgattggatttatagtagtgggggttgggtaagaagttttttaattgttgttttgtatatttttttgtaaagttggtttttagggggaagatgggggttttgattggaggttgaggtagttatgttgggaatgaggtatggggttgagtttttttgtttggatggaattagattgagagatgtttggattttgtattttagggttgttatgtagttaatattggatgggtttatggttttaagtagaggatagaatatatatttaaggagtgtttgtaggggaatgttgttagggattttttatatttgagttatggtgtgggaggtggggaggattagggatgggtggtggttaggtaagttttggtaaaggatgttagttttgagtagaattttttgttaaggaaaggatggaatttattggaggtagagtgggtagatgaattagttttttagggtgggggtgtatttggggggattagaggggtttgtagggagaagagttttggttagagaggagttgggtatggggtagtgtttgtagtggatggaattggaattttttttttttttttttttttattttttttttttttgatattttttttttttttttttttttttgtttttttttttttttataggtggagtttatagttttatatggggatggggttttggaggaggtgtggtgtttgtgggaggggaattgggtattagtgaggatagtgttgatgggggttgtggtattgggggttttggtaattgtaggggttttttttgttagtaagtgaaagtttagggttaggtggggttaggtgtggttgggggttaggagagtaggaatagaatagagaaatgtttttggaagaagtggagttggtggatgggtgggtatggaataggatgggtagagaaagggtagtgtgtgagggagttgagtaggttaggtaggtgattggaagagtgagtaggatatagaggggaggggaatgttttggtaagtttaggggtataggagatgtagttgttttagggttgggggaggtgggagggattatgtttataggtgtgggtatatgaaatgatttggaatttgttttatagttttgaggaaggtggatttatataagtagttgtattttattagatgagtgggatttagggaatgtagaaggtatatttttttggaatggaagtttaggggtttttaggtgatagggagaggtggttgttaatagtgggttgtttggatatgtgtgtgtatgtgtatgtatgttggtgtgtatgttgggttgtttggtaaatttggtggtgatgggattttttaaggagaaaatatttttttttgtaatggtaagaattaggggtagttttttgtttttttttttaatttttttttttttttgtttttgttttgatgttttaaggtttagagagaaatattgtatttagattgagggttttgttgtttttttttagaaagtgattggtaaggttttggagagaagagtagttttgtagttggttttgtttttttattattttttttttttgtgtattatgtatttgttgttgttttttgggttttgatagaagggtagggttgttgagtttggatgggtggaggtttaggtagttggatttgtttgttattttttttttttatttaggtataatggtgtttaaagtgtttttaatttttgggatttttgtatttaaattgaaattttaaattggggttttaattaattttttttttgaggttgtgggtataagtgttgatttagaatatagtttgggttttatattgtgttttagtgagattgttgatgttttgagatgattattttagatttgaattttatgggtgtgagggtgatgggtattttaggattggtttatgttgtgttgtgggttttggtttggttttattaggggttaggtatatgggttttagagtatttattatgatttagaagtatttatgatttatttgaagttatattgtttgtatgggtgttatttgtttgtattttagagtttgaggatgttaattttggaatttgtagttttttagaatagttttagattatggtttttttttttgaggaagaaattatttattttagatgtatgttttgagttagattttattgttgtattttttaaggtgttaagattgttgttttttaatgttaattttttgatatagtgttttagaattttgtttgtggttttgagtattgattattttagttagattatggttgattttttttggagatttttatttggttttagaatgtggtaatgtagttgtgtttgttagaatgtgggattaaattggttttaggtgttgagtttagatttttgtttttgagagagggttgtatttttttatggtatttttaggggaggtggtaggttgtatgtgttatttggttttgttgtgagtatgttgatattagaaatttagagttagtttgtggtaagtagttggggtggggggtttttgatttgtttaggataaattaggttagtggtttttaaattgtttggtagagttttgaagttttttaggggttgttttaggagtttttggggagatgaagggggtggggagttgagtaggttgggtaatttgtttttaaatagaatagttttttttgtagttgttttatatattggggtttagggtaagattttatttgtattaaggggtttgttgttgaaaaaaagttggaaaattattgattagattattggttttaaattggagtttgtgtttttttttttaggtatggagtatatttt

(The sequence listing continues in the following parts.)

1. A method for detecting, or for detecting and distinguishing between or among lung cell proliferative disorders in a subject, comprising determining the expression of at least one gene selected from the group consisting of AKT2, BCL2, CDKN2A, ERBB4, FOS, GSTP1, HRAS, MDR1(ABCB1), RARB, ESR1, BCL2 μl, PIK3CA, MAPK1, EREG, RASSF1, IGF1R, EGF, IGF1, STAT1, AREG, GP1BB, PTPRCAP(RPS6KB2), STK15(STK6), BTC, FOXF1, SHC1, STK12(AURKB), RASGRP2, ABCC4, RASGRP1, RASGRF1, MVP, ADAM17(TACE), ABCC12, PAK7 and NRG3 respectively and concluding therefrom upon the presence or absence of a lung cell proliferative disorder and/or distinguishing between or among lung cell proliferative disorders.

2. The method according to claim 1 wherein the presence or absence of lung cancer is determined.

3. A method according to claim 1 wherein lung squamous cell carcinoma is differentiated from lung adenocarcinoma and wherein the expression of the gene IGF1 is determined.

4. A method according to claim 1 wherein lung squamous cell carcinoma is detected and wherein the expression of at least one gene selected from the group consisting of IGF1, AREG and RASGRP1 is determined.

5. A method according to claim 1 wherein lung adenocarcinoma is detected and wherein the expression of at least one gene selected from the group consisting of AREG, GP1BB, FOXF1, RASGRP2 and NRG3 is determined.

6. A method according to any of claims 1 to 5 wherein said expression is determined by means of CpG methylation.

7. A method according to any of claims 1 to 5 wherein said expression is determined by means of mRNA or protein expression.

8. A method according to any of claims 1 to 6, comprising contacting genomic DNA isolated from a biological sample obtained from the subject, with at least one reagent, or series of reagents that distinguishes between methylated and non-methylated CpG dinucleotides within at least one target region of the genomic DNA, wherein the target region comprises, or hybridises under stringent conditions to a sequence of at least 16 contiguous nucleotides of at least of the genes wherein said contiguous nucleotides comprise at least one CpG dinucleotide sequence, and whereby detecting, or detecting and distinguishing between or among lung cell proliferative disorders is, at least in part, afforded.

9. A method according to claim 8 comprising
a. extracting or otherwise isolating genomic DNA from a biological sample obtained from the subject;
b. treating the genomic DNA of a), or a fragment thereof, with one or more reagents to convert cytosine bases that are unmethylated in the 5-position thereof to uracil or to another base that is detectably dissimilar to cytosine in terms of hybridization properties;
c. contacting the treated genomic DNA, or the treated fragment thereof, with an amplification enzyme and at least two primers comprising, in each case a contiguous sequence of at least 9 nucleotides that is complementary to, or hybridizes under moderately stringent or stringent conditions to a sequence selected from the group consisting of SEQ ID NO: 236 to SEQ ID NO: 347, and complements thereof, wherein the treated genomic DNA or the fragment thereof is either amplified to produce at least one amplificate, or is not amplified; and
d. determining, based on a presence or absence of, or on a property of said amplificate, the methylation state of at least one CpG dinucleotide of a sequence selected from the group consisting SEQ ID NO: 1 to SEQ ID NO: 56, or an average, or a value reflecting an average methylation state of a plurality of CpG dinucleotides of a sequence selected from the groups consisting of SEQ ID NO: 1 to SEQ ID NO: 56, whereby at least one of detecting, or detecting and distinguishing between lung cell proliferative disorders is, at least in part, afforded.

10. The method of claim 9, wherein treating the genomic DNA, or the fragment thereof in b), comprises use of a reagent selected from the group consisting of bisulfite, hydrogen sulfite, disulfite, and combinations thereof.

11. The method of claim 9, wherein contacting or amplifying in c) comprises use of at least one method selected from the group consisting of: use of a heat-resistant DNA polymerase as the amplification enzyme; use of a polymerase lacking 5′-3′ exonuclease activity; use of a polymerase chain reaction (PCR); generation of an amplificate nucleic acid molecule carrying a detectable labels; and combinations thereof.

12. The method of claim 9, wherein the biological sample obtained from the subject is selected from the group consisting of cell lines, histological slides, biopsies, paraffin-embedded tissue, bodily fluids, sputum, blood plasma, blood serum, whole blood, isolated blood cells, cells isolated from the blood and all possible combinations thereof.

13. The method of claim 9, further comprising in step d) the use of at least one nucleic acid molecule or peptide nucleic acid molecule comprising in each case a contiguous sequence at least 9 nucleotides in length that is complementary to, or hybridizes under moderately stringent or stringent conditions to a sequence selected from the group consisting of SEQ ID NO: 236 to SEQ ID NO: 347, and complements thereof, wherein said nucleic acid molecule or peptide nucleic acid molecule suppresses amplification of the nucleic acid to which it is hybridized.

14. A treated nucleic acid derived from genomic SEQ ID NO: 1 to SEQ ID NO: 56 wherein the treatment is suitable to convert at least one unmethylated cytosine base of the genomic DNA sequence to uracil or another base that is detectably dissimilar to cytosine in terms of hybridization.

15. A nucleic acid, comprising at least 16 contiguous nucleotides of a treated genomic DNA sequence selected from the group consisting of SEQ ID NO: 236 to SEQ ID NO: 347, and sequences complementary thereto, wherein the treatment is suitable to convert at least one unmethylated cytosine base of the genomic DNA sequence to uracil or another base that is detectably dissimilar to cytosine in terms of hybridization.

16. The nucleic acid of claims 14 and 15 wherein the contiguous base sequence comprises at least one CpG, TpG or CpA dinucleotide sequence.

17. The nucleic acid of claims 14 and 15 wherein the treatment comprises use of a reagent selected from the group consisting of bisulfite, hydrogen sulfite, disulfite, and combinations thereof.

18. A kit comprising a bisulfite reagent as well as oligonucleotides and/or PNA-oligomers having a length of at least 16 nucleotides which hybridizes to a pretreated nucleic acid sequence according to one of SEQ ID NO: 236 to SEQ ID NO: 347 and sequences complementary thereto, wherein the base sequence of said oligomers comprises at least one CpG, CpA or TpG dinucleotide.
